United States Patent Application Publication US 2025/0333767 A1 - sequence listing, part 11

SEQ ID NO: 40941 - protein, 978 aa, synthetic construct
  REGION 1..978: note = engineered CasX variant
QEIKRINKIRRRLVKDSNTKKAGKTGPMKTLLVRVMTPDLRERLENLRKKPENIPQPISNTSRANLNKLLTDYTEMKKAILHVYWEEFQKDPVGLMSRVAQPASKKIDQNKLKPEMDEKGNLTTAGFACSQCGQPLFVYKLEQVSEKGKAYTNYFGRCNVAEHEKLILLDQLKPEKDSDEAVTYSLGKFGQRALDFYSIHVTKESTHPVKPLAQIAGNRYASTPVGKALSDACMGTIASFLSKYQDIIIEHQKVVKGNQKRLESLRELAGKENLEYPSVTLPPQPHTKEGVDAYNEVIARVRMWVNLNLWQKLKLSRDDAKPLLRLKGFPSFPLVERQANEVDWWDMVCNVKKLINEKKEDGKVFWQNLAGYKRQEALRPYLSSEEDREKGKKFARYQLGDLLLHLEKKHGEDWGKVYDEAWERIDKKVEGLSKHIKLEEERRSEDAQSKAALTDWLRAKASFVIEGLKEADKDEFCRCELKLQKWYGDLRGKPFAIEAENSILDISGFSKQYNCAFIWQKDGVKKLNLYLIINYFKGGKLRFKKIKPEAFEANRFYTVINKKSGEIVPMEVNFNFDDPNLIILPLAFGKRQGREFIWNDLLSLETGSLKLANGRVIEKTLYNRRTRQDEPALFVALTFERREVLDSSNIKPMNLIGVDRGENIPAVIALTDPEGCPLSRFKDSLGNPTHILRIGESYKEKQRTIQAKKEVEQRRAGGYSRKYASKAKNLADDMVRNTARDLLYYAVTQDAMLIFENLSRGFGRQGKRTFMAERQYTRMEDWLTAKLAYEGLPSKTYLSKTLAQYTSKTCSNCGFTITSADYDRVLEKLKKTATGWMTTINGKELKVEGQITYYNRYKRQNVVKDLSVELDRLSEESVNNDISSWTKGRSGEALSLLKKRFSHRPVQEKFVCLNCGFETHADEQAALNIARSWLFLRSQEYKKYQTNKTTGNTDKRAFVETWQSFYRKKLKEVWKPAV

SEQ ID NO: 40942 - protein, 978 aa, synthetic construct
  REGION 1..978: note = engineered CasX variant
QEIKRINKIRRRLVKDSNTKKAGKTGPMKTLLVRVMTPDLRERLENLRKKPENIPQPISNTSRANLNKLLTDYTEMKKAILHVYWEEFQKDPVGLMSRVAQPASKKIDQNKLKPEMDEKGNLTTAGFACSQCGQPLFVYKLEQVSEKGKAYTNYFGRCNVAEHEKLILLDQLKPEKDSDEAVTYSLGKFGQRALDFYSIHVTKESTHPVKPLAQIAGNRYASAPVGKALSDACMGTIASFLSKYQDIIIEHQKVVKGNQKRLESLRELAGKENLEYPSVTLPPQPHTKEGVDAYNEVIARVRMWVNLNLWQKLKLSRDDAKPLLRLKGFPSFPLVERQANEVDWWDMVCNVKKLINEKKEDGKVFWQNLAGYKRQEALRPYLSSEEDREKGKKFARYQLGDLLLHLEKKHGEDWGKVYDEAWERIDKKVEGLSKHIKLEEERRSEDAQSKAALTDWLRAKASFVIEGLKEADKDEFCRCELKLQKWYGDLRGKPFAIEAENSILDISGFSKQYNCAFIWQKDGVKKLNLYLIINYFKGGKLRFKKIKPEAFEANRFYTVINKKSGEIVPMEVNFNFDDPNLIILPLAFGKRQGREFIWNDLLSLETGSLKLANGRVIEKTLYNRRTRQDEPALFVALTFERREVLDSSNIKPMNLIGVDRGENIPAVIALTDPEGCPLSRFKDSLGNPTHILRIGESYKEKQRTIQAKKEVEQRRAGGYSRKYASKAKNLADDMVRNTARDLLYYAVTQDAMLIFENLSRGFGRQGKRTFMAERQYTRMEDWLTAKLAYEGLPSKTYLSKTLAQYTSKTCSNCGFTITSADYDRVLEKLKKTATGWMTTINGKELKVEGQITYYNRYKRQNVVKDLSVELDRLSEESVNNDISSWTKGRSGEALSLLKKRFSHRPVQEKFVCLNCGFETHADEQAALNIARSWLFLRSQEYKKYQTNKTTGNTDKRAFVETWQSFYRKKLKEVWKPAV

SEQ ID NO: 40943 - protein, 978 aa, synthetic construct
  REGION 1..978: note = engineered CasX variant
QEIKRINKIRRRLVKDSNTKKAGKTGPMKTLLVRVMTPDLRERLENLRKKPENIPQPISNTSRANLNKLLTDYTEMKKAILHVYWEEFQKDPVGLMSRVAQPASKKIDQNKLKPEMDEKGNLTTAGFACSQCGQPLFVYKLEQVSEKGKAYTNYFGRCNVAEHEKLILLDQLKPEKDSDEAVTYSLGKFGQRALDFYSIHVTKESTHPVKPLAQIAGNRYASVPVGKALSDACMGTIASFLSKYQDIIIEHQKVVKGNQKRLESLRELAGKENLEYPSVTLPPQPHTKEGVDAYNEVIARVRMWVNLNLWQKLKLSRDDAKPLLRLKGFPSFPLVERQANEVDWWDMVCNVKKLINEKKEDGKVFWQNLAGYKRQEALRPYLSSEEDREKGKKFARYQLGDLLLHLEKKHGEDWGKVYDEAWERIDKKVEGLSKHIKLEEERRSEDAQSKAALTDWLRAKASFVIEGLKEADKDEFCRCELKLQKWYGDLRGKPFAIEAENSILDISGFSKQYNCAFIWQKDGVKKLNLYLIINYFKGGKLRFKKIKPEAFEANRFYTVINKKSGEIVPMEVNFNFDDPNLIILPLAFGKRQGREFIWNDLLSLETGSLKLANGRVIEKTLYNRRTRQDEPALFVALTFERREVLDSSNIKPMNLIGVDRGENIPAVIALTDPEGCPLSRFKDSLGNPTHILRIGESYKEKQRTIQAKKEVEQRRAGGYSRKYASKAKNLADDMVRNTARDLLYYAVTQDAMLIFENLSRGFGRQGKRTFMAERQYTRMEDWLTAKLAYEGLPSKTYLSKTLAQYTSKTCSNCGFTITSADYDRVLEKLKKTATGWMTTINGKELKVEGQITYYNRYKRQNVVKDLSVELDRLSEESVNNDISSWTKGRSGEALSLLKKRFSHRPVQEKFVCLNCGFETHADEQAALNIARSWLFLRSQEYKKYQTNKTTGNTDKRAFVETWQSFYRKKLKEVWKPAV

SEQ ID NO: 40944 - protein, 978 aa, synthetic construct
  REGION 1..978: note = engineered CasX variant
QEIKRINKIRRRLVKDSNTKKAGKTGPMKTLLVRVMTPDLRERLENLRKKPENIPQPISNTSRANLNKLLTDYTEMKKAILHVYWEEFQKDPVGLMSRVAQPASKKIDQNKLKPEMDEKGNLTTAGFACSQCGQPLFVYKLEQVSEKGKAYTNYFGRCNVAEHEKLIKLDQLKPEKDSDEAVTYSLGKFGQRALDFYSIHVTKESTHPVKPLAQIAGNRYASGPVGKALSDACMGTIASFLSKYQDIIIEHQKVVKGNQKRLESLRELAGKENLEYPSVTLPPQPHTKEGVDAYNEVIARVRMWVNLNLWQKLKLSRDDAKPLLRLKGFPSFPLVERQANEVDWWDMVCNVKKLINEKKEDGKVFWQNLAGYKRQEALRPYLSSEEDREKGKKFARYQLGDLLLHLEKKHGEDWGKVYDEAWERIDKKVEGLSKHIKLEEERRSEDAQSKAALTDWLRAKASFVIEGLKEADKDEFCRCELKLQKWYGDLRGKPFAIEAENSILDISGFSKQYNCAFIWQKDGVKKLNLYLIINYFKGGKLRFKKIKPEAFEANRFYTVINKKSGEIVPMEVNFNFDDPNLIILPLAFGKRQGREFIWNDLLSLETGSLKLANGRVIEKTLYNRRTRQDEPALFVALTFERREVLDSSNIKPMNLIGVDRGENIPAVIALTDPEGCPLSRFKDSLGNPTHILRIGESYKEKQRTIQAKKEVEQRRAGGYSRKYASKAKNLADDMVRNTARDLLYYAVTQDAMLIFENLSRGFGRQGKRTFMAERQYTRMEDWLTAKLAYEGLPSKTYLSKTLAQYTSKTCSNCGFTITSADYDRVLEKLKKTATGWMTTINGKELKVEGQITYYNRYKRQNVVKDLSVELDRLSEESVNNDISSWTKGRSGEALSLLKKRFSHRPVQEKFVCLNCGFETHADEQAALNIARSWLFLRSQEYKKYQTNKTTGNTDKRAFVETWQSFYRKKLKEVWKPAV

SEQ ID NO: 40945 - protein, 977 aa, synthetic construct
  REGION 1..977: note = engineered CasX variant
QEIKRINKIRRRLVKDSNTKKAGKTGPMKTLLVRVMTPDLRERLENLRKKPENIPQPISNTSRANLNKLLTDYTEMKKAILHVYWEEFQKDPVGLMSRVAQPASKKIDQNKLKPEMDEKGNLTTAGFACSQCGQPLFVYKLEQVSEKGKAYTNYFGRCNVAEHEKLILLDQLKPEKDSDEAVTYSLGKFGQRALDFYSIHVTKESTHPVKPLAQIAGNRYASPVGKALSDACMGTIASFLSKYQDIIIEHQKVVKGNQKRLESLRELAGKENLEYPSVTLPPQPHTKEGVDAYNEVIARVRMWVNLNLWQKLKLSRDDAKPLLRLKGFPSFPLVERQANEVDWWDMVCNVKKLINEKKEDGKVFWQNLAGYKRQEALRPYLSSEEDREKGKKFARYQLGDLLLHLEKKHGEDWGKVYDEAWERIDKKVEGLSKHIKLEEERRSEDAQSKAALTDWLRAKASFVIEGLKEADKDEFCRCELKLQKWYGDLRGKPFAIEAENSILDISGFSKQYNCAFIWQKDGVKKLNLYLIINYFKGGKLRFKKIKPEAFEANRFYTVINKKSGEIVPMEVNFNFDDPNLIILPLAFGKRQGREFIWNDLLSLETGSLKLANGRVIEKTLYNRRTRQDEPALFVALTFERREVLDSSNIKPMNLIGVDRGENIPAVIALTDPEGCPLSRFKDSLGNPTHILRIGESYKEKQRTIQAKKEVEQRRAGGYSRKYASKAKNLADDMVRNTARDLLYYAVTQDAMLIFENLSRGFGRQGKRTFMAERQYTRMEDWLTAKLAYEGLPSKTYLSKTLAQYTSKTCSNCGFTITSADYDRVLEKLKKTATGWMTTINGKELKVEGQITYYNRYKRQNVVKDLSVELDRLSEESVNNDISSWTKGRSGEALSLLKKRFSHRPVQEKFVCLNCGFETHADEQAALNIARSWLFLRSQEYKKYQTNKTTGNTDKRAFVETWQSFYRKKLKEVWKPAV

SEQ ID NO: 40946 - protein, 978 aa, synthetic construct
  REGION 1..978: note = engineered CasX variant
QEIKRINKIRRRLVKDSNTKKAGKTGPMKTLLVRVMTPDLRERLENLRKKPENIPQPISNTSRANLNKLLTDYTEMKKAILHVYWEEFQKDPVGLMSRVAQPASKKIDQNKLKPEMDEKGNLTTAGFACSQCGQPLFVYKLEQVSEKGKAYTNYFGRCNVAEHEKLILLDQLKPEKDSDEAVTYSLGKFGQRALDFYSIHVTKESTHPVKPLAQIAGNRYASYPVGKALSDACMGTIASFLSKYQDIIIEHQKVVKGNQKRLESLRELAGKENLEYPSVTLPPQPHTKEGVDAYNEVIARVRMWVNLNLWQKLKLSRDDAKPLLRLKGFPSFPLVERQANEVDWWDMVCNVKKLINEKKEDGKVFWQNLAGYKRQEALRPYLSSEEDRKKGKKFARYQLGDLLLHLEKKHGEDWGKVYDEAWERIDKKVEGLSKHIKLEEERRSEDAQSKAALTDWLRAKASFVIEGLKEADKDEFCRCELKLQKWYGDLRGKPFAIEAENSILDISGFSKQYNCAFIWQKDGVKKLNLYLIINYFKGGKLRFKKIKPEAFEANRFYTVINKKSGEIVIMEVNFNFDDPNLIILPLAFGKRQGREFIWNDLLSLETGSLKLANGRVIEKTLYNRRTRQDEPALFVALTFERREVLDSSNIKPMNLIGVDRGENIPAVIALTDPEGCPLSRFKDSLGNPTHILRIGESYKEKQRTIQAKKEVEQRRAGGYSRKYASKAKNLADDMVRNTARDLLYYAVTQDAMLIFENLSRGFGRQGKRTFMAERQYTRMEDWLTAKLAYEGLPSKTYLSKTLAQYTSKTCSNCGFTITSADYDRVLEKLKKTATGWMTTINGKELKVEGQITYYNRYKRQNVVKDLSVELDRLSEESVNNDISSWTKGRSGEALSLLKKRFSHRPVQEKFVCLNCGFETHADEQAALNIARSWLFLRSQEYKKYQTNKTTGNTDKRAFVETWQSFYRKKLKEVWKPAV

SEQ ID NO: 40947 - protein, 978 aa, synthetic construct
  REGION 1..978: note = engineered CasX variant
QEIKRINKIRRRLVKDSNTKKAGKTGPMKTLLVRVMTPDLRERLENLRKKPENIPQPISNTSRANLNKLLTDYTEMKKAILHVYWEEFQKDPVGLMSRVAQPASKKIDQNKLKPEMDEKGNLTTAGFACSQCGQPLFVYKLEQVSEKGKAYTNYFGRCNVAEHEKLILLDQLKPEKDSDEAVTYSLGKFGQRALDFYSIHVTKESTHPVKPLAQIAGNRYASHPVGKALSDACMGTIASFLSKYQDIIIEHQKVVKGNQKRLESLRELAGKENLEYPSVTLPPQPHTKEGVDAYNEVIARVRMWVNLNLWQKLKLSRDDAKPLLRLKGFPSFPLVERQANEVDWWDMVCNVKKLINEKKEDGKVFWQNLAGYKRQEALRPYLSSEEDRKKGKKFARYQLGDLLLHLEKKHGEDWGKVYDEAWERIDKKVEGLSKHIKLEEERRSEDAQSKAALTDWLRAKASFVIEGLKEADKDEFCRCELKLQKWYGDLRGKPFAIEAENSILDISGFSKQYNCAFIWQKDGVKKLNLYLIINYFKGGKLRFKKIKPEAFEANRFYTVINKKSGEIVIMEVNFNFDDPNLIILPLAFGKRQGREFIWNDLLSLETGSLKLANGRVIEKTLYNRRTRQDEPALFVALTFERREVLDSSNIKPMNLIGVDRGENIPAVIALTDPEGCPLSRFKDSLGNPTHILRIGESYKEKQRTIQAKKEVEQRRAGGYSRKYASKAKNLADDMVRNTARDLLYYAVTQDAMLIFENLSRGFGRQGKRTFMAERQYTRMEDWLTAKLAYEGLPSKTYLSKTLAQYTSKTCSNCGFTITSADYDRVLEKLKKTATGWMTTINGKELKVEGQITYYNRYKRQNVVKDLSVELDRLSEESVNNDISSWTKGRSGEALSLLKKRFSHRPVQEKFVCLNCGFETHADEQAALNIARSWLFLRSQEYKKYQTNKTTGNTDKRAFVETWQSFYRKKLKEVWKPAV

SEQ ID NO: 40948 - protein, 978 aa, synthetic construct
  REGION 1..978: note = engineered CasX variant
QEIKRINKIRRRLVKDSNTKKAGKTGPMKTLLVRVMTPDLRERLENLRKKPENIPQPISNTSRANLNKLLTDYTEMKKAILHVYWEEFQKDPVGLMSRVAQPASKKIDQNKLKPEMDEKGNLTTAGFACSQCGQPLFVYKLEQVSEKGKAYTNYFGRCNVAEHEKLILLDQLKPEKDSDEAVTYSLGKFGQRALDFYSIHVTKESTHPVKPLAQIAGNRYASSPVGKALSDACMGTIASFLSKYQDIIIEHQKVVKGNQKRLESLRELAGKENLEYPSVTLPPQPHTKEGVDAYNEVIARVRMWVNLNLWQKLKLSRDDAKPLLRLKGFPSFPLVERQANEVDWWDMVCNVKKLINEKKEDGKVFWQNLAGYKRQEALRPYLSSEEDRKKGKKFARYQLGDLLLHLEKKHGEDWGKVYDEAWERIDKKVEGLSKHIKLEEERRSEDAQSKAALTDWLRAKASFVIEGLKEADKDEFCRCELKLQKWYGDLRGKPFAIEAENSILDISGFSKQYNCAFIWQKDGVKKLNLYLIINYFKGGKLRFKKIKPEAFEANRFYTVINKKSGEIVIMEVNFNFDDPNLIILPLAFGKRQGREFIWNDLLSLETGSLKLANGRVIEKTLYNRRTRQDEPALFVALTFERREVLDSSNIKPMNLIGVDRGENIPAVIALTDPEGCPLSRFKDSLGNPTHILRIGESYKEKQRTIQAKKEVEQRRAGGYSRKYASKAKNLADDMVRNTARDLLYYAVTQDAMLIFENLSRGFGRQGKRTFMAERQYTRMEDWLTAKLAYEGLPSKTYLSKTLAQYTSKTCSNCGFTITSADYDRVLEKLKKTATGWMTTINGKELKVEGQITYYNRYKRQNVVKDLSVELDRLSEESVNNDISSWTKGRSGEALSLLKKRFSHRPVQEKFVCLNCGFETHADEQAALNIARSWLFLRSQEYKKYQTNKTTGNTDKRAFVETWQSFYRKKLKEVWKPAV

SEQ ID NO: 40949 - protein, 978 aa, synthetic construct
  REGION 1..978: note = engineered CasX variant
QEIKRINKIRRRLVKDSNTKKAGKTGPMKTLLVRVMTPDLRERLENLRKKPENIPQPISNTSRANLNKLLTDYTEMKKAILHVYWEEFQKDPVGLMSRVAQPASKKIDQNKLKPEMDEKGNLTTAGFACSQCGQPLFVYKLEQVSEKGKAYTNYFGRCNVAEHEKLILLDQLKPEKDSDEAVTYSLGKFGQRALDFYSIHVTKESTHPVKPLAQIAGNRYASTPVGKALSDACMGTIASFLSKYQDIIIEHQKVVKGNQKRLESLRELAGKENLEYPSVTLPPQPHTKEGVDAYNEVIARVRMWVNLNLWQKLKLSRDDAKPLLRLKGFPSFPLVERQANEVDWWDMVCNVKKLINEKKEDGKVFWQNLAGYKRQEALRPYLSSEEDRKKGKKFARYQLGDLLLHLEKKHGEDWGKVYDEAWERIDKKVEGLSKHIKLEEERRSEDAQSKAALTDWLRAKASFVIEGLKEADKDEFCRCELKLQKWYGDLRGKPFAIEAENSILDISGFSKQYNCAFIWQKDGVKKLNLYLIINYFKGGKLRFKKIKPEAFEANRFYTVINKKSGEIVIMEVNFNFDDPNLIILPLAFGKRQGREFIWNDLLSLETGSLKLANGRVIEKTLYNRRTRQDEPALFVALTFERREVLDSSNIKPMNLIGVDRGENIPAVIALTDPEGCPLSRFKDSLGNPTHILRIGESYKEKQRTIQAKKEVEQRRAGGYSRKYASKAKNLADDMVRNTARDLLYYAVTQDAMLIFENLSRGFGRQGKRTFMAERQYTRMEDWLTAKLAYEGLPSKTYLSKTLAQYTSKTCSNCGFTITSADYDRVLEKLKKTATGWMTTINGKELKVEGQITYYNRYKRQNVVKDLSVELDRLSEESVNNDISSWTKGRSGEALSLLKKRFSHRPVQEKFVCLNCGFETHADEQAALNIARSWLFLRSQEYKKYQTNKTTGNTDKRAFVETWQSFYRKKLKEVWKPAV

SEQ ID NO: 40950 - protein, 978 aa, synthetic construct
  REGION 1..978: note = engineered CasX variant
QEIKRINKIRRRLVKDSNTKKAGKTGPMKTLLVRVMTPDLRERLENLRKKPENIPQPISNTSRANLNKLLTDYTEMKKAILHVYWEEFQKDPVGLMSRVAQPASKKIDQNKLKPEMDEKGNLTTAGFACSQCGQPLFVYKLEQVSEKGKAYTNYFGRCNVAEHEKLILLDQLKPEKDSDEAVTYSLGKFGQRALDFYSIHVTKESTHPVKPLAQIAGNRYASAPVGKALSDACMGTIASFLSKYQDIIIEHQKVVKGNQKRLESLRELAGKENLEYPSVTLPPQPHTKEGVDAYNEVIARVRMWVNLNLWQKLKLSRDDAKPLLRLKGFPSFPLVERQANEVDWWDMVCNVKKLINEKKEDGKVFWQNLAGYKRQEALRPYLSSEEDRKKGKKFARYQLGDLLLHLEKKHGEDWGKVYDEAWERIDKKVEGLSKHIKLEEERRSEDAQSKAALTDWLRAKASFVIEGLKEADKDEFCRCELKLQKWYGDLRGKPFAIEAENSILDISGFSKQYNCAFIWQKDGVKKLNLYLIINYFKGGKLRFKKIKPEAFEANRFYTVINKKSGEIVIMEVNFNFDDPNLIILPLAFGKRQGREFIWNDLLSLETGSLKLANGRVIEKTLYNRRTRQDEPALFVALTFERREVLDSSNIKPMNLIGVDRGENIPAVIALTDPEGCPLSRFKDSLGNPTHILRIGESYKEKQRTIQAKKEVEQRRAGGYSRKYASKAKNLADDMVRNTARDLLYYAVTQDAMLIFENLSRGFGRQGKRTFMAERQYTRMEDWLTAKLAYEGLPSKTYLSKTLAQYTSKTCSNCGFTITSADYDRVLEKLKKTATGWMTTINGKELKVEGQITYYNRYKRQNVVKDLSVELDRLSEESVNNDISSWTKGRSGEALSLLKKRFSHRPVQEKFVCLNCGFETHADEQAALNIARSWLFLRSQEYKKYQTNKTTGNTDKRAFVETWQSFYRKKLKEVWKPAV

SEQ ID NO: 40951 - protein, 978 aa, synthetic construct
  REGION 1..978: note = engineered CasX variant
QEIKRINKIRRRLVKDSNTKKAGKTGPMKTLLVRVMTPDLRERLENLRKKPENIPQPISNTSRANLNKLLTDYTEMKKAILHVYWEEFQKDPVGLMSRVAQPASKKIDQNKLKPEMDEKGNLTTAGFACSQCGQPLFVYKLEQVSEKGKAYTNYFGRCNVAEHEKLILLDQLKPEKDSDEAVTYSLGKFGQRALDFYSIHVTKESTHPVKPLAQIAGNRYASVPVGKALSDACMGTIASFLSKYQDIIIEHQKVVKGNQKRLESLRELAGKENLEYPSVTLPPQPHTKEGVDAYNEVIARVRMWVNLNLWQKLKLSRDDAKPLLRLKGFPSFPLVERQANEVDWWDMVCNVKKLINEKKEDGKVFWQNLAGYKRQEALRPYLSSEEDRKKGKKFARYQLGDLLLHLEKKHGEDWGKVYDEAWERIDKKVEGLSKHIKLEEERRSEDAQSKAALTDWLRAKASFVIEGLKEADKDEFCRCELKLQKWYGDLRGKPFAIEAENSILDISGFSKQYNCAFIWQKDGVKKLNLYLIINYFKGGKLRFKKIKPEAFEANRFYTVINKKSGEIVIMEVNFNFDDPNLIILPLAFGKRQGREFIWNDLLSLETGSLKLANGRVIEKTLYNRRTRQDEPALFVALTFERREVLDSSNIKPMNLIGVDRGENIPAVIALTDPEGCPLSRFKDSLGNPTHILRIGESYKEKQRTIQAKKEVEQRRAGGYSRKYASKAKNLADDMVRNTARDLLYYAVTQDAMLIFENLSRGFGRQGKRTFMAERQYTRMEDWLTAKLAYEGLPSKTYLSKTLAQYTSKTCSNCGFTITSADYDRVLEKLKKTATGWMTTINGKELKVEGQITYYNRYKRQNVVKDLSVELDRLSEESVNNDISSWTKGRSGEALSLLKKRFSHRPVQEKFVCLNCGFETHADEQAALNIARSWLFLRSQEYKKYQTNKTTGNTDKRAFVETWQSFYRKKLKEVWKPAV

SEQ ID NO: 40952 - protein, 978 aa, synthetic construct
  REGION 1..978: note = engineered CasX variant
QEIKRINKIRRRLVKDSNTKKAGKTGPMKTLLVRVMTPDLRERLENLRKKPENIPQPISNTSRANLNKLLTDYTEMKKAILHVYWEEFQKDPVGLMSRVAQPASKKIDQNKLKPEMDEKGNLTTAGFACSQCGQPLFVYKLEQVSEKGKAYTNYFGRCNVAEHEKLIKLDQLKPEKDSDEAVTYSLGKFGQRALDFYSIHVTKESTHPVKPLAQIAGNRYASGPVGKALSDACMGTIASFLSKYQDIIIEHQKVVKGNQKRLESLRELAGKENLEYPSVTLPPQPHTKEGVDAYNEVIARVRMWVNLNLWQKLKLSRDDAKPLLRLKGFPSFPLVERQANEVDWWDMVCNVKKLINEKKEDGKVFWQNLAGYKRQEALRPYLSSEEDRKKGKKFARYQLGDLLLHLEKKHGEDWGKVYDEAWERIDKKVEGLSKHIKLEEERRSEDAQSKAALTDWLRAKASFVIEGLKEADKDEFCRCELKLQKWYGDLRGKPFAIEAENSILDISGFSKQYNCAFIWQKDGVKKLNLYLIINYFKGGKLRFKKIKPEAFEANRFYTVINKKSGEIVIMEVNFNFDDPNLIILPLAFGKRQGREFIWNDLLSLETGSLKLANGRVIEKTLYNRRTRQDEPALFVALTFERREVLDSSNIKPMNLIGVDRGENIPAVIALTDPEGCPLSRFKDSLGNPTHILRIGESYKEKQRTIQAKKEVEQRRAGGYSRKYASKAKNLADDMVRNTARDLLYYAVTQDAMLIFENLSRGFGRQGKRTFMAERQYTRMEDWLTAKLAYEGLPSKTYLSKTLAQYTSKTCSNCGFTITSADYDRVLEKLKKTATGWMTTINGKELKVEGQITYYNRYKRQNVVKDLSVELDRLSEESVNNDISSWTKGRSGEALSLLKKRFSHRPVQEKFVCLNCGFETHADEQAALNIARSWLFLRSQEYKKYQTNKTTGNTDKRAFVETWQSFYRKKLKEVWKPAV

SEQ ID NO: 40953 - protein, 977 aa, synthetic construct
  REGION 1..977: note = engineered CasX variant
QEIKRINKIRRRLVKDSNTKKAGKTGPMKTLLVRVMTPDLRERLENLRKKPENIPQPISNTSRANLNKLLTDYTEMKKAILHVYWEEFQKDPVGLMSRVAQPASKKIDQNKLKPEMDEKGNLTTAGFACSQCGQPLFVYKLEQVSEKGKAYTNYFGRCNVAEHEKLILLDQLKPEKDSDEAVTYSLGKFGQRALDFYSIHVTKESTHPVKPLAQIAGNRYASPVGKALSDACMGTIASFLSKYQDIIIEHQKVVKGNQKRLESLRELAGKENLEYPSVTLPPQPHTKEGVDAYNEVIARVRMWVNLNLWQKLKLSRDDAKPLLRLKGFPSFPLVERQANEVDWWDMVCNVKKLINEKKEDGKVFWQNLAGYKRQEALRPYLSSEEDRKKGKKFARYQLGDLLLHLEKKHGEDWGKVYDEAWERIDKKVEGLSKHIKLEEERRSEDAQSKAALTDWLRAKASFVIEGLKEADKDEFCRCELKLQKWYGDLRGKPFAIEAENSILDISGFSKQYNCAFIWQKDGVKKLNLYLIINYFKGGKLRFKKIKPEAFEANRFYTVINKKSGEIVIMEVNFNFDDPNLIILPLAFGKRQGREFIWNDLLSLETGSLKLANGRVIEKTLYNRRTRQDEPALFVALTFERREVLDSSNIKPMNLIGVDRGENIPAVIALTDPEGCPLSRFKDSLGNPTHILRIGESYKEKQRTIQAKKEVEQRRAGGYSRKYASKAKNLADDMVRNTARDLLYYAVTQDAMLIFENLSRGFGRQGKRTFMAERQYTRMEDWLTAKLAYEGLPSKTYLSKTLAQYTSKTCSNCGFTITSADYDRVLEKLKKTATGWMTTINGKELKVEGQITYYNRYKRQNVVKDLSVELDRLSEESVNNDISSWTKGRSGEALSLLKKRFSHRPVQEKFVCLNCGFETHADEQAALNIARSWLFLRSQEYKKYQTNKTTGNTDKRAFVETWQSFYRKKLKEVWKPAV

SEQ ID NO: 40954 - protein, 978 aa, synthetic construct
  REGION 1..978: note = engineered CasX variant
QEGKRINKIRRRLVKDSNTKKAGKTGPMKTLLVRVMTPDLRERLENLRKKPENIPQPISNTSRANLNKLLTDYTEMKKAILHVYWEEFQKDPVGLMSRVAQPASKKIDQNKLKPEMDEKGNLTTAGFACSQCGQPLFVYKLEQVSEKGKAYTNYFGRCNVAEHEKLILLAQLKPEKDSDEAVTYSLGKFGQRALDFYSIHVTKESTHPVKPLAQIAGNRYASYPVGKALSGACMGTIASFLSKYQDIIIEHQKVVKGNQKRLESLRELAGKENLEYPSVTLPPQPHTKEGVDAYNEVIARVRMWVNLNLWQKLKLSRDDAKPLLRLKGFPSFPLVERQANEVDWWDMVCNVKKLINEKKEDGKVFWQNLAGYKRQEALRPYLSSEEDRKKGKKFARYQLGDLLLHLEKKHGEDWGKVYDEAWERIDKKVEGLSKHIKLEEERRSEDAQSKAALTDWLRAKASFVIEGLKEADKDEFCRCELKLQKWYGDLRGKPFAIEAENSILDISGFSKQYNCAFIWQKDGVKKLNLYLIINYFKGGKLRFKKIKPEAFEANRFYTVINKKSGEIVPMEVNFNFDDPNLIILPLAFGKRQGREFIWNDLLSLETGSLKLANGRVIEKTLYNRRTRQDEPALFVALTFERREVLDSSNIKPMNLIGVDRGENIPAVIALTDPEGCPLSRFKDSLGNPTHILRIGESYKEKQRTIQAKKEVEQRRAGGYSRKYASKAKNLADDMVRNTARDLLYYAVTQDAMLIFENLSRGFGRQGKRTFMAERQYTRMEDWLTAKLAYEGLPSKTYLSKTLAQYTSKTCSNCGFTITSADYDRVLEKLKKTATGWMTTINGKELKVEGQITYYNRYKRQNVVKDLSVELDRLSEESVNNDISSWTKGRSGEALSLLKKRFSHRPVQEKFVCLNCGFETHADEQAALNIARSWLFLRSQEYKKYQTNKTTGNTDKRAFVETWQSFYRKKLKEVWKPAV

SEQ ID NO: 40955 - protein, 978 aa, synthetic construct
  REGION 1..978: note = engineered CasX variant
QEGKRINKIRRRLVKDSNTKKAGKTGPMKTLLVRVMTPDLRERLENLRKKPENIPQPISNTSRANLNKLLTDYTEMKKAILHVYWEEFQKDPVGLMSRVAQPASKKIDQNKLKPEMDEKGNLTTAGFACSQCGQPLFVYKLEQVSEKGKAYTNYFGRCNVAEHEKLILLAQLKPEKDSDEAVTYSLGKFGQRALDFYSIHVTKESTHPVKPLAQIAGNRYASHPVGKALSGACMGTIASFLSKYQDIIIEHQKVVKGNQKRLESLRELAGKENLEYPSVTLPPQPHTKEGVDAYNEVIARVRMWVNLNLWQKLKLSRDDAKPLLRLKGFPSFPLVERQANEVDWWDMVCNVKKLINEKKEDGKVFWQNLAGYKRQEALRPYLSSEEDRKKGKKFARYQLGDLLLHLEKKHGEDWGKVYDEAWERIDKKVEGLSKHIKLEEERRSEDAQSKAALTDWLRAKASFVIEGLKEADKDEFCRCELKLQKWYGDLRGKPFAIEAENSILDISGFSKQYNCAFIWQKDGVKKLNLYLIINYFKGGKLRFKKIKPEAFEANRFYTVINKKSGEIVPMEVNFNFDDPNLIILPLAFGKRQGREFIWNDLLSLETGSLKLANGRVIEKTLYNRRTRQDEPALFVALTFERREVLDSSNIKPMNLIGVDRGENIPAVIALTDPEGCPLSRFKDSLGNPTHILRIGESYKEKQRTIQAKKEVEQRRAGGYSRKYASKAKNLADDMVRNTARDLLYYAVTQDAMLIFENLSRGFGRQGKRTFMAERQYTRMEDWLTAKLAYEGLPSKTYLSKTLAQYTSKTCSNCGFTITSADYDRVLEKLKKTATGWMTTINGKELKVEGQITYYNRYKRQNVVKDLSVELDRLSEESVNNDISSWTKGRSGEALSLLKKRFSHRPVQEKFVCLNCGFETHADEQAALNIARSWLFLRSQEYKKYQTNKTTGNTDKRAFVETWQSFYRKKLKEVWKPAV

SEQ ID NO: 40956 - protein, 978 aa, synthetic construct
  REGION 1..978: note = engineered CasX variant
QEGKRINKIRRRLVKDSNTKKAGKTGPMKTLLVRVMTPDLRERLENLRKKPENIPQPISNTSRANLNKLLTDYTEMKKAILHVYWEEFQKDPVGLMSRVAQPASKKIDQNKLKPEMDEKGNLTTAGFACSQCGQPLFVYKLEQVSEKGKAYTNYFGRCNVAEHEKLILLAQLKPEKDSDEAVTYSLGKFGQRALDFYSIHVTKESTHPVKPLAQIAGNRYASSPVGKALSGACMGTIASFLSKYQDIIIEHQKVVKGNQKRLESLRELAGKENLEYPSVTLPPQPHTKEGVDAYNEVIARVRMWVNLNLWQKLKLSRDDAKPLLRLKGFPSFPLVERQANEVDWWDMVCNVKKLINEKKEDGKVFWQNLAGYKRQEALRPYLSSEEDRKKGKKFARYQLGDLLLHLEKKHGEDWGKVYDEAWERIDKKVEGLSKHIKLEEERRSEDAQSKAALTDWLRAKASFVIEGLKEADKDEFCRCELKLQKWYGDLRGKPFAIEAENSILDISGFSKQYNCAFIWQKDGVKKLNLYLIINYFKGGKLRFKKIKPEAFEANRFYTVINKKSGEIVPMEVNFNFDDPNLIILPLAFGKRQGREFIWNDLLSLETGSLKLANGRVIEKTLYNRRTRQDEPALFVALTFERREVLDSSNIKPMNLIGVDRGENIPAVIALTDPEGCPLSRFKDSLGNPTHILRIGESYKEKQRTIQAKKEVEQRRAGGYSRKYASKAKNLADDMVRNTARDLLYYAVTQDAMLIFENLSRGFGRQGKRTFMAERQYTRMEDWLTAKLAYEGLPSKTYLSKTLAQYTSKTCSNCGFTITSADYDRVLEKLKKTATGWMTTINGKELKVEGQITYYNRYKRQNVVKDLSVELDRLSEESVNNDISSWTKGRSGEALSLLKKRFSHRPVQEKFVCLNCGFETHADEQAALNIARSWLFLRSQEYKKYQTNKTTGNTDKRAFVETWQSFYRKKLKEVWKPAV

SEQ ID NO: 40957 - protein, 978 aa, synthetic construct
  REGION 1..978: note = engineered CasX variant
QEGKRINKIRRRLVKDSNTKKAGKTGPMKTLLVRVMTPDLRERLENLRKKPENIPQPISNTSRANLNKLLTDYTEMKKAILHVYWEEFQKDPVGLMSRVAQPASKKIDQNKLKPEMDEKGNLTTAGFACSQCGQPLFVYKLEQVSEKGKAYTNYFGRCNVAEHEKLILLAQLKPEKDSDEAVTYSLGKFGQRALDFYSIHVTKESTHPVKPLAQIAGNRYASTPVGKALSGACMGTIASFLSKYQDIIIEHQKVVKGNQKRLESLRELAGKENLEYPSVTLPPQPHTKEGVDAYNEVIARVRMWVNLNLWQKLKLSRDDAKPLLRLKGFPSFPLVERQANEVDWWDMVCNVKKLINEKKEDGKVFWQNLAGYKRQEALRPYLSSEEDRKKGKKFARYQLGDLLLHLEKKHGEDWGKVYDEAWERIDKKVEGLSKHIKLEEERRSEDAQSKAALTDWLRAKASFVIEGLKEADKDEFCRCELKLQKWYGDLRGKPFAIEAENSILDISGFSKQYNCAFIWQKDGVKKLNLYLIINYFKGGKLRFKKIKPEAFEANRFYTVINKKSGEIVPMEVNFNFDDPNLIILPLAFGKRQGREFIWNDLLSLETGSLKLANGRVIEKTLYNRRTRQDEPALFVALTFERREVLDSSNIKPMNLIGVDRGENIPAVIALTDPEGCPLSRFKDSLGNPTHILRIGESYKEKQRTIQAKKEVEQRRAGGYSRKYASKAKNLADDMVRNTARDLLYYAVTQDAMLIFENLSRGFGRQGKRTFMAERQYTRMEDWLTAKLAYEGLPSKTYLSKTLAQYTSKTCSNCGFTITSADYDRVLEKLKKTATGWMTTINGKELKVEGQITYYNRYKRQNVVKDLSVELDRLSEESVNNDISSWTKGRSGEALSLLKKRFSHRPVQEKFVCLNCGFETHADEQAALNIARSWLFLRSQEYKKYQTNKTTGNTDKRAFVETWQSFYRKKLKEVWKPAV

SEQ ID NO: 40958 - protein, 978 aa, synthetic construct
  REGION 1..978: note = engineered CasX variant
QEGKRINKIRRRLVKDSNTKKAGKTGPMKTLLVRVMTPDLRERLENLRKKPENIPQPISNTSRANLNKLLTDYTEMKKAILHVYWEEFQKDPVGLMSRVAQPASKKIDQNKLKPEMDEKGNLTTAGFACSQCGQPLFVYKLEQVSEKGKAYTNYFGRCNVAEHEKLILLAQLKPEKDSDEAVTYSLGKFGQRALDFYSIHVTKESTHPVKPLAQIAGNRYASAPVGKALSGACMGTIASFLSKYQDIIIEHQKVVKGNQKRLESLRELAGKENLEYPSVTLPPQPHTKEGVDAYNEVIARVRMWVNLNLWQKLKLSRDDAKPLLRLKGFPSFPLVERQANEVDWWDMVCNVKKLINEKKEDGKVFWQNLAGYKRQEALRPYLSSEEDRKKGKKFARYQLGDLLLHLEKKHGEDWGKVYDEAWERIDKKVEGLSKHIKLEEERRSEDAQSKAALTDWLRAKASFVIEGLKEADKDEFCRCELKLQKWYGDLRGKPFAIEAENSILDISGFSKQYNCAFIWQKDGVKKLNLYLIINYFKGGKLRFKKIKPEAFEANRFYTVINKKSGEIVPMEVNFNFDDPNLIILPLAFGKRQGREFIWNDLLSLETGSLKLANGRVIEKTLYNRRTRQDEPALFVALTFERREVLDSSNIKPMNLIGVDRGENIPAVIALTDPEGCPLSRFKDSLGNPTHILRIGESYKEKQRTIQAKKEVEQRRAGGYSRKYASKAKNLADDMVRNTARDLLYYAVTQDAMLIFENLSRGFGRQGKRTFMAERQYTRMEDWLTAKLAYEGLPSKTYLSKTLAQYTSKTCSNCGFTITSADYDRVLEKLKKTATGWMTTINGKELKVEGQITYYNRYKRQNVVKDLSVELDRLSEESVNNDISSWTKGRSGEALSLLKKRFSHRPVQEKFVCLNCGFETHADEQAALNIARSWLFLRSQEYKKYQTNKTTGNTDKRAFVETWQSFYRKKLKEVWKPAV

SEQ ID NO: 40959 - protein, 978 aa, synthetic construct
  REGION 1..978: note = engineered CasX variant
QEGKRINKIRRRLVKDSNTKKAGKTGPMKTLLVRVMTPDLRERLENLRKKPENIPQPISNTSRANLNKLLTDYTEMKKAILHVYWEEFQKDPVGLMSRVAQPASKKIDQNKLKPEMDEKGNLTTAGFACSQCGQPLFVYKLEQVSEKGKAYTNYFGRCNVAEHEKLILLAQLKPEKDSDEAVTYSLGKFGQRALDFYSIHVTKESTHPVKPLAQIAGNRYASVPVGKALSGACMGTIASFLSKYQDIIIEHQKVVKGNQKRLESLRELAGKENLEYPSVTLPPQPHTKEGVDAYNEVIARVRMWVNLNLWQKLKLSRDDAKPLLRLKGFPSFPLVERQANEVDWWDMVCNVKKLINEKKEDGKVFWQNLAGYKRQEALRPYLSSEEDRKKGKKFARYQLGDLLLHLEKKHGEDWGKVYDEAWERIDKKVEGLSKHIKLEEERRSEDAQSKAALTDWLRAKASFVIEGLKEADKDEFCRCELKLQKWYGDLRGKPFAIEAENSILDISGFSKQYNCAFIWQKDGVKKLNLYLIINYFKGGKLRFKKIKPEAFEANRFYTVINKKSGEIVPMEVNFNFDDPNLIILPLAFGKRQGREFIWNDLLSLETGSLKLANGRVIEKTLYNRRTRQDEPALFVALTFERREVLDSSNIKPMNLIGVDRGENIPAVIALTDPEGCPLSRFKDSLGNPTHILRIGESYKEKQRTIQAKKEVEQRRAGGYSRKYASKAKNLADDMVRNTARDLLYYAVTQDAMLIFENLSRGFGRQGKRTFMAERQYTRMEDWLTAKLAYEGLPSKTYLSKTLAQYTSKTCSNCGFTITSADYDRVLEKLKKTATGWMTTINGKELKVEGQITYYNRYKRQNVVKDLSVELDRLSEESVNNDISSWTKGRSGEALSLLKKRFSHRPVQEKFVCLNCGFETHADEQAALNIARSWLFLRSQEYKKYQTNKTTGNTDKRAFVETWQSFYRKKLKEVWKPAV

SEQ ID NO: 40960 - protein, 978 aa, synthetic construct
  REGION 1..978: note = engineered CasX variant
QEGKRINKIRRRLVKDSNTKKAGKTGPMKTLLVRVMTPDLRERLENLRKKPENIPQPISNTSRANLNKLLTDYTEMKKAILHVYWEEFQKDPVGLMSRVAQPASKKIDQNKLKPEMDEKGNLTTAGFACSQCGQPLFVYKLEQVSEKGKAYTNYFGRCNVAEHEKLIKLAQLKPEKDSDEAVTYSLGKFGQRALDFYSIHVTKESTHPVKPLAQIAGNRYASGPVGKALSGACMGTIASFLSKYQDIIIEHQKVVKGNQKRLESLRELAGKENLEYPSVTLPPQPHTKEGVDAYNEVIARVRMWVNLNLWQKLKLSRDDAKPLLRLKGFPSFPLVERQANEVDWWDMVCNVKKLINEKKEDGKVFWQNLAGYKRQEALRPYLSSEEDRKKGKKFARYQLGDLLLHLEKKHGEDWGKVYDEAWERIDKKVEGLSKHIKLEEERRSEDAQSKAALTDWLRAKASFVIEGLKEADKDEFCRCELKLQKWYGDLRGKPFAIEAENSILDISGFSKQYNCAFIWQKDGVKKLNLYLIINYFKGGKLRFKKIKPEAFEANRFYTVINKKSGEIVPMEVNFNFDDPNLIILPLAFGKRQGREFIWNDLLSLETGSLKLANGRVIEKTLYNRRTRQDEPALFVALTFERREVLDSSNIKPMNLIGVDRGENIPAVIALTDPEGCPLSRFKDSLGNPTHILRIGESYKEKQRTIQAKKEVEQRRAGGYSRKYASKAKNLADDMVRNTARDLLYYAVTQDAMLIFENLSRGFGRQGKRTFMAERQYTRMEDWLTAKLAYEGLPSKTYLSKTLAQYTSKTCSNCGFTITSADYDRVLEKLKKTATGWMTTINGKELKVEGQITYYNRYKRQNVVKDLSVELDRLSEESVNNDISSWTKGRSGEALSLLKKRFSHRPVQEKFVCLNCGFETHADEQAALNIARSWLFLRSQEYKKYQTNKTTGNTDKRAFVETWQSFYRKKLKEVWKPAV

SEQ ID NO: 40961 - protein, 977 aa, synthetic construct
  REGION 1..977: note = engineered CasX variant
QEGKRINKIRRRLVKDSNTKKAGKTGPMKTLLVRVMTPDLRERLENLRKKPENIPQPISNTSRANLNKLLTDYTEMKKAILHVYWEEFQKDPVGLMSRVAQPASKKIDQNKLKPEMDEKGNLTTAGFACSQCGQPLFVYKLEQVSEKGKAYTNYFGRCNVAEHEKLILLAQLKPEKDSDEAVTYSLGKFGQRALDFYSIHVTKESTHPVKPLAQIAGNRYASPVGKALSGACMGTIASFLSKYQDIIIEHQKVVKGNQKRLESLRELAGKENLEYPSVTLPPQPHTKEGVDAYNEVIARVRMWVNLNLWQKLKLSRDDAKPLLRLKGFPSFPLVERQANEVDWWDMVCNVKKLINEKKEDGKVFWQNLAGYKRQEALRPYLSSEEDRKKGKKFARYQLGDLLLHLEKKHGEDWGKVYDEAWERIDKKVEGLSKHIKLEEERRSEDAQSKAALTDWLRAKASFVIEGLKEADKDEFCRCELKLQKWYGDLRGKPFAIEAENSILDISGFSKQYNCAFIWQKDGVKKLNLYLIINYFKGGKLRFKKIKPEAFEANRFYTVINKKSGEIVPMEVNFNFDDPNLIILPLAFGKRQGREFIWNDLLSLETGSLKLANGRVIEKTLYNRRTRQDEPALFVALTFERREVLDSSNIKPMNLIGVDRGENIPAVIALTDPEGCPLSRFKDSLGNPTHILRIGESYKEKQRTIQAKKEVEQRRAGGYSRKYASKAKNLADDMVRNTARDLLYYAVTQDAMLIFENLSRGFGRQGKRTFMAERQYTRMEDWLTAKLAYEGLPSKTYLSKTLAQYTSKTCSNCGFTITSADYDRVLEKLKKTATGWMTTINGKELKVEGQITYYNRYKRQNVVKDLSVELDRLSEESVNNDISSWTKGRSGEALSLLKKRFSHRPVQEKFVCLNCGFETHADEQAALNIARSWLFLRSQEYKKYQTNKTTGNTDKRAFVETWQSFYRKKLKEVWKPAV

SEQ ID NO: 40962 - protein, 978 aa, synthetic construct
  REGION 1..978: note = engineered CasX variant
QEGKRINKIRRRLVKDSNTKKAGKTGPMKTLLVRVMTPDLRERLENLRKKPENIPQPISNTSRANLNKLLTDYTEMKKAILHVYWEEFQKDPVGLMSRVAQPASKKIDQNKLKPEMDEKGNLTTAGFACSQCGQPLFVYKLEQVSEKGKAYTNYFGRCNVAEHEKLILLAQLKPEKDSDEAVTYSLGKFGQRALDFYSIHVTKESTHPVKPLAQIAGNRYASYPVGKALSDACMGTIASFLSKYQDIIIEHQKVVKGNQKRLESLRELAGKENLEYPSVTLPPQPHTKEGVDAYNEVIARVRMWVNLNLWQKLKLSRDDAKPLLRLKNFPSFPLVERQANEVDWWDMVCNVKKLINEKKEDGKVFWQNLAGYKRQEALRPYLSSEEDRKKGKKFARYQLGDLLLHLEKKHGEDWGKVYDEAWERIDKKVEGLSKHIKLEEERRSEDAQSKAALTDWLRAKASFVIEGLKEADKDEFCRCELKLQKWYGDLRGKPFAIEAENSILDISGFSKQYNCAFIWQKDGVKKLNLYLIINYFKGGKLRFKKIKPEAFEANRFYTVINKKSGEIVPMEVNFNFDDPNLIILPLAFGKRQGREFIWNDLLSLETGSLKLANGRVIEKTLYNRRTRQDEPALFVALTFERREVLDSSNIKPMNLIGVDRGENIPAVIALTDPEGCPLSRFKDSLGNPTHILRIGESYKEKQRTIQAKKEVEQRRAGGYSRKYASKAKNLADDMVRNTARDLLYYAVTQDAMLIFENLSRGFGRQGKRTFMAERQYTRMEDWLTAKLAYEGLPSKTYLSKTLAQYTSKTCSNCGFTITSADYDRVLEKLKKTATGWMTTINGKELKVEGQITYYNRYKRQNVVKDLSVELDRLSEESVNNDISSWTKGRSGEALSLLKKRFSHRPVQEKFVCLNCGFETHADEQAALNIARSWLFLRSQEYKKYQTNKTTGNTDKRAFVETWQSFYRKKLKEVWKPAV

SEQ ID NO: 40963 - protein, 978 aa, synthetic construct
  REGION 1..978: note = engineered CasX variant
QEGKRINKIRRRLVKDSNTKKAGKTGPMKTLLVRVMTPDLRERLENLRKKPENIPQPISNTSRANLNKLLTDYTEMKKAILHVYWEEFQKDPVGLMSRVAQPASKKIDQNKLKPEMDEKGNLTTAGFACSQCGQPLFVYKLEQVSEKGKAYTNYFGRCNVAEHEKLILLAQLKPEKDSDEAVTYSLGKFGQRALDFYSIHVTKESTHPVKPLAQIAGNRYASHPVGKALSDACMGTIASFLSKYQDIIIEHQKVVKGNQKRLESLRELAGKENLEYPSVTLPPQPHTKEGVDAYNEVIARVRMWVNLNLWQKLKLSRDDAKPLLRLKNFPSFPLVERQANEVDWWDMVCNVKKLINEKKEDGKVFWQNLAGYKRQEALRPYLSSEEDRKKGKKFARYQLGDLLLHLEKKHGEDWGKVYDEAWERIDKKVEGLSKHIKLEEERRSEDAQSKAALTDWLRAKASFVIEGLKEADKDEFCRCELKLQKWYGDLRGKPFAIEAENSILDISGFSKQYNCAFIWQKDGVKKLNLYLIINYFKGGKLRFKKIKPEAFEANRFYTVINKKSGEIVPMEVNFNFDDPNLIILPLAFGKRQGREFIWNDLLSLETGSLKLANGRVIEKTLYNRRTRQDEPALFVALTFERREVLDSSNIKPMNLIGVDRGENIPAVIALTDPEGCPLSRFKDSLGNPTHILRIGESYKEKQRTIQAKKEVEQRRAGGYSRKYASKAKNLADDMVRNTARDLLYYAVTQDAMLIFENLSRGFGRQGKRTFMAERQYTRMEDWLTAKLAYEGLPSKTYLSKTLAQYTSKTCSNCGFTITSADYDRVLEKLKKTATGWMTTINGKELKVEGQITYYNRYKRQNVVKDLSVELDRLSEESVNNDISSWTKGRSGEALSLLKKRFSHRPVQEKFVCLNCGFETHADEQAALNIARSWLFLRSQEYKKYQTNKTTGNTDKRAFVETWQSFYRKKLKEVWKPAV

SEQ ID NO: 40964 - protein, 978 aa, synthetic construct
  REGION 1..978: note = engineered CasX variant
QEGKRINKIRRRLVKDSNTKKAGKTGPMKTLLVRVMTPDLRERLENLRKKPENIPQPISNTSRANLNKLLTDYTEMKKAILHVYWEEFQKDPVGLMSRVAQPASKKIDQNKLKPEMDEKGNLTTAGFACSQCGQPLFVYKLEQVSEKGKAYTNYFGRCNVAEHEKLILLAQLKPEKDSDEAVTYSLGKFGQRALDFYSIHVTKESTHPVKPLAQIAGNRYASSPVGKALSDACMGTIASFLSKYQDIIIEHQKVVKGNQKRLESLRELAGKENLEYPSVTLPPQPHTKEGVDAYNEVIARVRMWVNLNLWQKLKLSRDDAKPLLRLKNFPSFPLVERQANEVDWWDMVCNVKKLINEKKEDGKVFWQNLAGYKRQEALRPYLSSEEDRKKGKKFARYQLGDLLLHLEKKHGEDWGKVYDEAWERIDKKVEGLSKHIKLEEERRSEDAQSKAALTDWLRAKASFVIEGLKEADKDEFCRCELKLQKWYGDLRGKPFAIEAENSILDISGFSKQYNCAFIWQKDGVKKLNLYLIINYFKGGKLRFKKIKPEAFEANRFYTVINKKSGEIVPMEVNFNFDDPNLIILPLAFGKRQGREFIWNDLLSLETGSLKLANGRVIEKTLYNRRTRQDEPALFVALTFERREVLDSSNIKPMNLIGVDRGENIPAVIALTDPEGCPLSRFKDSLGNPTHILRIGESYKEKQRTIQAKKEVEQRRAGGYSRKYASKAKNLADDMVRNTARDLLYYAVTQDAMLIFENLSRGFGRQGKRTFMAERQYTRMEDWLTAKLAYEGLPSKTYLSKTLAQYTSKTCSNCGFTITSADYDRVLEKLKKTATGWMTTINGKELKVEGQITYYNRYKRQNVVKDLSVELDRLSEESVNNDISSWTKGRSGEALSLLKKRFSHRPVQEKFVCLNCGFETHADEQAALNIARSWLFLRSQEYKKYQTNKTTGNTDKRAFVETWQSFYRKKLKEVWKPAV

SEQ ID NO: 40965 - protein, 978 aa, synthetic construct
  REGION 1..978: note = engineered CasX variant
QEGKRINKIRRRLVKDSNTKKAGKTGPMKTLLVRVMTPDLRERLENLRKKPENIPQPISNTSRANLNKLLTDYTEMKKAILHVYWEEFQKDPVGLMSRVAQPASKKIDQNKLKPEMDEKGNLTTAGFACSQCGQPLFVYKLEQVSEKGKAYTNYFGRCNVAEHEKLILLAQLKPEKDSDEAVTYSLGKFGQRALDFYSIHVTKESTHPVKPLAQIAGNRYASTPVGKALSDACMGTIASFLSKYQDIIIEHQKVVKGNQKRLESLRELAGKENLEYPSVTLPPQPHTKEGVDAYNEVIARVRMWVNLNLWQKLKLSRDDAKPLLRLKNFPSFPLVERQANEVDWWDMVCNVKKLINEKKEDGKVFWQNLAGYKRQEALRPYLSSEEDRKKGKKFARYQLGDLLLHLEKKHGEDWGKVYDEAWERIDKKVEGLSKHIKLEEERRSEDAQSKAALTDWLRAKASFVIEGLKEADKDEFCRCELKLQKWYGDLRGKPFAIEAENSILDISGFSKQYNCAFIWQKDGVKKLNLYLIINYFKGGKLRFKKIKPEAFEANRFYTVINKKSGEIVPMEVNFNFDDPNLIILPLAFGKRQGREFIWNDLLSLETGSLKLANGRVIEKTLYNRRTRQDEPALFVALTFERREVLDSSNIKPMNLIGVDRGENIPAVIALTDPEGCPLSRFKDSLGNPTHILRIGESYKEKQRTIQAKKEVEQRRAGGYSRKYASKAKNLADDMVRNTARDLLYYAVTQDAMLIFENLSRGFGRQGKRTFMAERQYTRMEDWLTAKLAYEGLPSKTYLSKTLAQYTSKTCSNCGFTITSADYDRVLEKLKKTATGWMTTINGKELKVEGQITYYNRYKRQNVVKDLSVELDRLSEESVNNDISSWTKGRSGEALSLLKKRFSHRPVQEKFVCLNCGFETHADEQAALNIARSWLFLRSQEYKKYQTNKTTGNTDKRAFVETWQSFYRKKLKEVWKPAV

SEQ ID NO: 40966 - protein, 978 aa, synthetic construct
  REGION 1..978: note = engineered CasX variant
QEGKRINKIRRRLVKDSNTKKAGKTGPMKTLLVRVMTPDLRERLENLRKKPENIPQPISNTSRANLNKLLTDYTEMKKAILHVYWEEFQKDPVGLMSRVAQPASKKIDQNKLKPEMDEKGNLTTAGFACSQCGQPLFVYKLEQVSEKGKAYTNYFGRCNVAEHEKLILLAQLKPEKDSDEAVTYSLGKFGQRALDFYSIHVTKESTHPVKPLAQIAGNRYASAPVGKALSDACMGTIASFLSKYQDIIIEHQKVVKGNQKRLESLRELAGKENLEYPSVTLPPQPHTKEGVDAYNEVIARVRMWVNLNLWQKLKLSRDDAKPLLRLKNFPSFPLVERQANEVDWWDMVCNVKKLINEKKEDGKVFWQNLAGYKRQEALRPYLSSEEDRKKGKKFARYQLGDLLLHLEKKHGEDWGKVYDEAWERIDKKVEGLSKHIKLEEERRSEDAQSKAALTDWLRAKASFVIEGLKEADKDEFCRCELKLQKWYGDLRGKPFAIEAENSILDISGFSKQYNCAFIWQKDGVKKLNLYLIINYFKGGKLRFKKIKPEAFEANRFYTVINKKSGEIVPMEVNFNFDDPNLIILPLAFGKRQGREFIWNDLLSLETGSLKLANGRVIEKTLYNRRTRQDEPALFVALTFERREVLDSSNIKPMNLIGVDRGENIPAVIALTDPEGCPLSRFKDSLGNPTHILRIGESYKEKQRTIQAKKEVEQRRAGGYSRKYASKAKNLADDMVRNTARDLLYYAVTQDAMLIFENLSRGFGRQGKRTFMAERQYTRMEDWLTAKLAYEGLPSKTYLSKTLAQYTSKTCSNCGFTITSADYDRVLEKLKKTATGWMTTINGKELKVEGQITYYNRYKRQNVVKDLSVELDRLSEESVNNDISSWTKGRSGEALSLLKKRFSHRPVQEKFVCLNCGFETHADEQAALNIARSWLFLRSQEYKKYQTNKTTGNTDKRAFVETWQSFYRKKLKEVWKPAV

SEQ ID NO: 40967 - protein, 978 aa, synthetic construct
  REGION 1..978: note = engineered CasX variant
QEGKRINKIRRRLVKDSNTKKAGKTGPMKTLLVRVMTPDLRERLENLRKKPENIPQPISNTSRANLNKLLTDYTEMKKAILHVYWEEFQKDPVGLMSRVAQPASKKIDQNKLKPEMDEKGNLTTAGFACSQCGQPLFVYKLEQVSEKGKAYTNYFGRCNVAEHEKLILLAQLKPEKDSDEAVTYSLGKFGQRALDFYSIHVTKESTHPVKPLAQIAGNRYASVPVGKALSDACMGTIASFLSKYQDIIIEHQKVVKGNQKRLESLRELAGKENLEYPSVTLPPQPHTKEGVDAYNEVIARVRMWVNLNLWQKLKLSRDDAKPLLRLKNFPSFPLVERQANEVDWWDMVCNVKKLINEKKEDGKVFWQNLAGYKRQEALRPYLSSEEDRKKGKKFARYQLGDLLLHLEKKHGEDWGKVYDEAWERIDKKVEGLSKHIKLEEERRSEDAQSKAALTDWLRAKASFVIEGLKEADKDEFCRCELKLQKWYGDLRGKPFAIEAENSILDISGFSKQYNCAFIWQKDGVKKLNLYLIINYFKGGKLRFKKIKPEAFEANRFYTVINKKSGEIVPMEVNFNFDDPNLIILPLAFGKRQGREFIWNDLLSLETGSLKLANGRVIEKTLYNRRTRQDEPALFVALTFERREVLDSSNIKPMNLIGVDRGENIPAVIALTDPEGCPLSRFKDSLGNPTHILRIGESYKEKQRTIQAKKEVEQRRAGGYSRKYASKAKNLADDMVRNTARDLLYYAVTQDAMLIFENLSRGFGRQGKRTFMAERQYTRMEDWLTAKLAYEGLPSKTYLSKTLAQYTSKTCSNCGFTITSADYDRVLEKLKKTATGWMTTINGKELKVEGQITYYNRYKRQNVVKDLSVELDRLSEESVNNDISSWTKGRSGEALSLLKKRFSHRPVQEKFVCLNCGFETHADEQAALNIARSWLFLRSQEYKKYQTNKTTGNTDKRAFVETWQSFYRKKLKEVWKPAV

SEQ ID NO: 40968 - protein, 978 aa, synthetic construct
  REGION 1..978: note = engineered CasX variant
QEGKRINKIRRRLVKDSNTKKAGKTGPMKTLLVRVMTPDLRERLENLRKKPENIPQPISNTSRANLNKLLTDYTEMKKAILHVYWEEFQKDPVGLMSRVAQPASKKIDQNKLKPEMDEKGNLTTAGFACSQCGQPLFVYKLEQVSEKGKAYTNYFGRCNVAEHEKLIKLAQLKPEKDSDEAVTYSLGKFGQRALDFYSIHVTKESTHPVKPLAQIAGNRYASGPVGKALSDACMGTIASFLSKYQDIIIEHQKVVKGNQKRLESLRELAGKENLEYPSVTLPPQPHTKEGVDAYNEVIARVRMWVNLNLWQKLKLSRDDAKPLLRLKNFPSFPLVERQANEVDWWDMVCNVKKLINEKKEDGKVFWQNLAGYKRQEALRPYLSSEEDRKKGKKFARYQLGDLLLHLEKKHGEDWGKVYDEAWERIDKKVEGLSKHIKLEEERRSEDAQSKAALTDWLRAKASFVIEGLKEADKDEFCRCELKLQKWYGDLRGKPFAIEAENSILDISGFSKQYNCAFIWQKDGVKKLNLYLIINYFKGGKLRFKKIKPEAFEANRFYTVINKKSGEIVPMEVNFNFDDPNLIILPLAFGKRQGREFIWNDLLSLETGSLKLANGRVIEKTLYNRRTRQDEPALFVALTFERREVLDSSNIKPMNLIGVDRGENIPAVIALTDPEGCPLSRFKDSLGNPTHILRIGESYKEKQRTIQAKKEVEQRRAGGYSRKYASKAKNLADDMVRNTARDLLYYAVTQDAMLIFENLSRGFGRQGKRTFMAERQYTRMEDWLTAKLAYEGLPSKTYLSKTLAQYTSKTCSNCGFTITSADYDRVLEKLKKTATGWMTTINGKELKVEGQITYYNRYKRQNVVKDLSVELDRLSEESVNNDISSWTKGRSGEALSLLKKRFSHRPVQEKFVCLNCGFETHADEQAALNIARSWLFLRSQEYKKYQTNKTTGNTDKRAFVETWQSFYRKKLKEVWKPAV

SEQ ID NO: 40969 - protein, 977 aa, synthetic construct
  REGION 1..977: note = engineered CasX variant
QEGKRINKIRRRLVKDSNTKKAGKTGPMKTLLVRVMTPDLRERLENLRKKPENIPQPISNTSRANLNKLLTDYTEMKKAILHVYWEEFQKDPVGLMSRVAQPASKKIDQNKLKPEMDEKGNLTTAGFACSQCGQPLFVYKLEQVSEKGKAYTNYFGRCNVAEHEKLILLAQLKPEKDSDEAVTYSLGKFGQRALDFYSIHVTKESTHPVKPLAQIAGNRYASPVGKALSDACMGTIASFLSKYQDIIIEHQKVVKGNQKRLESLRELAGKENLEYPSVTLPPQPHTKEGVDAYNEVIARVRMWVNLNLWQKLKLSRDDAKPLLRLKNFPSFPLVERQANEVDWWDMVCNVKKLINEKKEDGKVFWQNLAGYKRQEALRPYLSSEEDRKKGKKFARYQLGDLLLHLEKKHGEDWGKVYDEAWERIDKKVEGLSKHIKLEEERRSEDAQSKAALTDWLRAKASFVIEGLKEADKDEFCRCELKLQKWYGDLRGKPFAIEAENSILDISGFSKQYNCAFIWQKDGVKKLNLYLIINYFKGGKLRFKKIKPEAFEANRFYTVINKKSGEIVPMEVNFNFDDPNLIILPLAFGKRQGREFIWNDLLSLETGSLKLANGRVIEKTLYNRRTRQDEPALFVALTFERREVLDSSNIKPMNLIGVDRGENIPAVIALTDPEGCPLSRFKDSLGNPTHILRIGESYKEKQRTIQAKKEVEQRRAGGYSRKYASKAKNLADDMVRNTARDLLYYAVTQDAMLIFENLSRGFGRQGKRTFMAERQYTRMEDWLTAKLAYEGLPSKTYLSKTLAQYTSKTCSNCGFTITSADYDRVLEKLKKTATGWMTTINGKELKVEGQITYYNRYKRQNVVKDLSVELDRLSEESVNNDISSWTKGRSGEALSLLKKRFSHRPVQEKFVCLNCGFETHADEQAALNIARSWLFLRSQEYKKYQTNKTTGNTDKRAFVETWQSFYRKKLKEVWKPAV

SEQ ID NO: 40970 - protein, 978 aa, synthetic construct
  REGION 1..978: note = engineered CasX variant
QEGKRINKIRRRLVKDSNTKKAGKTGPMKTLLVRVMTPDLRERLENLRKKPENIPQPISNTSRANLNKLLTDYTEMKKAILHVYWEEFQKDPVGLMSRVAQPASKKIDQNKLKPEMDEKGNLTTAGFACSQCGQPLFVYKLEQVSEKGKAYTNYFGRCNVAEHEKLILLAQLKPEKDSDEAVTYSLGKFGQRALDFYSIHVTKESTHPVKPLAQIAGNRYASYPVGKALSDACMGTIASFLSKYQDIIIEHQKVVKGNQKRLESLRELAGKENLEYPSVTLPPQPHTKEGVDAYNEVIARVRMWVNLNLWQKLKLSRDDAKPLLRLKGFPSFPLVERQANEVDWWDMVCNVKKLINEKKEDGKVFWQNLAGYKRQEALRPYLSSEEDRKKGKKFARYQLGDLLNHLEKKHGEDWGKVYDEAWERIDKKVEGLSKHIKLEEERRSEDAQSKAALTDWLRAKASFVIEGLKEADKDEFCRCELKLQKWYGDLRGKPFAIEAENSILDISGFSKQYNCAFIWQKDGVKKLNLYLIINYFKGGKLRFKKIKPEAFEANRFYTVINKKSGEIVPMEVNFNFDDPNLIILPLAFGKRQGREFIWNDLLSLETGSLKLANGRVIEKTLYNRRTRQDEPALFVALTFERREVLDSSNIKPMNLIGVDRGENIPAVIALTDPEGCPLSRFKDSLGNPTHILRIGESYKEKQRTIQAKKEVEQRRAGGYSRKYASKAKNLADDMVRNTARDLLYYAVTQDAMLIFENLSRGFGRQGKRTFMAERQYTRMEDWLTAKLAYEGLPSKTYLSKTLAQYTSKTCSNCGFTITSADYDRVLEKLKKTATGWMTTINGKELKVEGQITYYNRYKRQNVVKDLSVELDRLSEESVNNDISSWTKGRSGEALSLLKKRFSHRPVQEKFVCLNCGFETHADEQAALNIARSWLFLRSQEYKKYQTNKTTGNTDKRAFVETWQSFYRKKLKEVWKPAV

SEQ ID NO: 40971 - protein, 978 aa, synthetic construct
  REGION 1..978: note = engineered CasX variant
QEGKRINKIRRRLVKDSNTKKAGKTGPMKTLLVRVMTPDLRERLENLRKKPENIPQPISNTSRANLNKLLTDYTEMKKAILHVYWEEFQKDPVGLMSRVAQPASKKIDQNKLKPEMDEKGNLTTAGFACSQCGQPLFVYKLEQVSEKGKAYTNYFGRCNVAEHEKLILLAQLKPEKDSDEAVTYSLGKFGQRALDFYSIHVTKESTHPVKPLAQIAGNRYASHPVGKALSDACMGTIASFLSKYQDIIIEHQKVVKGNQKRLESLRELAGKENLEYPSVTLPPQPHTKEGVDAYNEVIARVRMWVNLNLWQKLKLSRDDAKPLLRLKGFPSFPLVERQANEVDWWDMVCNVKKLINEKKEDGKVFWQNLAGYKRQEALRPYLSSEEDRKKGKKFARYQLGDLLNHLEKKHGEDWGKVYDEAWERIDKKVEGLSKHIKLEEERRSEDAQSKAALTDWLRAKASFVIEGLKEADKDEFCRCELKLQKWYGDLRGKPFAIEAENSILDISGFSKQYNCAFIWQKDGVKKLNLYLIINYFKGGKLRFKKIKPEAFEANRFYTVINKKSGEIVPMEVNFNFDDPNLIILPLAFGKRQGREFIWNDLLSLETGSLKLANGRVIEKTLYNRRTRQDEPALFVALTFERREVLDSSNIKPMNLIGVDRGENIPAVIALTDPEGCPLSRFKDSLGNPTHILRIGESYKEKQRTIQAKKEVEQRRAGGYSRKYASKAKNLADDMVRNTARDLLYYAVTQDAMLIFENLSRGFGRQGKRTFMAERQYTRMEDWLTAKLAYEGLPSKTYLSKTLAQYTSKTCSNCGFTITSADYDRVLEKLKKTATGWMTTINGKELKVEGQITYYNRYKRQNVVKDLSVELDRLSEESVNNDISSWTKGRSGEALSLLKKRFSHRPVQEKFVCLNCGFETHADEQAALNIARSWLFLRSQEYKKYQTNKTTGNTDKRAFVETWQSFYRKKLKEVWKPAV

SEQ ID NO: 40972 - protein, 978 aa, synthetic construct
  REGION 1..978: note = engineered CasX variant
QEGKRINKIRRRLVKDSNTKKAGKTGPMKTLLVRVMTPDLRERLENLRKKPENIPQPISNTSRANLNKLLTDYTEMKKAILHVYWEEFQKDPVGLMSRVAQPASKKIDQNKLKPEMDEKGNLTTAGFACSQCGQPLFVYKLEQVSEKGKAYTNYFGRCNVAEHEKLILLAQLKPEKDSDEAVTYSLGKFGQRALDFYSIHVTKESTHPVKPLAQIAGNRYASSPVGKALSDACMGTIASFLSKYQDIIIEHQKVVKGNQKRLESLRELAGKENLEYPSVTLPPQPHTKEGVDAYNEVIARVRMWVNLNLWQKLKLSRDDAKPLLRLKGFPSFPLVERQANEVDWWDMVCNVKKLINEKKEDGKVFWQNLAGYKRQEALRPYLSSEEDRKKGKKFARYQLGDLLNHLEKKHGEDWGKVYDEAWERIDKKVEGLSKHIKLEEERRSEDAQSKAALTDWLRAKASFVIEGLKEADKDEFCRCELKLQKWYGDLRGKPFAIEAENSILDISGFSKQYNCAFIWQKDGVKKLNLYLIINYFKGGKLRFKKIKPEAFEANRFYTVINKKSGEIVPMEVNFNFDDPNLIILPLAFGKRQGREFIWNDLLSLETGSLKLANGRVIEKTLYNRRTRQDEPALFVALTFERREVLDSSNIKPMNLIGVDRGENIPAVIALTDPEGCPLSRFKDSLGNPTHILRIGESYKEKQRTIQAKKEVEQRRAGGYSRKYASKAKNLADDMVRNTARDLLYYAVTQDAMLIFENLSRGFGRQGKRTFMAERQYTRMEDWLTAKLAYEGLPSKTYLSKTLAQYTSKTCSNCGFTITSADYDRVLEKLKKTATGWMTTINGKELKVEGQITYYNRYKRQNVVKDLSVELDRLSEESVNNDISSWTKGRSGEALSLLKKRFSHRPVQEKFVCLNCGFETHADEQAALNIARSWLFLRSQEYKKYQTNKTTGNTDKRAFVETWQSFYRKKLKEVWKPAV

SEQ ID NO: 40973 - protein, 978 aa, synthetic construct
  REGION 1..978: note = engineered CasX variant
QEGKRINKIRRRLVKDSNTKKAGKTGPMKTLLVRVMTPDLRERLENLRKKPENIPQPISNTSRANLNKLLTDYTEMKKAILHVYWEEFQKDPVGLMSRVAQPASKKIDQNKLKPEMDEKGNLTTAGFACSQCGQPLFVYKLEQVSEKGKAYTNYFGRCNVAEHEKLILLAQLKPEKDSDEAVTYSLGKFGQRALDFYSIHVTKESTHPVKPLAQIAGNRYASTPVGKALSDACMGTIASFLSKYQDIIIEHQKVVKGNQKRLESLRELAGKENLEYPSVTLPPQPHTKEGVDAYNEVIARVRMWVNLNLWQKLKLSRDDAKPLLRLKGFPSFPLVERQANEVDWWDMVCNVKKLINEKKEDGKVFWQNLAGYKRQEALRPYLSSEEDRKKGKKFARYQLGDLLNHLEKKHGEDWGKVYDEAWERIDKKVEGLSKHIKLEEERRSEDAQSKAALTDWLRAKASFVIEGLKEADKDEFCRCELKLQKWYGDLRGKPFAIEAENSILDISGFSKQYNCAFIWQKDGVKKLNLYLIINYFKGGKLRFKKIKPEAFEANRFYTVINKKSGEIVPMEVNFNFDDPNLIILPLAFGKRQGREFIWNDLLSLETGSLKLANGRVIEKTLYNRRTRQDEPALFVALTFERREVLDSSNIKPMNLIGVDRGENIPAVIALTDPEGCPLSRFKDSLGNPTHILRIGESYKEKQRTIQAKKEVEQRRAGGYSRKYASKAKNLADDMVRNTARDLLYYAVTQDAMLIFENLSRGFGRQGKRTFMAERQYTRMEDWLTAKLAYEGLPSKTYLSKTLAQYTSKTCSNCGFTITSADYDRVLEKLKKTATGWMTTINGKELKVEGQITYYNRYKRQNVVKDLSVELDRLSEESVNNDISSWTKGRSGEALSLLKKRFSHRPVQEKFVCLNCGFETHADEQAALNIARSWLFLRSQEYKKYQTNKTTGNTDKRAFVETWQSFYRKKLKEVWKPAV

SEQ ID NO: 40974 - protein, 978 aa, synthetic construct
  REGION 1..978: note = engineered CasX variant
QEGKRINKIRRRLVKDSNTKKAGKTGPMKTLLVRVMTPDLRERLENLRKKPENIPQPISNTSRANLNKLLTDYTEMKKAILHVYWEEFQKDPVGLMSRVAQPASKKIDQNKLKPEMDEKGNLTTAGFACSQCGQPLFVYKLEQVSEKGKAYTNYFGRCNVAEHEKLILLAQLKPEKDSDEAVTYSLGKFGQRALDFYSIHVTKESTHPVKPLAQIAGNRYASAPVGKALSDACMGTIASFLSKYQDIIIEHQKVVKGNQKRLESLRELAGKENLEYPSVTLPPQPHTKEGVDAYNEVIARVRMWVNLNLWQKLKLSRDDAKPLLRLKGFPSFPLVERQANEVDWWDMVCNVKKLINEKKEDGKVFWQNLAGYKRQEALRPYLSSEEDRKKGKKFARYQLGDLLNHLEKKHGEDWGKVYDEAWERIDKKVEGLSKHIKLEEERRSEDAQSKAALTDWLRAKASFVIEGLKEADKDEFCRCELKLQKWYGDLRGKPFAIEAENSILDISGFSKQYNCAFIWQKDGVKKLNLYLIINYFKGGKLRFKKIKPEAFEANRFYTVINKKSGEIVPMEVNFNFDDPNLIILPLAFGKRQGREFIWNDLLSLETGSLKLANGRVIEKTLYNRRTRQDEPALFVALTFERREVLDSSNIKPMNLIGVDRGENIPAVIALTDPEGCPLSRFKDSLGNPTHILRIGESYKEKQRTIQAKKEVEQRRAGGYSRKYASKAKNLADDMVRNTARDLLYYAVTQDAMLIFENLSRGFGRQGKRTFMAERQYTRMEDWLTAKLAYEGLPSKTYLSKTLAQYTSKTCSNCGFTITSADYDRVLEKLKKTATGWMTTINGKELKVEGQITYYNRYKRQNVVKDLSVELDRLSEESVNNDISSWTKGRSGEALSLLKKRFSHRPVQEKFVCLNCGFETHADEQAALNIARSWLFLRSQEYKKYQTNKTTGNTDKRAFVETWQSFYRKKLKEVWKPAV

SEQ ID NO: 40975 - protein, 978 aa, synthetic construct
  REGION 1..978: note = engineered CasX variant
QEGKRINKIRRRLVKDSNTKKAGKTGPMKTLLVRVMTPDLRERLENLRKKPENIPQPISNTSRANLNKLLTDYTEMKKAILHVYWEEFQKDPVGLMSRVAQPASKKIDQNKLKPEMDEKGNLTTAGFACSQCGQPLFVYKLEQVSEKGKAYTNYFGRCNVAEHEKLILLAQLKPEKDSDEAVTYSLGKFGQRALDFYSIHVTKESTHPVKPLAQIAGNRYASVPVGKALSDACMGTIASFLSKYQDIIIEHQKVVKGNQKRLESLRELAGKENLEYPSVTLPPQPHTKEGVDAYNEVIARVRMWVNLNLWQKLKLSRDDAKPLLRLKGFPSFPLVERQANEVDWWDMVCNVKKLINEKKEDGKVFWQNLAGYKRQEALRPYLSSEEDRKKGKKFARYQLGDLLNHLEKKHGEDWGKVYDEAWERIDKKVEGLSKHIKLEEERRSEDAQSKAALTDWLRAKASFVIEGLKEADKDEFCRCELKLQKWYGDLRGKPFAIEAENSILDISGFSKQYNCAFIWQKDGVKKLNLYLIINYFKGGKLRFKKIKPEAFEANRFYTVINKKSGEIVPMEVNFNFDDPNLIILPLAFGKRQGREFIWNDLLSLETGSLKLANGRVIEKTLYNRRTRQDEPALFVALTFERREVLDSSNIKPMNLIGVDRGENIPAVIALTDPEGCPLSRFKDSLGNPTHILRIGESYKEKQRTIQAKKEVEQRRAGGYSRKYASKAKNLADDMVRNTARDLLYYAVTQDAMLIFENLSRGFGRQGKRTFMAERQYTRMEDWLTAKLAYEGLPSKTYLSKTLAQYTSKTCSNCGFTITSADYDRVLEKLKKTATGWMTTINGKELKVEGQITYYNRYKRQNVVKDLSVELDRLSEESVNNDISSWTKGRSGEALSLLKKRFSHRPVQEKFVCLNCGFETHADEQAALNIARSWLFLRSQEYKKYQTNKTTGNTDKRAFVETWQSFYRKKLKEVWKPAV

SEQ ID NO: 40976 - protein, 978 aa, synthetic construct
  REGION 1..978: note = engineered CasX variant
QEGKRINKIRRRLVKDSNTKKAGKTGPMKTLLVRVMTPDLRERLENLRKKPENIPQPISNTSRANLNKLLTDYTEMKKAILHVYWEEFQKDPVGLMSRVAQPASKKIDQNKLKPEMDEKGNLTTAGFACSQCGQPLFVYKLEQVSEKGKAYTNYFGRCNVAEHEKLIKLAQLKPEKDSDEAVTYSLGKFGQRALDFYSIHVTKESTHPVKPLAQIAGNRYASGPVGKALSDACMGTIASFLSKYQDIIIEHQKVVKGNQKRLESLRELAGKENLEYPSVTLPPQPHTKEGVDAYNEVIARVRMWVNLNLWQKLKLSRDDAKPLLRLKGFPSFPLVERQANEVDWWDMVCNVKKLINEKKEDGKVFWQNLAGYKRQEALRPYLSSEEDRKKGKKFARYQLGDLLNHLEKKHGEDWGKVYDEAWERIDKKVEGLSKHIKLEEERRSEDAQSKAALTDWLRAKASFVIEGLKEADKDEFCRCELKLQKWYGDLRGKPFAIEAENSILDISGFSKQYNCAFIWQKDGVKKLNLYLIINYFKGGKLRFKKIKPEAFEANRFYTVINKKSGEIVPMEVNFNFDDPNLIILPLAFGKRQGREFIWNDLLSLETGSLKLANGRVIEKTLYNRRTRQDEPALFVALTFERREVLDSSNIKPMNLIGVDRGENIPAVIALTDPEGCPLSRFKDSLGNPTHILRIGESYKEKQRTIQAKKEVEQRRAGGYSRKYASKAKNLADDMVRNTARDLLYYAVTQDAMLIFENLSRGFGRQGKRTFMAERQYTRMEDWLTAKLAYEGLPSKTYLSKTLAQYTSKTCSNCGFTITSADYDRVLEKLKKTATGWMTTINGKELKVEGQITYYNRYKRQNVVKDLSVELDRLSEESVNNDISSWTKGRSGEALSLLKKRFSHRPVQEKFVCLNCGFETHADEQAALNIARSWLFLRSQEYKKYQTNKTTGNTDKRAFVETWQSFYRKKLKEVWKPAV

SEQ ID NO: 40977 - protein, 977 aa, synthetic construct
  REGION 1..977: note = engineered CasX variant
QEGKRINKIRRRLVKDSNTKKAGKTGPMKTLLVRVMTPDLRERLENLRKKPENIPQPISNTSRANLNKLLTDYTEMKKAILHVYWEEFQKDPVGLMSRVAQPASKKIDQNKLKPEMDEKGNLTTAGFACSQCGQPLFVYKLEQVSEKGKAYTNYFGRCNVAEHEKLILLAQLKPEKDSDEAVTYSLGKFGQRALDFYSIHVTKESTHPVKPLAQIAGNRYASPVGKALSDACMGTIASFLSKYQDIIIEHQKVVKGNQKRLESLRELAGKENLEYPSVTLPPQPHTKEGVDAYNEVIARVRMWVNLNLWQKLKLSRDDAKPLLRLKGFPSFPLVERQANEVDWWDMVCNVKKLINEKKEDGKVFWQNLAGYKRQEALRPYLSSEEDRKKGKKFARYQLGDLLNHLEKKHGEDWGKVYDEAWERIDKKVEGLSKHIKLEEERRSEDAQSKAALTDWLRAKASFVIEGLKEADKDEFCRCELKLQKWYGDLRGKPFAIEAENSILDISGFSKQYNCAFIWQKDGVKKLNLYLIINYFKGGKLRFKKIKPEAFEANRFYTVINKKSGEIVPMEVNFNFDDPNLIILPLAFGKRQGREFIWNDLLSLETGSLKLANGRVIEKTLYNRRTRQDEPALFVALTFERREVLDSSNIKPMNLIGVDRGENIPAVIALTDPEGCPLSRFKDSLGNPTHILRIGESYKEKQRTIQAKKEVEQRRAGGYSRKYASKAKNLADDMVRNTARDLLYYAVTQDAMLIFENLSRGFGRQGKRTFMAERQYTRMEDWLTAKLAYEGLPSKTYLSKTLAQYTSKTCSNCGFTITSADYDRVLEKLKKTATGWMTTINGKELKVEGQITYYNRYKRQNVVKDLSVELDRLSEESVNNDISSWTKGRSGEALSLLKKRFSHRPVQEKFVCLNCGFETHADEQAALNIARSWLFLRSQEYKKYQTNKTTGNTDKRAFVETWQSFYRKKLKEVWKPAV

SEQ ID NO: 40978 - protein, 978 aa, synthetic construct
  REGION 1..978: note = engineered CasX variant
QEGKRINKIRRRLVKDSNTKKAGKTGPMKTLLVRVMTPDLRERLENLRKKPENIPQPISNTSRANLNKLLTDYTEMKKAILHVYWEEFQKDPVGLMSRVAQPASKKIDQNKLKPEMDEKGNLTTAGFACSQCGQPLFVYKLEQVSEKGKAYTNYFGRCNVAEHEKLILLAQLKPEKDSDEAVTYSLGKFGQRALDFYSIHVTKESTHPVKPLAQIAGNRYASYPVGKALSDACMGTIASFLSKYQDIIIEHQKVVKGNQKRLESLRELAGKENLEYPSVTLPPQPHTKEGVDAYNEVIARVRMWVNLNLWQKLKLSRDDAKPLLRLKGFPSFPLVERQANEVDWWDMVCNVKKLINEKKEDGKVFWQNLAGYKRQEALRPYLSSEEDRKKGKKFARYQLGDLLWHLEKKHGEDWGKVYDEAWERIDKKVEGLSKHIKLEEERRSEDAQSKAALTDWLRAKASFVIEGLKEADKDEFCRCELKLQKWYGDLRGKPFAIEAENSILDISGFSKQYNCAFIWQKDGVKKLNLYLIINYFKGGKLRFKKIKPEAFEANRFYTVINKKSGEIVPMEVNFNFDDPNLIILPLAFGKRQGREFIWNDLLSLETGSLKLANGRVIEKTLYNRRTRQDEPALFVALTFERREVLDSSNIKPMNLIGVDRGENIPAVIALTDPEGCPLSRFKDSLGNPTHILRIGESYKEKQRTIQAKKEVEQRRAGGYSRKYASKAKNLADDMVRNTARDLLYYAVTQDAMLIFENLSRGFGRQGKRTFMAERQYTRMEDWLTAKLAYEGLPSKTYLSKTLAQYTSKTCSNCGFTITSADYDRVLEKLKKTATGWMTTINGKELKVEGQITYYNRYKRQNVVKDLSVELDRLSEESVNNDISSWTKGRSGEALSLLKKRFSHRPVQEKFVCLNCGFETHADEQAALNIARSWLFLRSQEYKKYQTNKTTGNTDKRAFVETWQSFYRKKLKEVWKPAV

SEQ ID NO: 40979 - protein, 978 aa, synthetic construct
  REGION 1..978: note = engineered CasX variant
QEGKRINKIRRRLVKDSNTKKAGKTGPMKTLLVRVMTPDLRERLENLRKKPENIPQPISNTSRANLNKLLTDYTEMKKAILHVYWEEFQKDPVGLMSRVAQPASKKIDQNKLKPEMDEKGNLTTAGFACSQCGQPLFVYKLEQVSEKGKAYTNYFGRCNVAEHEKLILLAQLKPEKDSDEAVTYSLGKFGQRALDFYSIHVTKESTHPVKPLAQIAGNRYASHPVGKALSDACMGTIASFLSKYQDIIIEHQKVVKGNQKRLESLRELAGKENLEYPSVTLPPQPHTKEGVDAYNEVIARVRMWVNLNLWQKLKLSRDDAKPLLRLKGFPSFPLVERQANEVDWWDMVCNVKKLINEKKEDGKVFWQNLAGYKRQEALRPYLSSEEDRKKGKKFARYQLGDLLWHLEKKHGEDWGKVYDEAWERIDKKVEGLSKHIKLEEERRSEDAQSKAALTDWLRAKASFVIEGLKEADKDEFCRCELKLQKWYGDLRGKPFAIEAENSILDISGFSKQYNCAFIWQKDGVKKLNLYLIINYFKGGKLRFKKIKPEAFEANRFYTVINKKSGEIVPMEVNFNFDDPNLIILPLAFGKRQGREFIWNDLLSLETGSLKLANGRVIEKTLYNRRTRQDEPALFVALTFERREVLDSSNIKPMNLIGVDRGENIPAVIALTDPEGCPLSRFKDSLGNPTHILRIGESYKEKQRTIQAKKEVEQRRAGGYSRKYASKAKNLADDMVRNTARDLLYYAVTQDAMLIFENLSRGFGRQGKRTFMAERQYTRMEDWLTAKLAYEGLPSKTYLSKTLAQYTSKTCSNCGFTITSADYDRVLEKLKKTATGWMTTINGKELKVEGQITYYNRYKRQNVVKDLSVELDRLSEESVNNDISSWTKGRSGEALSLLKKRFSHRPVQEKFVCLNCGFETHADEQAALNIARSWLFLRSQEYKKYQTNKTTGNTDKRAFVETWQSFYRKKLKEVWKPAV

SEQ ID NO: 40980 - protein, 978 aa, synthetic construct
  REGION 1..978: note = engineered CasX variant
QEGKRINKIRRRLVKDSNTKKAGKTGPMKTLLVRVMTPDLRERLENLRKKPENIPQPISNTSRANLNKLLTDYTEMKKAILHVYWEEFQKDPVGLMSRVAQPASKKIDQNKLKPEMDEKGNLTTAGFACSQCGQPLFVYKLEQVSEKGKAYTNYFGRCNVAEHEKLILLAQLKPEKDSDEAVTYSLGKFGQRALDFYSIHVTKESTHPVKPLAQIAGNRYASSPVGKALSDACMGTIASFLSKYQDIIIEHQKVVKGNQKRLESLRELAGKENLEYPSVTLPPQPHTKEGVDAYNEVIARVRMWVNLNLWQKLKLSRDDAKPLLRLKGFPSFPLVERQANEVDWWDMVCNVKKLINEKKEDGKVFWQNLAGYKRQEALRPYLSSEEDRKKGKKFARYQLGDLLWHLEKKHGEDWGKVYDEAWERIDKKVEGLSKHIKLEEERRSEDAQSKAALTDWLRAKASFVIEGLKEADKDEFCRCELKLQKWYGDLRGKPFAIEAENSILDISGFSKQYNCAFIWQKDGVKKLNLYLIINYFKGGKLRFKKIKPEAFEANRFYTVINKKSGEIVPMEVNFNFDDPNLIILPLAFGKRQGREFIWNDLLSLETGSLKLANGRVIEKTLYNRRTRQDEPALFVALTFERREVLDSSNIKPMNLIGVDRGENIPAVIALTDPEGCPLSRFKDSLGNPTHILRIGESYKEKQRTIQAKKEVEQRRAGGYSRKYASKAKNLADDMVRNTARDLLYYAVTQDAMLIFENLSRGFGRQGKRTFMAERQYTRMEDWLTAKLAYEGLPSKTYLSKTLAQYTSKTCSNCGFTITSADYDRVLEKLKKTATGWMTTINGKELKVEGQITYYNRYKRQNVVKDLSVELDRLSEESVNNDISSWTKGRSGEALSLLKKRFSHRPVQEKFVCLNCGFETHADEQAALNIARSWLFLRSQEYKKYQTNKTTGNTDKRAFVETWQSFYRKKLKEVWKPAV

SEQ ID NO: 40981 - protein, 978 aa, synthetic construct
  REGION 1..978: note = engineered CasX variant
QEGKRINKIRRRLVKDSNTKKAGKTGPMKTLLVRVMTPDLRERLENLRKKPENIPQPISNTSRANLNKLLTDYTEMKKAILHVYWEEFQKDPVGLMSRVAQPASKKIDQNKLKPEMDEKGNLTTAGFACSQCGQPLFVYKLEQVSEKGKAYTNYFGRCNVAEHEKLILLAQLKPEKDSDEAVTYSLGKFGQRALDFYSIHVTKESTHPVKPLAQIAGNRYASTPVGKALSDACMGTIASFLSKYQDIIIEHQKVVKGNQKRLESLRELAGKENLEYPSVTLPPQPHTKEGVDAYNEVIARVRMWVNLNLWQKLKLSRDDAKPLLRLKGFPSFPLVERQANEVDWWDMVCNVKKLINEKKEDGKVFWQNLAGYKRQEALRPYLSSEEDRKKGKKFARYQLGDLLWHLEKKHGEDWGKVYDEAWERIDKKVEGLSKHIKLEEERRSEDAQSKAALTDWLRAKASFVIEGLKEADKDEFCRCELKLQKWYGDLRGKPFAIEAENSILDISGFSKQYNCAFIWQKDGVKKLNLYLIINYFKGGKLRFKKIKPEAFEANRFYTVINKKSGEIVPMEVNFNFDDPNLIILPLAFGKRQGREFIWNDLLSLETGSLKLANGRVIEKTLYNRRTRQDEPALFVALTFERREVLDSSNIKPMNLIGVDRGENIPAVIALTDPEGCPLSRFKDSLGNPTHILRIGESYKEKQRTIQAKKEVEQRRAGGYSRKYASKAKNLADDMVRNTARDLLYYAVTQDAMLIFENLSRGFGRQGKRTFMAERQYTRMEDWLTAKLAYEGLPSKTYLSKTLAQYTSKTCSNCGFTITSADYDRVLEKLKKTATGWMTTINGKELKVEGQITYYNRYKRQNVVKDLSVELDRLSEESVNNDISSWTKGRSGEALSLLKKRFSHRPVQEKFVCLNCGFETHADEQAALNIARSWLFLRSQEYKKYQTNKTTGNTDKRAFVETWQSFYRKKLKEVWKPAV

SEQ ID NO: 40982 - protein, 978 aa, synthetic construct
  REGION 1..978: note = engineered CasX variant
QEGKRINKIRRRLVKDSNTKKAGKTGPMKTLLVRVMTPDLRERLENLRKKPENIPQPISNTSRANLNKLLTDYTEMKKAILHVYWEEFQKDPVGLMSRVAQPASKKIDQNKLKPEMDEKGNLTTAGFACSQCGQPLFVYKLEQVSEKGKAYTNYFGRCNVAEHEKLILLAQLKPEKDSDEAVTYSLGKFGQRALDFYSIHVTKESTHPVKPLAQIAGNRYASAPVGKALSDACMGTIASFLSKYQDIIIEHQKVVKGNQKRLESLRELAGKENLEYPSVTLPPQPHTKEGVDAYNEVIARVRMWVNLNLWQKLKLSRDDAKPLLRLKGFPSFPLVERQANEVDWWDMVCNVKKLINEKKEDGKVFWQNLAGYKRQEALRPYLSSEEDRKKGKKFARYQLGDLLWHLEKKHGEDWGKVYDEAWERIDKKVEGLSKHIKLEEERRSEDAQSKAALTDWLRAKASFVIEGLKEADKDEFCRCELKLQKWYGDLRGKPFAIEAENSILDISGFSKQYNCAFIWQKDGVKKLNLYLIINYFKGGKLRFKKIKPEAFEANRFYTVINKKSGEIVPMEVNFNFDDPNLIILPLAFGKRQGREFIWNDLLSLETGSLKLANGRVIEKTLYNRRTRQDEPALFVALTFERREVLDSSNIKPMNLIGVDRGENIPAVIALTDPEGCPLSRFKDSLGNPTHILRIGESYKEKQRTIQAKKEVEQRRAGGYSRKYASKAKNLADDMVRNTARDLLYYAVTQDAMLIFENLSRGFGRQGKRTFMAERQYTRMEDWLTAKLAYEGLPSKTYLSKTLAQYTSKTCSNCGFTITSADYDRVLEKLKKTATGWMTTINGKELKVEGQITYYNRYKRQNVVKDLSVELDRLSEESVNNDISSWTKGRSGEALSLLKKRFSHRPVQEKFVCLNCGFETHADEQAALNIARSWLFLRSQEYKKYQTNKTTGNTDKRAFVETWQSFYRKKLKEVWKPAV

SEQ ID NO: 40983 - protein, 978 aa, synthetic construct
  REGION 1..978: note = engineered CasX variant
QEGKRINKIRRRLVKDSNTKKAGKTGPMKTLLVRVMTPDLRERLENLRKKPENIPQPISNTSRANLNKLLTDYTEMKKAILHVYWEEFQKDPVGLMSRVAQPASKKIDQNKLKPEMDEKGNLTTAGFACSQCGQPLFVYKLEQVSEKGKAYTNYFGRCNVAEHEKLILLAQLKPEKDSDEAVTYSLGKFGQRALDFYSIHVTKESTHPVKPLAQIAGNRYASVPVGKALSDACMGTIASFLSKYQDIIIEHQKVVKGNQKRLESLRELAGKENLEYPSVTLPPQPHTKEGVDAYNEVIARVRMWVNLNLWQKLKLSRDDAKPLLRLKGFPSFPLVERQANEVDWWDMVCNVKKLINEKKEDGKVFWQNLAGYKRQEALRPYLSSEEDRKKGKKFARYQLGDLLWHLEKKHGEDWGKVYDEAWERIDKKVEGLSKHIKLEEERRSEDAQSKAALTDWLRAKASFVIEGLKEADKDEFCRCELKLQKWYGDLRGKPFAIEAENSILDISGFSKQYNCAFIWQKDGVKKLNLYLIINYFKGGKLRFKKIKPEAFEANRFYTVINKKSGEIVPMEVNFNFDDPNLIILPLAFGKRQGREFIWNDLLSLETGSLKLANGRVIEKTLYNRRTRQDEPALFVALTFERREVLDSSNIKPMNLIGVDRGENIPAVIALTDPEGCPLSRFKDSLGNPTHILRIGESYKEKQRTIQAKKEVEQRRAGGYSRKYASKAKNLADDMVRNTARDLLYYAVTQDAMLIFENLSRGFGRQGKRTFMAERQYTRMEDWLTAKLAYEGLPSKTYLSKTLAQYTSKTCSNCGFTITSADYDRVLEKLKKTATGWMTTINGKELKVEGQITYYNRYKRQNVVKDLSVELDRLSEESVNNDISSWTKGRSGEALSLLKKRFSHRPVQEKFVCLNCGFETHADEQAALNIARSWLFLRSQEYKKYQTNKTTGNTDKRAFVETWQSFYRKKLKEVWKPAV

SEQ ID NO: 40984 - protein, 978 aa, synthetic construct
  REGION 1..978: note = engineered CasX variant
QEGKRINKIRRRLVKDSNTKKAGKTGPMKTLLVRVMTPDLRERLENLRKKPENIPQPISNTSRANLNKLLTDYTEMKKAILHVYWEEFQKDPVGLMSRVAQPASKKIDQNKLKPEMDEKGNLTTAGFACSQCGQPLFVYKLEQVSEKGKAYTNYFGRCNVAEHEKLIKLAQLKPEKDSDEAVTYSLGKFGQRALDFYSIHVTKESTHPVKPLAQIAGNRYASGPVGKALSDACMGTIASFLSKYQDIIIEHQKVVKGNQKRLESLRELAGKENLEYPSVTLPPQPHTKEGVDAYNEVIARVRMWVNLNLWQKLKLSRDDAKPLLRLKGFPSFPLVERQANEVDWWDMVCNVKKLINEKKEDGKVFWQNLAGYKRQEALRPYLSSEEDRKKGKKFARYQLGDLLWHLEKKHGEDWGKVYDEAWERIDKKVEGLSKHIKLEEERRSEDAQSKAALTDWLRAKASFVIEGLKEADKDEFCRCELKLQKWYGDLRGKPFAIEAENSILDISGFSKQYNCAFIWQKDGVKKLNLYLIINYFKGGKLRFKKIKPEAFEANRFYTVINKKSGEIVPMEVNFNFDDPNLIILPLAFGKRQGREFIWNDLLSLETGSLKLANGRVIEKTLYNRRTRQDEPALFVALTFERREVLDSSNIKPMNLIGVDRGENIPAVIALTDPEGCPLSRFKDSLGNPTHILRIGESYKEKQRTIQAKKEVEQRRAGGYSRKYASKAKNLADDMVRNTARDLLYYAVTQDAMLIFENLSRGFGRQGKRTFMAERQYTRMEDWLTAKLAYEGLPSKTYLSKTLAQYTSKTCSNCGFTITSADYDRVLEKLKKTATGWMTTINGKELKVEGQITYYNRYKRQNVVKDLSVELDRLSEESVNNDISSWTKGRSGEALSLLKKRFSHRPVQEKFVCLNCGFETHADEQAALNIARSWLFLRSQEYKKYQTNKTTGNTDKRAFVETWQSFYRKKLKEVWKPAV

SEQ ID NO: 40985 - protein, 977 aa, synthetic construct
  REGION 1..977: note = engineered CasX variant
QEGKRINKIRRRLVKDSNTKKAGKTGPMKTLLVRVMTPDLRERLENLRKKPENIPQPISNTSRANLNKLLTDYTEMKKAILHVYWEEFQKDPVGLMSRVAQPASKKIDQNKLKPEMDEKGNLTTAGFACSQCGQPLFVYKLEQVSEKGKAYTNYFGRCNVAEHEKLILLAQLKPEKDSDEAVTYSLGKFGQRALDFYSIHVTKESTHPVKPLAQIAGNRYASPVGKALSDACMGTIASFLSKYQDIIIEHQKVVKGNQKRLESLRELAGKENLEYPSVTLPPQPHTKEGVDAYNEVIARVRMWVNLNLWQKLKLSRDDAKPLLRLKGFPSFPLVERQANEVDWWDMVCNVKKLINEKKEDGKVFWQNLAGYKRQEALRPYLSSEEDRKKGKKFARYQLGDLLWHLEKKHGEDWGKVYDEAWERIDKKVEGLSKHIKLEEERRSEDAQSKAALTDWLRAKASFVIEGLKEADKDEFCRCELKLQKWYGDLRGKPFAIEAENSILDISGFSKQYNCAFIWQKDGVKKLNLYLIINYFKGGKLRFKKIKPEAFEANRFYTVINKKSGEIVPMEVNFNFDDPNLIILPLAFGKRQGREFIWNDLLSLETGSLKLANGRVIEKTLYNRRTRQDEPALFVALTFERREVLDSSNIKPMNLIGVDRGENIPAVIALTDPEGCPLSRFKDSLGNPTHILRIGESYKEKQRTIQAKKEVEQRRAGGYSRKYASKAKNLADDMVRNTARDLLYYAVTQDAMLIFENLSRGFGRQGKRTFMAERQYTRMEDWLTAKLAYEGLPSKTYLSKTLAQYTSKTCSNCGFTITSADYDRVLEKLKKTATGWMTTINGKELKVEGQITYYNRYKRQNVVKDLSVELDRLSEESVNNDISSWTKGRSGEALSLLKKRFSHRPVQEKFVCLNCGFETHADEQAALNIARSWLFLRSQEYKKYQTNKTTGNTDKRAFVETWQSFYRKKLKEVWKPAV

SEQ ID NO: 40986 - protein, 978 aa, synthetic construct
  REGION 1..978: note = engineered CasX variant
QEGKRINKIRRRLVKDSNTKKAGKTGPMKTLLVRVMTPDLRERLENLRKKPENIPQPISNTSRANLNKLLTDYTEMKKAILHVYWEEFQKDPVGLMSRVAQPASKKIDQNKLKPEMDEKGNLTTAGFACSQCGQPLFVYKLEQVSEKGKAYTNYFGRCNVAEHEKLILLAQLKPEKDSDEAVTYSLGKFGQRALDFYSIHVTKESTHPVKPLAQIAGNRYASYPVGKALSDACMGTIASFLSKYQDIIIEHQKVVKGNQKRLESLRELAGKENLEYPSVTLPPQPHTKEGVDAYNEVIARVRMWVNLNLWQKLKLSRDDAKPLLRLKGFPSFPLVERQANEVDWWDMVCNVKKLINEKKEDGKVFWQNLAGYKRQEALRPYLSSEEDRKKGKKFARYQLGDLLLHLYKKHGEDWGKVYDEAWERIDKKVEGLSKHIKLEEERRSEDAQSKAALTDWLRAKASFVIEGLKEADKDEFCRCELKLQKWYGDLRGKPFAIEAENSILDISGFSKQYNCAFIWQKDGVKKLNLYLIINYFKGGKLRFKKIKPEAFEANRFYTVINKKSGEIVPMEVNFNFDDPNLIILPLAFGKRQGREFIWNDLLSLETGSLKLANGRVIEKTLYNRRTRQDEPALFVALTFERREVLDSSNIKPMNLIGVDRGENIPAVIALTDPEGCPLSRFKDSLGNPTHILRIGESYKEKQRTIQAKKEVEQRRAGGYSRKYASKAKNLADDMVRNTARDLLYYAVTQDAMLIFENLSRGFGRQGKRTFMAERQYTRMEDWLTAKLAYEGLPSKTYLSKTLAQYTSKTCSNCGFTITSADYDRVLEKLKKTATGWMTTINGKELKVEGQITYYNRYKRQNVVKDLSVELDRLSEESVNNDISSWTKGRSGEALSLLKKRFSHRPVQEKFVCLNCGFETHADEQAALNIARSWLFLRSQEYKKYQTNKTTGNTDKRAFVETWQSFYRKKLKEVWKPAV

SEQ ID NO: 40987 - protein, 978 aa, synthetic construct
  REGION 1..978: note = engineered CasX variant
QEGKRINKIRRRLVKDSNTKKAGKTGPMKTLLVRVMTPDLRERLENLRKKPENIPQPISNTSRANLNKLLTDYTEMKKAILHVYWEEFQKDPVGLMSRVAQPASKKIDQNKLKPEMDEKGNLTTAGFACSQCGQPLFVYKLEQVSEKGKAYTNYFGRCNVAEHEKLILLAQLKPEKDSDEAVTYSLGKFGQRALDFYSIHVTKESTHPVKPLAQIAGNRYASHPVGKALSDACMGTIASFLSKYQDIIIEHQKVVKGNQKRLESLRELAGKENLEYPSVTLPPQPHTKEGVDAYNEVIARVRMWVNLNLWQKLKLSRDDAKPLLRLKGFPSFPLVERQANEVDWWDMVCNVKKLINEKKEDGKVFWQNLAGYKRQEALRPYLSSEEDRKKGKKFARYQLGDLLLHLYKKHGEDWGKVYDEAWERIDKKVEGLSKHIKLEEERRSEDAQSKAALTDWLRAKASFVIEGLKEADKDEFCRCELKLQKWYGDLRGKPFAIEAENSILDISGFSKQYNCAFIWQKDGVKKLNLYLIINYFKGGKLRFKKIKPEAFEANRFYTVINKKSGEIVPMEVNFNFDDPNLIILPLAFGKRQGREFIWNDLLSLETGSLKLANGRVIEKTLYNRRTRQDEPALFVALTFERREVLDSSNIKPMNLIGVDRGENIPAVIALTDPEGCPLSRFKDSLGNPTHILRIGESYKEKQRTIQAKKEVEQRRAGGYSRKYASKAKNLADDMVRNTARDLLYYAVTQDAMLIFENLSRGFGRQGKRTFMAERQYTRMEDWLTAKLAYEGLPSKTYLSKTLAQYTSKTCSNCGFTITSADYDRVLEKLKKTATGWMTTINGKELKVEGQITYYNRYKRQNVVKDLSVELDRLSEESVNNDISSWTKGRSGEALSLLKKRFSHRPVQEKFVCLNCGFETHADEQAALNIARSWLFLRSQEYKKYQTNKTTGNTDKRAFVETWQSFYRKKLKEVWKPAV

SEQ ID NO: 40988 - protein, 978 aa, synthetic construct
  REGION 1..978: note = engineered CasX variant
QEGKRINKIRRRLVKDSNTKKAGKTGPMKTLLVRVMTPDLRERLENLRKKPENIPQPISNTSRANLNKLLTDYTEMKKAILHVYWEEFQKDPVGLMSRVAQPASKKIDQNKLKPEMDEKGNLTTAGFACSQCGQPLFVYKLEQVSEKGKAYTNYFGRCNVAEHEKLILLAQLKPEKDSDEAVTYSLGKFGQRALDFYSIHVTKESTHPVKPLAQIAGNRYASSPVGKALSDACMGTIASFLSKYQDIIIEHQKVVKGNQKRLESLRELAGKENLEYPSVTLPPQPHTKEGVDAYNEVIARVRMWVNLNLWQKLKLSRDDAKPLLRLKGFPSFPLVERQANEVDWWDMVCNVKKLINEKKEDGKVFWQNLAGYKRQEALRPYLSSEEDRKKGKKFARYQLGDLLLHLYKKHGEDWGKVYDEAWERIDKKVEGLSKHIKLEEERRSEDAQSKAALTDWLRAKASFVIEGLKEADKDEFCRCELKLQKWYGDLRGKPFAIEAENSILDISGFSKQYNCAFIWQKDGVKKLNLYLIINYFKGGKLRFKKIKPEAFEANRFYTVINKKSGEIVPMEVNFNFDDPNLIILPLAFGKRQGREFIWNDLLSLETGSLKLANGRVIEKTLYNRRTRQDEPALFVALTFERREVLDSSNIKPMNLIGVDRGENIPAVIALTDPEGCPLSRFKDSLGNPTHILRIGESYKEKQRTIQAKKEVEQRRAGGYSRKYASKAKNLADDMVRNTARDLLYYAVTQDAMLIFENLSRGFGRQGKRTFMAERQYTRMEDWLTAKLAYEGLPSKTYLSKTLAQYTSKTCSNCGFTITSADYDRVLEKLKKTATGWMTTINGKELKVEGQITYYNRYKRQNVVKDLSVELDRLSEESVNNDISSWTKGRSGEALSLLKKRFSHRPVQEKFVCLNCGFETHADEQAALNIARSWLFLRSQEYKKYQTNKTTGNTDKRAFVETWQSFYRKKLKEVWKPAV

SEQ ID NO: 40989 - protein, 978 aa, synthetic construct
  REGION 1..978: note = engineered CasX variant
QEGKRINKIRRRLVKDSNTKKAGKTGPMKTLLVRVMTPDLRERLENLRKKPENIPQPISNTSRANLNKLLTDYTEMKKAILHVYWEEFQKDPVGLMSRVAQPASKKIDQNKLKPEMDEKGNLTTAGFACSQCGQPLFVYKLEQVSEKGKAYTNYFGRCNVAEHEKLILLAQLKPEKDSDEAVTYSLGKFGQRALDFYSIHVTKESTHPVKPLAQIAGNRYASTPVGKALSDACMGTIASFLSKYQDIIIEHQKVVKGNQKRLESLRELAGKENLEYPSVTLPPQPHTKEGVDAYNEVIARVRMWVNLNLWQKLKLSRDDAKPLLRLKGFPSFPLVERQANEVDWWDMVCNVKKLINEKKEDGKVFWQNLAGYKRQEALRPYLSSEEDRKKGKKFARYQLGDLLLHLYKKHGEDWGKVYDEAWERIDKKVEGLSKHIKLEEERRSEDAQSKAALTDWLRAKASFVIEGLKEADKDEFCRCELKLQKWYGDLRGKPFAIEAENSILDISGFSKQYNCAFIWQKDGVKKLNLYLIINYFKGGKLRFKKIKPEAFEANRFYTVINKKSGEIVPMEVNFNFDDPNLIILPLAFGKRQGREFIWNDLLSLETGSLKLANGRVIEKTLYNRRTRQDEPALFVALTFERREVLDSSNIKPMNLIGVDRGENIPAVIALTDPEGCPLSRFKDSLGNPTHILRIGESYKEKQRTIQAKKEVEQRRAGGYSRKYASKAKNLADDMVRNTARDLLYYAVTQDAMLIFENLSRGFGRQGKRTFMAERQYTRMEDWLTAKLAYEGLPSKTYLSKTLAQYTSKTCSNCGFTITSADYDRVLEKLKKTATGWMTTINGKELKVEGQITYYNRYKRQNVVKDLSVELDRLSEESVNNDISSWTKGRSGEALSLLKKRFSHRPVQEKFVCLNCGFETHADEQAALNIARSWLFLRSQEYKKYQTNKTTGNTDKRAFVETWQSFYRKKLKEVWKPAV

SEQ ID NO: 40990 - protein, 978 aa, synthetic construct
  REGION 1..978: note = engineered CasX variant
QEGKRINKIRRRLVKDSNTKKAGKTGPMKTLLVRVMTPDLRERLENLRKKPENIPQPISNTSRANLNKLLTDYTEMKKAILHVYWEEFQKDPVGLMSRVAQPASKKIDQNKLKPEMDEKGNLTTAGFACSQCGQPLFVYKLEQVSEKGKAYTNYFGRCNVAEHEKLILLAQLKPEKDSDEAVTYSLGKFGQRALDFYSIHVTKESTHPVKPLAQIAGNRYASAPVGKALSDACMGTIASFLSKYQDIIIEHQKVVKGNQKRLESLRELAGKENLEYPSVTLPPQPHTKEGVDAYNEVIARVRMWVNLNLWQKLKLSRDDAKPLLRLKGFPSFPLVERQANEVDWWDMVCNVKKLINEKKEDGKVFWQNLAGYKRQEALRPYLSSEEDRKKGKKFARYQLGDLLLHLYKKHGEDWGKVYDEAWERIDKKVEGLSKHIKLEEERRSEDAQSKAALTDWLRAKASFVIEGLKEADKDEFCRCELKLQKWYGDLRGKPFAIEAENSILDISGFSKQYNCAFIWQKDGVKKLNLYLIINYFKGGKLRFKKIKPEAFEANRFYTVINKKSGEIVPMEVNFNFDDPNLIILPLAFGKRQGREFIWNDLLSLETGSLKLANGRVIEKTLYNRRTRQDEPALFVALTFERREVLDSSNIKPMNLIGVDRGENIPAVIALTDPEGCPLSRFKDSLGNPTHILRIGESYKEKQRTIQAKKEVEQRRAGGYSRKYASKAKNLADDMVRNTARDLLYYAVTQDAMLIFENLSRGFGRQGKRTFMAERQYTRMEDWLTAKLAYEGLPSKTYLSKTLAQYTSKTCSNCGFTITSADYDRVLEKLKKTATGWMTTINGKELKVEGQITYYNRYKRQNVVKDLSVELDRLSEESVNNDISSWTKGRSGEALSLLKKRFSHRPVQEKFVCLNCGFETHADEQAALNIARSWLFLRSQEYKKYQTNKTTGNTDKRAFVETWQSFYRKKLKEVWKPAV

SEQ ID NO: 40991 - protein, 978 aa, synthetic construct
  REGION 1..978: note = engineered CasX variant
QEGKRINKIRRRLVKDSNTKKAGKTGPMKTLLVRVMTPDLRERLENLRKKPENIPQPISNTSRANLNKLLTDYTEMKKAILHVYWEEFQKDPVGLMSRVAQPASKKIDQNKLKPEMDEKGNLTTAGFACSQCGQPLFVYKLEQVSEKGKAYTNYFGRCNVAEHEKLILLAQLKPEKDSDEAVTYSLGKFGQRALDFYSIHVTKESTHPVKPLAQIAGNRYASVPVGKALSDACMGTIASFLSKYQDIIIEHQKVVKGNQKRLESLRELAGKENLEYPSVTLPPQPHTKEGVDAYNEVIARVRMWVNLNLWQKLKLSRDDAKPLLRLKGFPSFPLVERQANEVDWWDMVCNVKKLINEKKEDGKVFWQNLAGYKRQEALRPYLSSEEDRKKGKKFARYQLGDLLLHLYKKHGEDWGKVYDEAWERIDKKVEGLSKHIKLEEERRSEDAQSKAALTDWLRAKASFVIEGLKEADKDEFCRCELKLQKWYGDLRGKPFAIEAENSILDISGFSKQYNCAFIWQKDGVKKLNLYLIINYFKGGKLRFKKIKPEAFEANRFYTVINKKSGEIVPMEVNFNFDDPNLIILPLAFGKRQGREFIWNDLLSLETGSLKLANGRVIEKTLYNRRTRQDEPALFVALTFERREVLDSSNIKPMNLIGVDRGENIPAVIALTDPEGCPLSRFKDSLGNPTHILRIGESYKEKQRTIQAKKEVEQRRAGGYSRKYASKAKNLADDMVRNTARDLLYYAVTQDAMLIFENLSRGFGRQGKRTFMAERQYTRMEDWLTAKLAYEGLPSKTYLSKTLAQYTSKTCSNCGFTITSADYDRVLEKLKKTATGWMTTINGKELKVEGQITYYNRYKRQNVVKDLSVELDRLSEESVNNDISSWTKGRSGEALSLLKKRFSHRPVQEKFVCLNCGFETHADEQAALNIARSWLFLRSQEYKKYQTNKTTGNTDKRAFVETWQSFYRKKLKEVWKPAV

SEQ ID NO: 40992 - protein, 978 aa, synthetic construct
  REGION 1..978: note = engineered CasX variant
QEGKRINKIRRRLVKDSNTKKAGKTGPMKTLLVRVMTPDLRERLENLRKKPENIPQPISNTSRANLNKLLTDYTEMKKAILHVYWEEFQKDPVGLMSRVAQPASKKIDQNKLKPEMDEKGNLTTAGFACSQCGQPLFVYKLEQVSEKGKAYTNYFGRCNVAEHEKLIKLAQLKPEKDSDEAVTYSLGKFGQRALDFYSIHVTKESTHPVKPLAQIAGNRYASGPVGKALSDACMGTIASFLSKYQDIIIEHQKVVKGNQKRLESLRELAGKENLEYPSVTLPPQPHTKEGVDAYNEVIARVRMWVNLNLWQKLKLSRDDAKPLLRLKGFPSFPLVERQANEVDWWDMVCNVKKLINEKKEDGKVFWQNLAGYKRQEALRPYLSSEEDRKKGKKFARYQLGDLLLHLYKKHGEDWGKVYDEAWERIDKKVEGLSKHIKLEEERRSEDAQSKAALTDWLRAKASFVIEGLKEADKDEFCRCELKLQKWYGDLRGKPFAIEAENSILDISGFSKQYNCAFIWQKDGVKKLNLYLIINYFKGGKLRFKKIKPEAFEANRFYTVINKKSGEIVPMEVNFNFDDPNLIILPLAFGKRQGREFIWNDLLSLETGSLKLANGRVIEKTLYNRRTRQDEPALFVALTFERREVLDSSNIKPMNLIGVDRGENIPAVIALTDPEGCPLSRFKDSLGNPTHILRIGESYKEKQRTIQAKKEVEQRRAGGYSRKYASKAKNLADDMVRNTARDLLYYAVTQDAMLIFENLSRGFGRQGKRTFMAERQYTRMEDWLTAKLAYEGLPSKTYLSKTLAQYTSKTCSNCGFTITSADYDRVLEKLKKTATGWMTTINGKELKVEGQITYYNRYKRQNVVKDLSVELDRLSEESVNNDISSWTKGRSGEALSLLKKRFSHRPVQEKFVCLNCGFETHADEQAALNIARSWLFLRSQEYKKYQTNKTTGNTDKRAFVETWQSFYRKKLKEVWKPAV

SEQ ID NO: 40993 - protein, 977 aa, synthetic construct
  REGION 1..977: note = engineered CasX variant
QEGKRINKIRRRLVKDSNTKKAGKTGPMKTLLVRVMTPDLRERLENLRKKPENIPQPISNTSRANLNKLLTDYTEMKKAILHVYWEEFQKDPVGLMSRVAQPASKKIDQNKLKPEMDEKGNLTTAGFACSQCGQPLFVYKLEQVSEKGKAYTNYFGRCNVAEHEKLILLAQLKPEKDSDEAVTYSLGKFGQRALDFYSIHVTKESTHPVKPLAQIAGNRYASPVGKALSDACMGTIASFLSKYQDIIIEHQKVVKGNQKRLESLRELAGKENLEYPSVTLPPQPHTKEGVDAYNEVIARVRMWVNLNLWQKLKLSRDDAKPLLRLKGFPSFPLVERQANEVDWWDMVCNVKKLINEKKEDGKVFWQNLAGYKRQEALRPYLSSEEDRKKGKKFARYQLGDLLLHLYKKHGEDWGKVYDEAWERIDKKVEGLSKHIKLEEERRSEDAQSKAALTDWLRAKASFVIEGLKEADKDEFCRCELKLQKWYGDLRGKPFAIEAENSILDISGFSKQYNCAFIWQKDGVKKLNLYLIINYFKGGKLRFKKIKPEAFEANRFYTVINKKSGEIVPMEVNFNFDDPNLIILPLAFGKRQGREFIWNDLLSLETGSLKLANGRVIEKTLYNRRTRQDEPALFVALTFERREVLDSSNIKPMNLIGVDRGENIPAVIALTDPEGCPLSRFKDSLGNPTHILRIGESYKEKQRTIQAKKEVEQRRAGGYSRKYASKAKNLADDMVRNTARDLLYYAVTQDAMLIFENLSRGFGRQGKRTFMAERQYTRMEDWLTAKLAYEGLPSKTYLSKTLAQYTSKTCSNCGFTITSADYDRVLEKLKKTATGWMTTINGKELKVEGQITYYNRYKRQNVVKDLSVELDRLSEESVNNDISSWTKGRSGEALSLLKKRFSHRPVQEKFVCLNCGFETHADEQAALNIARSWLFLRSQEYKKYQTNKTTGNTDKRAFVETWQSFYRKKLKEVWKPAV

SEQ ID NO: 40994 - protein, 978 aa, synthetic construct
  REGION 1..978: note = engineered CasX variant
QEGKRINKIRRRLVKDSNTKKAGKTGPMKTLLVRVMTPDLRERLENLRKKPENIPQPISNTSRANLNKLLTDYTEMKKAILHVYWEEFQKDPVGLMSRVAQPASKKIDQNKLKPEMDEKGNLTTAGFACSQCGQPLFVYKLEQVSEKGKAYTNYFGRCNVAEHEKLILLAQLKPEKDSDEAVTYSLGKFGQRALDFYSIHVTKESTHPVKPLAQIAGNRYASYPVGKALSDACMGTIASFLSKYQDIIIEHQKVVKGNQKRLESLRELAGKENLEYPSVTLPPQPHTKEGVDAYNEVIARVRMWVNLNLWQKLKLSRDDAKPLLRLKGFPSFPLVERQANEVDWWDMVCNVKKLINEKKEDGKVFWQNLAGYKRQEALRPYLSSEEDRKKGKKFARYQLGDLLLHLEKKHPEDWGKVYDEAWERIDKKVEGLSKHIKLEEERRSEDAQSKAALTDWLRAKASFVIEGLKEADKDEFCRCELKLQKWYGDLRGKPFAIEAENSILDISGFSKQYNCAFIWQKDGVKKLNLYLIINYFKGGKLRFKKIKPEAFEANRFYTVINKKSGEIVPMEVNFNFDDPNLIILPLAFGKRQGREFIWNDLLSLETGSLKLANGRVIEKTLYNRRTRQDEPALFVALTFERREVLDSSNIKPMNLIGVDRGENIPAVIALTDPEGCPLSRFKDSLGNPTHILRIGESYKEKQRTIQAKKEVEQRRAGGYSRKYASKAKNLADDMVRNTARDLLYYAVTQDAMLIFENLSRGFGRQGKRTFMAERQYTRMEDWLTAKLAYEGLPSKTYLSKTLAQYTSKTCSNCGFTITSADYDRVLEKLKKTATGWMTTINGKELKVEGQITYYNRYKRQNVVKDLSVELDRLSEESVNNDISSWTKGRSGEALSLLKKRFSHRPVQEKFVCLNCGFETHADEQAALNIARSWLFLRSQEYKKYQTNKTTGNTDKRAFVETWQSFYRKKLKEVWKPAV

SEQ ID NO: 40995 - protein, 978 aa, synthetic construct
  REGION 1..978: note = engineered CasX variant
QEGKRINKIRRRLVKDSNTKKAGKTGPMKTLLVRVMTPDLRERLENLRKKPENIPQPISNTSRANLNKLLTDYTEMKKAILHVYWEEFQKDPVGLMSRVAQPASKKIDQNKLKPEMDEKGNLTTAGFACSQCGQPLFVYKLEQVSEKGKAYTNYFGRCNVAEHEKLILLAQLKPEKDSDEAVTYSLGKFGQRALDFYSIHVTKESTHPVKPLAQIAGNRYASHPVGKALSDACMGTIASFLSKYQDIIIEHQKVVKGNQKRLESLRELAGKENLEYPSVTLPPQPHTKEGVDAYNEVIARVRMWVNLNLWQKLKLSRDDAKPLLRLKGFPSFPLVERQANEVDWWDMVCNVKKLINEKKEDGKVFWQNLAGYKRQEALRPYLSSEEDRKKGKKFARYQLGDLLLHLEKKHPEDWGKVYDEAWERIDKKVEGLSKHIKLEEERRSEDAQSKAALTDWLRAKASFVIEGLKEADKDEFCRCELKLQKWYGDLRGKPFAIEAENSILDISGFSKQYNCAFIWQKDGVKKLNLYLIINYFKGGKLRFKKIKPEAFEANRFYTVINKKSGEIVPMEVNFNFDDPNLIILPLAFGKRQGREFIWNDLLSLETGSLKLANGRVIEKTLYNRRTRQDEPALFVALTFERREVLDSSNIKPMNLIGVDRGENIPAVIALTDPEGCPLSRFKDSLGNPTHILRIGESYKEKQRTIQAKKEVEQRRAGGYSRKYASKAKNLADDMVRNTARDLLYYAVTQDAMLIFENLSRGFGRQGKRTFMAERQYTRMEDWLTAKLAYEGLPSKTYLSKTLAQYTSKTCSNCGFTITSADYDRVLEKLKKTATGWMTTINGKELKVEGQITYYNRYKRQNVVKDLSVELDRLSEESVNNDISSWTKGRSGEALSLLKKRFSHRPVQEKFVCLNCGFETHADEQAALNIARSWLFLRSQEYKKYQTNKTTGNTDKRAFVETWQSFYRKKLKEVWKPAV

SEQ ID NO: 40996 - protein, 978 aa, synthetic construct
  REGION 1..978: note = engineered CasX variant
QEGKRINKIRRRLVKDSNTKKAGKTGPMKTLLVRVMTPDLRERLENLRKKPENIPQPISNTSRANLNKLLTDYTEMKKAILHVYWEEFQKDPVGLMSRVAQPASKKIDQNKLKPEMDEKGNLTTAGFACSQCGQPLFVYKLEQVSEKGKAYTNYFGRCNVAEHEKLILLAQLKPEKDSDEAVTYSLGKFGQRALDFYSIHVTKESTHPVKPLAQIAGNRYASSPVGKALSDACMGTIASFLSKYQDIIIEHQKVVKGNQKRLESLRELAGKENLEYPSVTLPPQPHTKEGVDAYNEVIARVRMWVNLNLWQKLKLSRDDAKPLLRLKGFPSFPLVERQANEVDWWDMVCNVKKLINEKKEDGKVFWQNLAGYKRQEALRPYLSSEEDRKKGKKFARYQLGDLLLHLEKKHPEDWGKVYDEAWERIDKKVEGLSKHIKLEEERRSEDAQSKAALTDWLRAKASFVIEGLKEADKDEFCRCELKLQKWYGDLRGKPFAIEAENSILDISGFSKQYNCAFIWQKDGVKKLNLYLIINYFKGGKLRFKKIKPEAFEANRFYTVINKKSGEIVPMEVNFNFDDPNLIILPLAFGKRQGREFIWNDLLSLETGSLKLANGRVIEKTLYNRRTRQDEPALFVALTFERREVLDSSNIKPMNLIGVDRGENIPAVIALTDPEGCPLSRFKDSLGNPTHILRIGESYKEKQRTIQAKKEVEQRRAGGYSRKYASKAKNLADDMVRNTARDLLYYAVTQDAMLIFENLSRGFGRQGKRTFMAERQYTRMEDWLTAKLAYEGLPSKTYLSKTLAQYTSKTCSNCGFTITSADYDRVLEKLKKTATGWMTTINGKELKVEGQITYYNRYKRQNVVKDLSVELDRLSEESVNNDISSWTKGRSGEALSLLKKRFSHRPVQEKFVCLNCGFETHADEQAALNIARSWLFLRSQEYKKYQTNKTTGNTDKRAFVETWQSFYRKKLKEVWKPAV

SEQ ID NO: 40997 - protein, 978 aa, synthetic construct
  REGION 1..978: note = engineered CasX variant
QEGKRINKIRRRLVKDSNTKKAGKTGPMKTLLVRVMTPDLRERLENLRKKPENIPQPISNTSRANLNKLLTDYTEMKKAILHVYWEEFQKDPVGLMSRVAQPASKKIDQNKLKPEMDEKGNLTTAGFACSQCGQPLFVYKLEQVSEKGKAYTNYFGRCNVAEHEKLILLAQLKPEKDSDEAVTYSLGKFGQRALDFYSIHVTKESTHPVKPLAQIAGNRYASTPVGKALSDACMGTIASFLSKYQDIIIEHQKVVKGNQKRLESLRELAGKENLEYPSVTLPPQPHTKEGVDAYNEVIARVRMWVNLNLWQKLKLSRDDAKPLLRLKGFPSFPLVERQANEVDWWDMVCNVKKLINEKKEDGKVFWQNLAGYKRQEALRPYLSSEEDRKKGKKFARYQLGDLLLHLEKKHPEDWGKVYDEAWERIDKKVEGLSKHIKLEEERRSEDAQSKAALTDWLRAKASFVIEGLKEADKDEFCRCELKLQKWYGDLRGKPFAIEAENSILDISGFSKQYNCAFIWQKDGVKKLNLYLIINYFKGGKLRFKKIKPEAFEANRFYTVINKKSGEIVPMEVNFNFDDPNLIILPLAFGKRQGREFIWNDLLSLETGSLKLANGRVIEKTLYNRRTRQDEPALFVALTFERREVLDSSNIKPMNLIGVDRGENIPAVIALTDPEGCPLSRFKDSLGNPTHILRIGESYKEKQRTIQAKKEVEQRRAGGYSRKYASKAKNLADDMVRNTARDLLYYAVTQDAMLIFENLSRGFGRQGKRTFMAERQYTRMEDWLTAKLAYEGLPSKTYLSKTLAQYTSKTCSNCGFTITSADYDRVLEKLKKTATGWMTTINGKELKVEGQITYYNRYKRQNVVKDLSVELDRLSEESVNNDISSWTKGRSGEALSLLKKRFSHRPVQEKFVCLNCGFETHADEQAALNIARSWLFLRSQEYKKYQTNKTTGNTDKRAFVETWQSFYRKKLKEVWKPAV

SEQ ID NO: 40998 - protein, 978 aa, synthetic construct
  REGION 1..978: note = engineered CasX variant
QEGKRINKIRRRLVKDSNTKKAGKTGPMKTLLVRVMTPDLRERLENLRKKPENIPQPISNTSRANLNKLLTDYTEMKKAILHVYWEEFQKDPVGLMSRVAQPASKKIDQNKLKPEMDEKGNLTTAGFACSQCGQPLFVYKLEQVSEKGKAYTNYFGRCNVAEHEKLILLAQLKPEKDSDEAVTYSLGKFGQRALDFYSIHVTKESTHPVKPLAQIAGNRYASAPVGKALSDACMGTIASFLSKYQDIIIEHQKVVKGNQKRLESLRELAGKENLEYPSVTLPPQPHTKEGVDAYNEVIARVRMWVNLNLWQKLKLSRDDAKPLLRLKGFPSFPLVERQANEVDWWDMVCNVKKLINEKKEDGKVFWQNLAGYKRQEALRPYLSSEEDRKKGKKFARYQLGDLLLHLEKKHPEDWGKVYDEAWERIDKKVEGLSKHIKLEEERRSEDAQSKAALTDWLRAKASFVIEGLKEADKDEFCRCELKLQKWYGDLRGKPFAIEAENSILDISGFSKQYNCAFIWQKDGVKKLNLYLIINYFKGGKLRFKKIKPEAFEANRFYTVINKKSGEIVPMEVNFNFDDPNLIILPLAFGKRQGREFIWNDLLSLETGSLKLANGRVIEKTLYNRRTRQDEPALFVALTFERREVLDSSNIKPMNLIGVDRGENIPAVIALTDPEGCPLSRFKDSLGNPTHILRIGESYKEKQRTIQAKKEVEQRRAGGYSRKYASKAKNLADDMVRNTARDLLYYAVTQDAMLIFENLSRGFGRQGKRTFMAERQYTRMEDWLTAKLAYEGLPSKTYLSKTLAQYTSKTCSNCGFTITSADYDRVLEKLKKTATGWMTTINGKELKVEGQITYYNRYKRQNVVKDLSVELDRLSEESVNNDISSWTKGRSGEALSLLKKRFSHRPVQEKFVCLNCGFETHADEQAALNIARSWLFLRSQEYKKYQTNKTTGNTDKRAFVETWQSFYRKKLKEVWKPAV

SEQ ID NO: 40999 - protein, 978 aa, synthetic construct
  REGION 1..978: note = engineered CasX variant
QEGKRINKIRRRLVKDSNTKKAGKTGPMKTLLVRVMTPDLRERLENLRKKPENIPQPISNTSRANLNKLLTDYTEMKKAILHVYWEEFQKDPVGLMSRVAQPASKKIDQNKLKPEMDEKGNLTTAGFACSQCGQPLFVYKLEQVSEKGKAYTNYFGRCNVAEHEKLILLAQLKPEKDSDEAVTYSLGKFGQRALDFYSIHVTKESTHPVKPLAQIAGNRYASVPVGKALSDACMGTIASFLSKYQDIIIEHQKVVKGNQKRLESLRELAGKENLEYPSVTLPPQPHTKEGVDAYNEVIARVRMWVNLNLWQKLKLSRDDAKPLLRLKGFPSFPLVERQANEVDWWDMVCNVKKLINEKKEDGKVFWQNLAGYKRQEALRPYLSSEEDRKKGKKFARYQLGDLLLHLEKKHPEDWGKVYDEAWERIDKKVEGLSKHIKLEEERRSEDAQSKAALTDWLRAKASFVIEGLKEADKDEFCRCELKLQKWYGDLRGKPFAIEAENSILDISGFSKQYNCAFIWQKDGVKKLNLYLIINYFKGGKLRFKKIKPEAFEANRFYTVINKKSGEIVPMEVNFNFDDPNLIILPLAFGKRQGREFIWNDLLSLETGSLKLANGRVIEKTLYNRRTRQDEPALFVALTFERREVLDSSNIKPMNLIGVDRGENIPAVIALTDPEGCPLSRFKDSLGNPTHILRIGESYKEKQRTIQAKKEVEQRRAGGYSRKYASKAKNLADDMVRNTARDLLYYAVTQDAMLIFENLSRGFGRQGKRTFMAERQYTRMEDWLTAKLAYEGLPSKTYLSKTLAQYTSKTCSNCGFTITSADYDRVLEKLKKTATGWMTTINGKELKVEGQITYYNRYKRQNVVKDLSVELDRLSEESVNNDISSWTKGRSGEALSLLKKRFSHRPVQEKFVCLNCGFETHADEQAALNIARSWLFLRSQEYKKYQTNKTTGNTDKRAFVETWQSFYRKKLKEVWKPAV

SEQ ID NO: 41000 - protein, 978 aa, synthetic construct
  REGION 1..978: note = engineered CasX variant
QEGKRINKIRRRLVKDSNTKKAGKTGPMKTLLVRVMTPDLRERLENLRKKPENIPQPISNTSRANLNKLLTDYTEMKKAILHVYWEEFQKDPVGLMSRVAQPASKKIDQNKLKPEMDEKGNLTTAGFACSQCGQPLFVYKLEQVSEKGKAYTNYFGRCNVAEHEKLIKLAQLKPEKDSDEAVTYSLGKFGQRALDFYSIHVTKESTHPVKPLAQIAGNRYASGPVGKALSDACMGTIASFLSKYQDIIIEHQKVVKGNQKRLESLRELAGKENLEYPSVTLPPQPHTKEGVDAYNEVIARVRMWVNLNLWQKLKLSRDDAKPLLRLKGFPSFPLVERQANEVDWWDMVCNVKKLINEKKEDGKVFWQNLAGYKRQEALRPYLSSEEDRKKGKKFARYQLGDLLLHLEKKHPEDWGKVYDEAWERIDKKVEGLSKHIKLEEERRSEDAQSKAALTDWLRAKASFVIEGLKEADKDEFCRCELKLQKWYGDLRGKPFAIEAENSILDISGFSKQYNCAFIWQKDGVKKLNLYLIINYFKGGKLRFKKIKPEAFEANRFYTVINKKSGEIVPMEVNFNFDDPNLIILPLAFGKRQGREFIWNDLLSLETGSLKLANGRVIEKTLYNRRTRQDEPALFVALTFERREVLDSSNIKPMNLIGVDRGENIPAVIALTDPEGCPLSRFKDSLGNPTHILRIGESYKEKQRTIQAKKEVEQRRAGGYSRKYASKAKNLADDMVRNTARDLLYYAVTQDAMLIFENLSRGFGRQGKRTFMAERQYTRMEDWLTAKLAYEGLPSKTYLSKTLAQYTSKTCSNCGFTITSADYDRVLEKLKKTATGWMTTINGKELKVEGQITYYNRYKRQNVVKDLSVELDRLSEESVNNDISSWTKGRSGEALSLLKKRFSHRPVQEKFVCLNCGFETHADEQAALNIARSWLFLRSQEYKKYQTNKTTGNTDKRAFVETWQSFYRKKLKEVWKPAV

SEQ ID NO: 41001 - protein, 977 aa, synthetic construct
  REGION 1..977: note = engineered CasX variant
QEGKRINKIRRRLVKDSNTKKAGKTGPMKTLLVRVMTPDLRERLENLRKKPENIPQPISNTSRANLNKLLTDYTEMKKAILHVYWEEFQKDPVGLMSRVAQPASKKIDQNKLKPEMDEKGNLTTAGFACSQCGQPLFVYKLEQVSEKGKAYTNYFGRCNVAEHEKLILLAQLKPEKDSDEAVTYSLGKFGQRALDFYSIHVTKESTHPVKPLAQIAGNRYASPVGKALSDACMGTIASFLSKYQDIIIEHQKVVKGNQKRLESLRELAGKENLEYPSVTLPPQPHTKEGVDAYNEVIARVRMWVNLNLWQKLKLSRDDAKPLLRLKGFPSFPLVERQANEVDWWDMVCNVKKLINEKKEDGKVFWQNLAGYKRQEALRPYLSSEEDRKKGKKFARYQLGDLLLHLEKKHPEDWGKVYDEAWERIDKKVEGLSKHIKLEEERRSEDAQSKAALTDWLRAKASFVIEGLKEADKDEFCRCELKLQKWYGDLRGKPFAIEAENSILDISGFSKQYNCAFIWQKDGVKKLNLYLIINYFKGGKLRFKKIKPEAFEANRFYTVINKKSGEIVPMEVNFNFDDPNLIILPLAFGKRQGREFIWNDLLSLETGSLKLANGRVIEKTLYNRRTRQDEPALFVALTFERREVLDSSNIKPMNLIGVDRGENIPAVIALTDPEGCPLSRFKDSLGNPTHILRIGESYKEKQRTIQAKKEVEQRRAGGYSRKYASKAKNLADDMVRNTARDLLYYAVTQDAMLIFENLSRGFGRQGKRTFMAERQYTRMEDWLTAKLAYEGLPSKTYLSKTLAQYTSKTCSNCGFTITSADYDRVLEKLKKTATGWMTTINGKELKVEGQITYYNRYKRQNVVKDLSVELDRLSEESVNNDISSWTKGRSGEALSLLKKRFSHRPVQEKFVCLNCGFETHADEQAALNIARSWLFLRSQEYKKYQTNKTTGNTDKRAFVETWQSFYRKKLKEVWKPAV

SEQ ID NO: 41002 - protein, 979 aa, synthetic construct
  REGION 1..979: note = engineered CasX variant
QEGKRINKIRRRLVKDSNTKKAGKTGPMKTLLVRVMTPDLRERLENLRKKPENIPQPISNTSRANLNKLLTDYTEMKKAILHVYWEEFQKDPVGLMSRVAQPASKKIDQNKLKPEMDEKGNLTTAGFACSQCGQPLFVYKLEQVSEKGKAYTNYFGRCNVAEHEKLILLAQLKPEKDSDEAVTYSLGKFGQRALDFYSIHVTKESTHPVKPLAQIAGNRYASYPVGKALSDACMGTIASFLSKYQDIIIEHQKVVKGNQKRLESLRELAGKENLEYPSVTLPPQPHTKEGVDAYNEVIARVRMWVNLNLWQKLKLSRDDAKPLLRLKGFPSFPLVERQANEVDWWDMVCNVKKLINEKKEDGKVFWQNLAGYKRQEALRPYLSSEEDRKKGKKFARYQLGDLLLHLEKKHGERDWGKVYDEAWERIDKKVEGLSKHIKLEEERRSEDAQSKAALTDWLRAKASFVIEGLKEADKDEFCRCELKLQKWYGDLRGKPFAIEAENSILDISGFSKQYNCAFIWQKDGVKKLNLYLIINYFKGGKLRFKKIKPEAFEANRFYTVINKKSGEIVPMEVNFNFDDPNLIILPLAFGKRQGREFIWNDLLSLETGSLKLANGRVIEKTLYNRRTRQDEPALFVALTFERREVLDSSNIKPMNLIGVDRGENIPAVIALTDPEGCPLSRFKDSLGNPTHILRIGESYKEKQRTIQAKKEVEQRRAGGYSRKYASKAKNLADDMVRNTARDLLYYAVTQDAMLIFENLSRGFGRQGKRTFMAERQYTRMEDWLTAKLAYEGLPSKTYLSKTLAQYTSKTCSNCGFTITSADYDRVLEKLKKTATGWMTTINGKELKVEGQITYYNRYKRQNVVKDLSVELDRLSEESVNNDISSWTKGRSGEALSLLKKRFSHRPVQEKFVCLNCGFETHADEQAALNIARSWLFLRSQEYKKYQTNKTTGNTDKRAFVETWQSFYRKKLKEVWKPAV

SEQ ID NO: 41003 - protein, 979 aa, synthetic construct
  REGION 1..979: note = engineered CasX variant
QEGKRINKIRRRLVKDSNTKKAGKTGPMKTLLVRVMTPDLRERLENLRKKPENIPQPISNTSRANLNKLLTDYTEMKKAILHVYWEEFQKDPVGLMSRVAQPASKKIDQNKLKPEMDEKGNLTTAGFACSQCGQPLFVYKLEQVSEKGKAYTNYFGRCNVAEHEKLILLAQLKPEKDSDEAVTYSLGKFGQRALDFYSIHVTKESTHPVKPLAQIAGNRYASHPVGKALSDACMGTIASFLSKYQDIIIEHQKVVKGNQKRLESLRELAGKENLEYPSVTLPPQPHTKEGVDAYNEVIARVRMWVNLNLWQKLKLSRDDAKPLLRLKGFPSFPLVERQANEVDWWDMVCNVKKLINEKKEDGKVFWQNLAGYKRQEALRPYLSSEEDRKKGKKFARYQLGDLLLHLEKKHGERDWGKVYDEAWERIDKKVEGLSKHIKLEEERRSEDAQSKAALTDWLRAKASFVIEGLKEADKDEFCRCELKLQKWYGDLRGKPFAIEAENSILDISGFSKQYNCAFIWQKDGVKKLNLYLIINYFKGGKLRFKKIKPEAFEANRFYTVINKKSGEIVPMEVNFNFDDPNLIILPLAFGKRQGREFIWNDLLSLETGSLKLANGRVIEKTLYNRRTRQDEPALFVALTFERREVLDSSNIKPMNLIGVDRGENIPAVIALTDPEGCPLSRFKDSLGNPTHILRIGESYKEKQRTIQAKKEVEQRRAGGYSRKYASKAKNLADDMVRNTARDLLYYAVTQDAMLIFENLSRGFGRQGKRTFMAERQYTRMEDWLTAKLAYEGLPSKTYLSKTLAQYTSKTCSNCGFTITSADYDRVLEKLKKTATGWMTTINGKELKVEGQITYYNRYKRQNVVKDLSVELDRLSEESVNNDISSWTKGRSGEALSLLKKRFSHRPVQEKFVCLNCGFETHADEQAALNIARSWLFLRSQEYKKYQTNKTTGNTDKRAFVETWQSFYRKKLKEVWKPAV

SEQ ID NO: 41004 - protein, 979 aa, synthetic construct
  REGION 1..979: note = engineered CasX variant
QEGKRINKIRRRLVKDSNTKKAGKTGPMKTLLVRVMTPDLRERLENLRKKPENIPQPISNTSRANLNKLLTDYTEMKKAILHVYWEEFQKDPVGLMSRVAQPASKKIDQNKLKPEMDEKGNLTTAGFACSQCGQPLFVYKLEQVSEKGKAYTNYFGRCNVAEHEKLILLAQLKPEKDSDEAVTYSLGKFGQRALDFYSIHVTKESTHPVKPLAQIAGNRYASSPVGKALSDACMGTIASFLSKYQDIIIEHQKVVKGNQKRLESLRELAGKENLEYPSVTLPPQPHTKEGVDAYNEVIARVRMWVNLNLWQKLKLSRDDAKPLLRLKGFPSFPLVERQANEVDWWDMVCNVKKLINEKKEDGKVFWQNLAGYKRQEALRPYLSSEEDRKKGKKFARYQLGDLLLHLEKKHGERDWGKVYDEAWERIDKKVEGLSKHIKLEEERRSEDAQSKAALTDWLRAKASFVIEGLKEADKDEFCRCELKLQKWYGDLRGKPFAIEAENSILDISGFSKQYNCAFIWQKDGVKKLNLYLIINYFKGGKLRFKKIKPEAFEANRFYTVINKKSGEIVPMEVNFNFDDPNLIILPLAFGKRQGREFIWNDLLSLETGSLKLANGRVIEKTLYNRRTRQDEPALFVALTFERREVLDSSNIKPMNLIGVDRGENIPAVIALTDPEGCPLSRFKDSLGNPTHILRIGESYKEKQRTIQAKKEVEQRRAGGYSRKYASKAKNLADDMVRNTARDLLYYAVTQDAMLIFENLSRGFGRQGKRTFMAERQYTRMEDWLTAKLAYEGLPSKTYLSKTLAQYTSKTCSNCGFTITSADYDRVLEKLKKTATGWMTTINGKELKVEGQITYYNRYKRQNVVKDLSVELDRLSEESVNNDISSWTKGRSGEALSLLKKRFSHRPVQEKFVCLNCGFETHADEQAALNIARSWLFLRSQEYKKYQTNKTTGNTDKRAFVETWQSFYRKKLKEVWKPAV

SEQ ID NO: 41005 - protein, 979 aa, synthetic construct
  REGION 1..979: note = engineered CasX variant
QEGKRINKIRRRLVKDSNTKKAGKTGPMKTLLVRVMTPDLRERLENLRKKPENIPQPISNTSRANLNKLLTDYTEMKKAILHVYWEEFQKDPVGLMSRVAQPASKKIDQNKLKPEMDEKGNLTTAGFACSQCGQPLFVYKLEQVSEKGKAYTNYFGRCNVAEHEKLILLAQLKPEKDSDEAVTYSLGKFGQRALDFYSIHVTKESTHPVKPLAQIAGNRYASTPVGKALSDACMGTIASFLSKYQDIIIEHQKVVKGNQKRLESLRELAGKENLEYPSVTLPPQPHTKEGVDAYNEVIARVRMWVNLNLWQKLKLSRDDAKPLLRLKGFPSFPLVERQANEVDWWDMVCNVKKLINEKKEDGKVFWQNLAGYKRQEALRPYLSSEEDRKKGKKFARYQLGDLLLHLEKKHGERDWGKVYDEAWERIDKKVEGLSKHIKLEEERRSEDAQSKAALTDWLRAKASFVIEGLKEADKDEFCRCELKLQKWYGDLRGKPFAIEAENSILDISGFSKQYNCAFIWQKDGVKKLNLYLIINYFKGGKLRFKKIKPEAFEANRFYTVINKKSGEIVPMEVNFNFDDPNLIILPLAFGKRQGREFIWNDLLSLETGSLKLANGRVIEKTLYNRRTRQDEPALFVALTFERREVLDSSNIKPMNLIGVDRGENIPAVIALTDPEGCPLSRFKDSLGNPTHILRIGESYKEKQRTIQAKKEVEQRRAGGYSRKYASKAKNLADDMVRNTARDLLYYAVTQDAMLIFENLSRGFGRQGKRTFMAERQYTRMEDWLTAKLAYEGLPSKTYLSKTLAQYTSKTCSNCGFTITSADYDRVLEKLKKTATGWMTTINGKELKVEGQITYYNRYKRQNVVKDLSVELDRLSEESVNNDISSWTKGRSGEALSLLKKRFSHRPVQEKFVCLNCGFETHADEQAALNIARSWLFLRSQEYKKYQTNKTTGNTDKRAFVETWQSFYRKKLKEVWKPAV

SEQ ID NO: 41006 - protein, 979 aa, synthetic construct
  REGION 1..979: note = engineered CasX variant
QEGKRINKIRRRLVKDSNTKKAGKTGPMKTLLVRVMTPDLRERLENLRKKPENIPQPISNTSRANLNKLLTDYTEMKKAILHVYWEEFQKDPVGLMSRVAQPASKKIDQNKLKPEMDEKGNLTTAGFACSQCGQPLFVYKLEQVSEKGKAYTNYFGRCNVAEHEKLILLAQLKPEKDSDEAVTYSLGKFGQRALDFYSIHVTKESTHPVKPLAQIAGNRYASAPVGKALSDACMGTIASFLSKYQDIIIEHQKVVKGNQKRLESLRELAGKENLEYPSVTLPPQPHTKEGVDAYNEVIARVRMWVNLNLWQKLKLSRDDAKPLLRLKGFPSFPLVERQANEVDWWDMVCNVKKLINEKKEDGKVFWQNLAGYKRQEALRPYLSSEEDRKKGKKFARYQLGDLLLHLEKKHGERDWGKVYDEAWERIDKKVEGLSKHIKLEEERRSEDAQSKAALTDWLRAKASFVIEGLKEADKDEFCRCELKLQKWYGDLRGKPFAIEAENSILDISGFSKQYNCAFIWQKDGVKKLNLYLIINYFKGGKLRFKKIKPEAFEANRFYTVINKKSGEIVPMEVNFNFDDPNLIILPLAFGKRQGREFIWNDLLSLETGSLKLANGRVIEKTLYNRRTRQDEPALFVALTFERREVLDSSNIKPMNLIGVDRGENIPAVIALTDPEGCPLSRFKDSLGNPTHILRIGESYKEKQRTIQAKKEVEQRRAGGYSRKYASKAKNLADDMVRNTARDLLYYAVTQDAMLIFENLSRGFGRQGKRTFMAERQYTRMEDWLTAKLAYEGLPSKTYLSKTLAQYTSKTCSNCGFTITSADYDRVLEKLKKTATGWMTTINGKELKVEGQITYYNRYKRQNVVKDLSVELDRLSEESVNNDISSWTKGRSGEALSLLKKRFSHRPVQEKFVCLNCGFETHADEQAALNIARSWLFLRSQEYKKYQTNKTTGNTDKRAFVETWQSFYRKKLKEVWKPAV

SEQ ID NO: 41007 - protein, 979 aa, synthetic construct
  REGION 1..979: note = engineered CasX variant
QEGKRINKIRRRLVKDSNTKKAGKTGPMKTLLVRVMTPDLRERLENLRKKPENIPQPISNTSRANLNKLLTDYTEMKKAILHVYWEEFQKDPVGLMSRVAQPASKKIDQNKLKPEMDEKGNLTTAGFACSQCGQPLFVYKLEQVSEKGKAYTNYFGRCNVAEHEKLILLAQLKPEKDSDEAVTYSLGKFGQRALDFYSIHVTKESTHPVKPLAQIAGNRYASVPVGKALSDACMGTIASFLSKYQDIIIEHQKVVKGNQKRLESLRELAGKENLEYPSVTLPPQPHTKEGVDAYNEVIARVRMWVNLNLWQKLKLSRDDAKPLLRLKGFPSFPLVERQANEVDWWDMVCNVKKLINEKKEDGKVFWQNLAGYKRQEALRPYLSSEEDRKKGKKFARYQLGDLLLHLEKKHGERDWGKVYDEAWERIDKKVEGLSKHIKLEEERRSEDAQSKAALTDWLRAKASFVIEGLKEADKDEFCRCELKLQKWYGDLRGKPFAIEAENSILDISGFSKQYNCAFIWQKDGVKKLNLYLIINYFKGGKLRFKKIKPEAFEANRFYTVINKKSGEIVPMEVNFNFDDPNLIILPLAFGKRQGREFIWNDLLSLETGSLKLANGRVIEKTLYNRRTRQDEPALFVALTFERREVLDSSNIKPMNLIGVDRGENIPAVIALTDPEGCPLSRFKDSLGNPTHILRIGESYKEKQRTIQAKKEVEQRRAGGYSRKYASKAKNLADDMVRNTARDLLYYAVTQDAMLIFENLSRGFGRQGKRTFMAERQYTRMEDWLTAKLAYEGLPSKTYLSKTLAQYTSKTCSNCGFTITSADYDRVLEKLKKTATGWMTTINGKELKVEGQITYYNRYKRQNVVKDLSVELDRLSEESVNNDISSWTKGRSGEALSLLKKRFSHRPVQEKFVCLNCGFETHADEQAALNIARSWLFLRSQEYKKYQTNKTTGNTDKRAFVETWQSFYRKKLKEVWKPAV

SEQ ID NO: 41008 - protein, 979 aa, synthetic construct
  REGION 1..979: note = engineered CasX variant
QEGKRINKIRRRLVKDSNTKKAGKTGPMKTLLVRVMTPDLRERLENLRKKPENIPQPISNTSRANLNKLLTDYTEMKKAILHVYWEEFQKDPVGLMSRVAQPASKKIDQNKLKPEMDEKGNLTTAGFACSQCGQPLFVYKLEQVSEKGKAYTNYFGRCNVAEHEKLIKLAQLKPEKDSDEAVTYSLGKFGQRALDFYSIHVTKESTHPVKPLAQIAGNRYASGPVGKALSDACMGTIASFLSKYQDIIIEHQKVVKGNQKRLESLRELAGKENLEYPSVTLPPQPHTKEGVDAYNEVIARVRMWVNLNLWQKLKLSRDDAKPLLRLKGFPSFPLVERQANEVDWWDMVCNVKKLINEKKEDGKVFWQNLAGYKRQEALRPYLSSEEDRKKGKKFARYQLGDLLLHLEKKHGERDWGKVYDEAWERIDKKVEGLSKHIKLEEERRSEDAQSKAALTDWLRAKASFVIEGLKEADKDEFCRCELKLQKWYGDLRGKPFAIEAENSILDISGFSKQYNCAFIWQKDGVKKLNLYLIINYFKGGKLRFKKIKPEAFEANRFYTVINKKSGEIVPMEVNFNFDDPNLIILPLAFGKRQGREFIWNDLLSLETGSLKLANGRVIEKTLYNRRTRQDEPALFVALTFERREVLDSSNIKPMNLIGVDRGENIPAVIALTDPEGCPLSRFKDSLGNPTHILRIGESYKEKQRTIQAKKEVEQRRAGGYSRKYASKAKNLADDMVRNTARDLLYYAVTQDAMLIFENLSRGFGRQGKRTFMAERQYTRMEDWLTAKLAYEGLPSKTYLSKTLAQYTSKTCSNCGFTITSADYDRVLEKLKKTATGWMTTINGKELKVEGQITYYNRYKRQNVVKDLSVELDRLSEESVNNDISSWTKGRSGEALSLLKKRFSHRPVQEKFVCLNCGFETHADEQAALNIARSWLFLRSQEYKKYQTNKTTGNTDKRAFVETWQSFYRKKLKEVWKPAV

SEQ ID NO: 41009 - protein, 978 aa, synthetic construct
  REGION 1..978: note = engineered CasX variant
QEGKRINKIRRRLVKDSNTKKAGKTGPMKTLLVRVMTPDLRERLENLRKKPENIPQPISNTSRANLNKLLTDYTEMKKAILHVYWEEFQKDPVGLMSRVAQPASKKIDQNKLKPEMDEKGNLTTAGFACSQCGQPLFVYKLEQVSEKGKAYTNYFGRCNVAEHEKLILLAQLKPEKDSDEAVTYSLGKFGQRALDFYSIHVTKESTHPVKPLAQIAGNRYASPVGKALSDACMGTIASFLSKYQDIIIEHQKVVKGNQKRLESLRELAGKENLEYPSVTLPPQPHTKEGVDAYNEVIARVRMWVNLNLWQKLKLSRDDAKPLLRLKGFPSFPLVERQANEVDWWDMVCNVKKLINEKKEDGKVFWQNLAGYKRQEALRPYLSSEEDRKKGKKFARYQLGDLLLHLEKKHGERDWGKVYDEAWERIDKKVEGLSKHIKLEEERRSEDAQSKAALTDWLRAKASFVIEGLKEADKDEFCRCELKLQKWYGDLRGKPFAIEAENSILDISGFSKQYNCAFIWQKDGVKKLNLYLIINYFKGGKLRFKKIKPEAFEANRFYTVINKKSGEIVPMEVNFNFDDPNLIILPLAFGKRQGREFIWNDLLSLETGSLKLANGRVIEKTLYNRRTRQDEPALFVALTFERREVLDSSNIKPMNLIGVDRGENIPAVIALTDPEGCPLSRFKDSLGNPTHILRIGESYKEKQRTIQAKKEVEQRRAGGYSRKYASKAKNLADDMVRNTARDLLYYAVTQDAMLIFENLSRGFGRQGKRTFMAERQYTRMEDWLTAKLAYEGLPSKTYLSKTLAQYTSKTCSNCGFTITSADYDRVLEKLKKTATGWMTTINGKELKVEGQITYYNRYKRQNVVKDLSVELDRLSEESVNNDISSWTKGRSGEALSLLKKRFSHRPVQEKFVCLNCGFETHADEQAALNIARSWLFLRSQEYKKYQTNKTTGNTDKRAFVETWQSFYRKKLKEVWKPAV

SEQ ID NO: 41010 - protein, 979 aa, synthetic construct
  REGION 1..979: note = engineered CasX variant
QEGKRINKIRRRLVKDSNTKKAGKTGPMKTLLVRVMTPDLRERLENLRKKPENIPQPISNTSRANLNKLLTDYTEMKKAILHVYWEEFQKDPVGLMSRVAQPASKKIDQNKLKPEMDEKGNLTTAGFACSQCGQPLFVYKLEQVSEKGKAYTNYFGRCNVAEHEKLILLAQLKPEKDSDEAVTYSLGKFGQRALDFYSIHVTKESTHPVKPLAQIAGNRYASYPVGKALSDACMGTIASFLSKYQDIIIEHQKVVKGNQKRLESLRELAGKENLEYPSVTLPPQPHTKEGVDAYNEVIARVRMWVNLNLWQKLKLSRDDAKPLLRLKGFPSFPLVERQANEVDWWDMVCNVKKLINEKKEDGKVFWQNLAGYKRQEALRPYLSSEEDRKKGKKFARYQLGDLLLHLEKKHGEYDWGKVYDEAWERIDKKVEGLSKHIKLEEERRSEDAQSKAALTDWLRAKASFVIEGLKEADKDEFCRCELKLQKWYGDLRGKPFAIEAENSILDISGFSKQYNCAFIWQKDGVKKLNLYLIINYFKGGKLRFKKIKPEAFEANRFYTVINKKSGEIVPMEVNFNFDDPNLIILPLAFGKRQGREFIWNDLLSLETGSLKLANGRVIEKTLYNRRTRQDEPALFVALTFERREVLDSSNIKPMNLIGVDRGENIPAVIALTDPEGCPLSRFKDSLGNPTHILRIGESYKEKQRTIQAKKEVEQRRAGGYSRKYASKAKNLADDMVRNTARDLLYYAVTQDAMLIFENLSRGFGRQGKRTFMAERQYTRMEDWLTAKLAYEGLPSKTYLSKTLAQYTSKTCSNCGFTITSADYDRVLEKLKKTATGWMTTINGKELKVEGQITYYNRYKRQNVVKDLSVELDRLSEESVNNDISSWTKGRSGEALSLLKKRFSHRPVQEKFVCLNCGFETHADEQAALNIARSWLFLRSQEYKKYQTNKTTGNTDKRAFVETWQSFYRKKLKEVWKPAV

SEQ ID NO: 41011 - protein, 979 aa, synthetic construct
  REGION 1..979: note = engineered CasX variant
QEGKRINKIRRRLVKDSNTKKAGKTGPMKTLLVRVMTPDLRERLENLRKKPENIPQPISNTSRANLNKLLTDYTEMKKAILHVYWEEFQKDPVGLMSRVAQPASKKIDQNKLKPEMDEKGNLTTAGFACSQCGQPLFVYKLEQVSEKGKAYTNYFGRCNVAEHEKLILLAQLKPEKDSDEAVTYSLGKFGQRALDFYSIHVTKESTHPVKPLAQIAGNRYASHPVGKALSDACMGTIASFLSKYQDIIIEHQKVVKGNQKRLESLRELAGKENLEYPSVTLPPQPHTKEGVDAYNEVIARVRMWVNLNLWQKLKLSRDDAKPLLRLKGFPSFPLVERQANEVDWWDMVCNVKKLINEKKEDGKVFWQNLAGYKRQEALRPYLSSEEDRKKGKKFARYQLGDLLLHLEKKHGEYDWGKVYDEAWERIDKKVEGLSKHIKLEEERRSEDAQSKAALTDWLRAKASFVIEGLKEADKDEFCRCELKLQKWYGDLRGKPFAIEAENSILDISGFSKQYNCAFIWQKDGVKKLNLYLIINYFKGGKLRFKKIKPEAFEANRFYTVINKKSGEIVPMEVNFNFDDPNLIILPLAFGKRQGREFIWNDLLSLETGSLKLANGRVIEKTLYNRRTRQDEPALFVALTFERREVLDSSNIKPMNLIGVDRGENIPAVIALTDPEGCPLSRFKDSLGNPTHILRIGESYKEKQRTIQAKKEVEQRRAGGYSRKYASKAKNLADDMVRNTARDLLYYAVTQDAMLIFENLSRGFGRQGKRTFMAERQYTRMEDWLTAKLAYEGLPSKTYLSKTLAQYTSKTCSNCGFTITSADYDRVLEKLKKTATGWMTTINGKELKVEGQITYYNRYKRQNVVKDLSVELDRLSEESVNNDISSWTKGRSGEALSLLKKRFSHRPVQEKFVCLNCGFETHADEQAALNIARSWLFLRSQEYKKYQTNKTTGNTDKRAFVETWQSFYRKKLKEVWKPAV

SEQ ID NO: 41012 - protein, 979 aa, synthetic construct
  REGION 1..979: note = engineered CasX variant
QEGKRINKIRRRLVKDSNTKKAGKTGPMKTLLVRVMTPDLRERLENLRKKPENIPQPISNTSRANLNKLLTDYTEMKKAILHVYWEEFQKDPVGLMSRVAQPASKKIDQNKLKPEMDEKGNLTTAGFACSQCGQPLFVYKLEQVSEKGKAYTNYFGRCNVAEHEKLILLAQLKPEKDSDEAVTYSLGKFGQRALDFYSIHVTKESTHPVKPLAQIAGNRYASSPVGKALSDACMGTIASFLSKYQDIIIEHQKVVKGNQKRLESLRELAGKENLEYPSVTLPPQPHTKEGVDAYNEVIARVRMWVNLNLWQKLKLSRDDAKPLLRLKGFPSFPLVERQANEVDWWDMVCNVKKLINEKKEDGKVFWQNLAGYKRQEALRPYLSSEEDRKKGKKFARYQLGDLLLHLEKKHGEYDWGKVYDEAWERIDKKVEGLSKHIKLEEERRSEDAQSKAALTDWLRAKASFVIEGLKEADKDEFCRCELKLQKWYGDLRGKPFAIEAENSILDISGFSKQYNCAFIWQKDGVKKLNLYLIINYFKGGKLRFKKIKPEAFEANRFYTVINKKSGEIVPMEVNFNFDDPNLIILPLAFGKRQGREFIWNDLLSLETGSLKLANGRVIEKTLYNRRTRQDEPALFVALTFERREVLDSSNIKPMNLIGVDRGENIPAVIALTDPEGCPLSRFKDSLGNPTHILRIGESYKEKQRTIQAKKEVEQRRAGGYSRKYASKAKNLADDMVRNTARDLLYYAVTQDAMLIFENLSRGFGRQGKRTFMAERQYTRMEDWLTAKLAYEGLPSKTYLSKTLAQYTSKTCSNCGFTITSADYDRVLEKLKKTATGWMTTINGKELKVEGQITYYNRYKRQNVVKDLSVELDRLSEESVNNDISSWTKGRSGEALSLLKKRFSHRPVQEKFVCLNCGFETHADEQAALNIARSWLFLRSQEYKKYQTNKTTGNTDKRAFVETWQSFYRKKLKEVWKPAV

SEQ ID NO: 41013 - protein, 979 aa, synthetic construct
  REGION 1..979: note = engineered CasX variant
QEGKRINKIRRRLVKDSNTKKAGKTGPMKTLLVRVMTPDLRERLENLRKKPENIPQPISNTSRANLNKLLTDYTEMKKAILHVYWEEFQKDPVGLMSRVAQPASKKIDQNKLKPEMDEKGNLTTAGFACSQCGQPLFVYKLEQVSEKGKAYTNYFGRCNVAEHEKLILLAQLKPEKDSDEAVTYSLGKFGQRALDFYSIHVTKESTHPVKPLAQIAGNRYASTPVGKALSDACMGTIASFLSKYQDIIIEHQKVVKGNQKRLESLRELAGKENLEYPSVTLPPQPHTKEGVDAYNEVIARVRMWVNLNLWQKLKLSRDDAKPLLRLKGFPSFPLVERQANEVDWWDMVCNVKKLINEKKEDGKVFWQNLAGYKRQEALRPYLSSEEDRKKGKKFARYQLGDLLLHLEKKHGEYDWGKVYDEAWERIDKKVEGLSKHIKLEEERRSEDAQSKAALTDWLRAKASFVIEGLKEADKDEFCRCELKLQKWYGDLRGKPFAIEAENSILDISGFSKQYNCAFIWQKDGVKKLNLYLIINYFKGGKLRFKKIKPEAFEANRFYTVINKKSGEIVPMEVNFNFDDPNLIILPLAFGKRQGREFIWNDLLSLETGSLKLANGRVIEKTLYNRRTRQDEPALFVALTFERREVLDSSNIKPMNLIGVDRGENIPAVIALTDPEGCPLSRFKDSLGNPTHILRIGESYKEKQRTIQAKKEVEQRRAGGYSRKYASKAKNLADDMVRNTARDLLYYAVTQDAMLIFENLSRGFGRQGKRTFMAERQYTRMEDWLTAKLAYEGLPSKTYLSKTLAQYTSKTCSNCGFTITSADYDRVLEKLKKTATGWMTTINGKELKVEGQITYYNRYKRQNVVKDLSVELDRLSEESVNNDISSWTKGRSGEALSLLKKRFSHRPVQEKFVCLNCGFETHADEQAALNIARSWLFLRSQEYKKYQTNKTTGNTDKRAFVETWQSFYRKKLKEVWKPAV

SEQ ID NO: 41014 - protein, 979 aa, synthetic construct
  REGION 1..979: note = engineered CasX variant
QEGKRINKIRRRLVKDSNTKKAGKTGPMKTLLVRVMTPDLRERLENLRKKPENIPQPISNTSRANLNKLLTDYTEMKKAILHVYWEEFQKDPVGLMSRVAQPASKKIDQNKLKPEMDEKGNLTTAGFACSQCGQPLFVYKLEQVSEKGKAYTNYFGRCNVAEHEKLILLAQLKPEKDSDEAVTYSLGKFGQRALDFYSIHVTKESTHPVKPLAQIAGNRYASAPVGKALSDACMGTIASFLSKYQDIIIEHQKVVKGNQKRLESLRELAGKENLEYPSVTLPPQPHTKEGVDAYNEVIARVRMWVNLNLWQKLKLSRDDAKPLLRLKGFPSFPLVERQANEVDWWDMVCNVKKLINEKKEDGKVFWQNLAGYKRQEALRPYLSSEEDRKKGKKFARYQLGDLLLHLEKKHGEYDWGKVYDEAWERIDKKVEGLSKHIKLEEERRSEDAQSKAALTDWLRAKASFVIEGLKEADKDEFCRCELKLQKWYGDLRGKPFAIEAENSILDISGFSKQYNCAFIWQKDGVKKLNLYLIINYFKGGKLRFKKIKPEAFEANRFYTVINKKSGEIVPMEVNFNFDDPNLIILPLAFGKRQGREFIWNDLLSLETGSLKLANGRVIEKTLYNRRTRQDEPALFVALTFERREVLDSSNIKPMNLIGVDRGENIPAVIALTDPEGCPLSRFKDSLGNPTHILRIGESYKEKQRTIQAKKEVEQRRAGGYSRKYASKAKNLADDMVRNTARDLLYYAVTQDAMLIFENLSRGFGRQGKRTFMAERQYTRMEDWLTAKLAYEGLPSKTYLSKTLAQYTSKTCSNCGFTITSADYDRVLEKLKKTATGWMTTINGKELKVEGQITYYNRYKRQNVVKDLSVELDRLSEESVNNDISSWTKGRSGEALSLLKKRFSHRPVQEKFVCLNCGFETHADEQAALNIARSWLFLRSQEYKKYQTNKTTGNTDKRAFVETWQSFYRKKLKEVWKPAV

SEQ ID NO: 41015 - protein, 979 aa, synthetic construct
  REGION 1..979: note = engineered CasX variant
QEGKRINKIRRRLVKDSNTKKAGKTGPMKTLLVRVMTPDLRERLENLRKKPENIPQPISNTSRANLNKLLTDYTEMKKAILHVYWEEFQKDPVGLMSRVAQPASKKIDQNKLKPEMDEKGNLTTAGFACSQCGQPLFVYKLEQVSEKGKAYTNYFGRCNVAEHEKLILLAQLKPEKDSDEAVTYSLGKFGQRALDFYSIHVTKESTHPVKPLAQIAGNRYASVPVGKALSDACMGTIASFLSKYQDIIIEHQKVVKGNQKRLESLRELAGKENLEYPSVTLPPQPHTKEGVDAYNEVIARVRMWVNLNLWQKLKLSRDDAKPLLRLKGFPSFPLVERQANEVDWWDMVCNVKKLINEKKEDGKVFWQNLAGYKRQEALRPYLSSEEDRKKGKKFARYQLGDLLLHLEKKHGEYDWGKVYDEAWERIDKKVEGLSKHIKLEEERRSEDAQSKAALTDWLRAKASFVIEGLKEADKDEFCRCELKLQKWYGDLRGKPFAIEAENSILDISGFSKQYNCAFIWQKDGVKKLNLYLIINYFKGGKLRFKKIKPEAFEANRFYTVINKKSGEIVPMEVNFNFDDPNLIILPLAFGKRQGREFIWNDLLSLETGSLKLANGRVIEKTLYNRRTRQDEPALFVALTFERREVLDSSNIKPMNLIGVDRGENIPAVIALTDPEGCPLSRFKDSLGNPTHILRIGESYKEKQRTIQAKKEVEQRRAGGYSRKYASKAKNLADDMVRNTARDLLYYAVTQDAMLIFENLSRGFGRQGKRTFMAERQYTRMEDWLTAKLAYEGLPSKTYLSKTLAQYTSKTCSNCGFTITSADYDRVLEKLKKTATGWMTTINGKELKVEGQITYYNRYKRQNVVKDLSVELDRLSEESVNNDISSWTKGRSGEALSLLKKRFSHRPVQEKFVCLNCGFETHADEQAALNIARSWLFLRSQEYKKYQTNKTTGNTDKRAFVETWQSFYRKKLKEVWKPAV

SEQ ID NO: 41016 - protein, 979 aa, synthetic construct
  REGION 1..979: note = engineered CasX variant
QEGKRINKIRRRLVKDSNTKKAGKTGPMKTLLVRVMTPDLRERLENLRKKPENIPQPISNTSRANLNKLLTDYTEMKKAILHVYWEEFQKDPVGLMSRVAQPASKKIDQNKLKPEMDEKGNLTTAGFACSQCGQPLFVYKLEQVSEKGKAYTNYFGRCNVAEHEKLIKLAQLKPEKDSDEAVTYSLGKFGQRALDFYSIHVTKESTHPVKPLAQIAGNRYASGPVGKALSDACMGTIASFLSKYQDIIIEHQKVVKGNQKRLESLRELAGKENLEYPSVTLPPQPHTKEGVDAYNEVIARVRMWVNLNLWQKLKLSRDDAKPLLRLKGFPSFPLVERQANEVDWWDMVCNVKKLINEKKEDGKVFWQNLAGYKRQEALRPYLSSEEDRKKGKKFARYQLGDLLLHLEKKHGEYDWGKVYDEAWERIDKKVEGLSKHIKLEEERRSEDAQSKAALTDWLRAKASFVIEGLKEADKDEFCRCELKLQKWYGDLRGKPFAIEAENSILDISGFSKQYNCAFIWQKDGVKKLNLYLIINYFKGGKLRFKKIKPEAFEANRFYTVINKKSGEIVPMEVNFNFDDPNLIILPLAFGKRQGREFIWNDLLSLETGSLKLANGRVIEKTLYNRRTRQDEPALFVALTFERREVLDSSNIKPMNLIGVDRGENIPAVIALTDPEGCPLSRFKDSLGNPTHILRIGESYKEKQRTIQAKKEVEQRRAGGYSRKYASKAKNLADDMVRNTARDLLYYAVTQDAMLIFENLSRGFGRQGKRTFMAERQYTRMEDWLTAKLAYEGLPSKTYLSKTLAQYTSKTCSNCGFTITSADYDRVLEKLKKTATGWMTTINGKELKVEGQITYYNRYKRQNVVKDLSVELDRLSEESVNNDISSWTKGRSGEALSLLKKRFSHRPVQEKFVCLNCGFETHADEQAALNIARSWLFLRSQEYKKYQTNKTTGNTDKRAFVETWQSFYRKKLKEVWKPAV

SEQ ID NO: 41017 - protein, 978 aa, synthetic construct
  REGION 1..978: note = engineered CasX variant
QEGKRINKIRRRLVKDSNTKKAGKTGPMKTLLVRVMTPDLRERLENLRKKPENIPQPISNTSRANLNKLLTDYTEMKKAILHVYWEEFQKDPVGLMSRVAQPASKKIDQNKLKPEMDEKGNLTTAGFACSQCGQPLFVYKLEQVSEKGKAYTNYFGRCNVAEHEKLILLAQLKPEKDSDEAVTYSLGKFGQRALDFYSIHVTKESTHPVKPLAQIAGNRYASPVGKALSDACMGTIASFLSKYQDIIIEHQKVVKGNQKRLESLRELAGKENLEYPSVTLPPQPHTKEGVDAYNEVIARVRMWVNLNLWQKLKLSRDDAKPLLRLKGFPSFPLVERQANEVDWWDMVCNVKKLINEKKEDGKVFWQNLAGYKRQEALRPYLSSEEDRKKGKKFARYQLGDLLLHLEKKHGEYDWGKVYDEAWERIDKKVEGLSKHIKLEEERRSEDAQSKAALTDWLRAKASFVIEGLKEADKDEFCRCELKLQKWYGDLRGKPFAIEAENSILDISGFSKQYNCAFIWQKDGVKKLNLYLIINYFKGGKLRFKKIKPEAFEANRFYTVINKKSGEIVPMEVNFNFDDPNLIILPLAFGKRQGREFIWNDLLSLETGSLKLANGRVIEKTLYNRRTRQDEPALFVALTFERREVLDSSNIKPMNLIGVDRGENIPAVIALTDPEGCPLSRFKDSLGNPTHILRIGESYKEKQRTIQAKKEVEQRRAGGYSRKYASKAKNLADDMVRNTARDLLYYAVTQDAMLIFENLSRGFGRQGKRTFMAERQYTRMEDWLTAKLAYEGLPSKTYLSKTLAQYTSKTCSNCGFTITSADYDRVLEKLKKTATGWMTTINGKELKVEGQITYYNRYKRQNVVKDLSVELDRLSEESVNNDISSWTKGRSGEALSLLKKRFSHRPVQEKFVCLNCGFETHADEQAALNIARSWLFLRSQEYKKYQTNKTTGNTDKRAFVETWQSFYRKKLKEVWKPAV

SEQ ID NO: 41018 - protein, 978 aa, synthetic construct
  REGION 1..978: note = engineered CasX variant
QEGKRINKIRRRLVKDSNTKKAGKTGPMKTLLVRVMTPDLRERLENLRKKPENIPQPISNTSRANLNKLLTDYTEMKKAILHVYWEEFQKDPVGLMSRVAQPASKKIDQNKLKPEMDEKGNLTTAGFACSQCGQPLFVYKLEQVSEKGKAYTNYFGRCNVAEHEKLILLAQLKPEKDSDEAVTYSLGKFGQRALDFYSIHVTKESTHPVKPLAQIAGNRYASYPVGKALSDACMGTIASFLSKYQDIIIEHQKVVKGNQKRLESLRELAGKENLEYPSVTLPPQPHTKEGVDAYNEVIARVRMWVNLNLWQKLKLSRDDAKPLLRLKGFPSFPLVERQANEVDWWDMVCNVKKLINEKKEDGKVFWQNLAGYKRQEALRPYLSSEEDRKKGKKFARYQLGDLLLHLEKKHGEDWGDVYDEAWERIDKKVEGLSKHIKLEEERRSEDAQSKAALTDWLRAKASFVIEGLKEADKDEFCRCELKLQKWYGDLRGKPFAIEAENSILDISGFSKQYNCAFIWQKDGVKKLNLYLIINYFKGGKLRFKKIKPEAFEANRFYTVINKKSGEIVPMEVNFNFDDPNLIILPLAFGKRQGREFIWNDLLSLETGSLKLANGRVIEKTLYNRRTRQDEPALFVALTFERREVLDSSNIKPMNLIGVDRGENIPAVIALTDPEGCPLSRFKDSLGNPTHILRIGESYKEKQRTIQAKKEVEQRRAGGYSRKYASKAKNLADDMVRNTARDLLYYAVTQDAMLIFENLSRGFGRQGKRTFMAERQYTRMEDWLTAKLAYEGLPSKTYLSKTLAQYTSKTCSNCGFTITSADYDRVLEKLKKTATGWMTTINGKELKVEGQITYYNRYKRQNVVKDLSVELDRLSEESVNNDISSWTKGRSGEALSLLKKRFSHRPVQEKFVCLNCGFETHADEQAALNIARSWLFLRSQEYKKYQTNKTTGNTDKRAFVETWQSFYRKKLKEVWKPAV

SEQ ID NO: 41019 - protein, 978 aa, synthetic construct
  REGION 1..978: note = engineered CasX variant
QEGKRINKIRRRLVKDSNTKKAGKTGPMKTLLVRVMTPDLRERLENLRKKPENIPQPISNTSRANLNKLLTDYTEMKKAILHVYWEEFQKDPVGLMSRVAQPASKKIDQNKLKPEMDEKGNLTTAGFACSQCGQPLFVYKLEQVSEKGKAYTNYFGRCNVAEHEKLILLAQLKPEKDSDEAVTYSLGKFGQRALDFYSIHVTKESTHPVKPLAQIAGNRYASHPVGKALSDACMGTIASFLSKYQDIIIEHQKVVKGNQKRLESLRELAGKENLEYPSVTLPPQPHTKEGVDAYNEVIARVRMWVNLNLWQKLKLSRDDAKPLLRLKGFPSFPLVERQANEVDWWDMVCNVKKLINEKKEDGKVFWQNLAGYKRQEALRPYLSSEEDRKKGKKFARYQLGDLLLHLEKKHGEDWGDVYDEAWERIDKKVEGLSKHIKLEEERRSEDAQSKAALTDWLRAKASFVIEGLKEADKDEFCRCELKLQKWYGDLRGKPFAIEAENSILDISGFSKQYNCAFIWQKDGVKKLNLYLIINYFKGGKLRFKKIKPEAFEANRFYTVINKKSGEIVPMEVNFNFDDPNLIILPLAFGKRQGREFIWNDLLSLETGSLKLANGRVIEKTLYNRRTRQDEPALFVALTFERREVLDSSNIKPMNLIGVDRGENIPAVIALTDPEGCPLSRFKDSLGNPTHILRIGESYKEKQRTIQAKKEVEQRRAGGYSRKYASKAKNLADDMVRNTARDLLYYAVTQDAMLIFENLSRGFGRQGKRTFMAERQYTRMEDWLTAKLAYEGLPSKTYLSKTLAQYTSKTCSNCGFTITSADYDRVLEKLKKTATGWMTTINGKELKVEGQITYYNRYKRQNVVKDLSVELDRLSEESVNNDISSWTKGRSGEALSLLKKRFSHRPVQEKFVCLNCGFETHADEQAALNIARSWLFLRSQEYKKYQTNKTTGNTDKRAFVETWQSFYRKKLKEVWKPAV

SEQ ID NO: 41020 - protein, 978 aa, synthetic construct
  REGION 1..978: note = engineered CasX variant
QEGKRINKIRRRLVKDSNTKKAGKTGPMKTLLVRVMTPDLRERLENLRKKPENIPQPISNTSRANLNKLLTDYTEMKKAILHVYWEEFQKDPVGLMSRVAQPASKKIDQNKLKPEMDEKGNLTTAGFACSQCGQPLFVYKLEQVSEKGKAYTNYFGRCNVAEHEKLILLAQLKPEKDSDEAVTYSLGKFGQRALDFYSIHVTKESTHPVKPLAQIAGNRYASSPVGKALSDACMGTIASFLSKYQDIIIEHQKVVKGNQKRLESLRELAGKENLEYPSVTLPPQPHTKEGVDAYNEVIARVRMWVNLNLWQKLKLSRDDAKPLLRLKGFPSFPLVERQANEVDWWDMVCNVKKLINEKKEDGKVFWQNLAGYKRQEALRPYLSSEEDRKKGKKFARYQLGDLLLHLEKKHGEDWGDVYDEAWERIDKKVEGLSKHIKLEEERRSEDAQSKAALTDWLRAKASFVIEGLKEADKDEFCRCELKLQKWYGDLRGKPFAIEAENSILDISGFSKQYNCAFIWQKDGVKKLNLYLIINYFKGGKLRFKKIKPEAFEANRFYTVINKKSGEIVPMEVNFNFDDPNLIILPLAFGKRQGREFIWNDLLSLETGSLKLANGRVIEKTLYNRRTRQDEPALFVALTFERREVLDSSNIKPMNLIGVDRGENIPAVIALTDPEGCPLSRFKDSLGNPTHILRIGESYKEKQRTIQAKKEVEQRRAGGYSRKYASKAKNLADDMVRNTARDLLYYAVTQDAMLIFENLSRGFGRQGKRTFMAERQYTRMEDWLTAKLAYEGLPSKTYLSKTLAQYTSKTCSNCGFTITSADYDRVLEKLKKTATGWMTTINGKELKVEGQITYYNRYKRQNVVKDLSVELDRLSEESVNNDISSWTKGRSGEALSLLKKRFSHRPVQEKFVCLNCGFETHADEQAALNIARSWLFLRSQEYKKYQTNKTTGNTDKRAFVETWQSFYRKKLKEVWKPAV

SEQ ID NO: 41021 - protein, 978 aa, synthetic construct
  REGION 1..978: note = engineered CasX variant
QEGKRINKIRRRLVKDSNTKKAGKTGPMKTLLVRVMTPDLRERLENLRKKPENIPQPISNTSRANLNKLLTDYTEMKKAILHVYWEEFQKDPVGLMSRVAQPASKKIDQNKLKPEMDEKGNLTTAGFACSQCGQPLFVYKLEQVSEKGKAYTNYFGRCNVAEHEKLILLAQLKPEKDSDEAVTYSLGKFGQRALDFYSIHVTKESTHPVKPLAQIAGNRYASTPVGKALSDACMGTIASFLSKYQDIIIEHQKVVKGNQKRLESLRELAGKENLEYPSVTLPPQPHTKEGVDAYNEVIARVRMWVNLNLWQKLKLSRDDAKPLLRLKGFPSFPLVERQANEVDWWDMVCNVKKLINEKKEDGKVFWQNLAGYKRQEALRPYLSSEEDRKKGKKFARYQLGDLLLHLEKKHGEDWGDVYDEAWERIDKKVEGLSKHIKLEEERRSEDAQSKAALTDWLRAKASFVIEGLKEADKDEFCRCELKLQKWYGDLRGKPFAIEAENSILDISGFSKQYNCAFIWQKDGVKKLNLYLIINYFKGGKLRFKKIKPEAFEANRFYTVINKKSGEIVPMEVNFNFDDPNLIILPLAFGKRQGREFIWNDLLSLETGSLKLANGRVIEKTLYNRRTRQDEPALFVALTFERREVLDSSNIKPMNLIGVDRGENIPAVIALTDPEGCPLSRFKDSLGNPTHILRIGESYKEKQRTIQAKKEVEQRRAGGYSRKYASKAKNLADDMVRNTARDLLYYAVTQDAMLIFENLSRGFGRQGKRTFMAERQYTRMEDWLTAKLAYEGLPSKTYLSKTLAQYTSKTCSNCGFTITSADYDRVLEKLKKTATGWMTTINGKELKVEGQITYYNRYKRQNVVKDLSVELDRLSEESVNNDISSWTKGRSGEALSLLKKRFSHRPVQEKFVCLNCGFETHADEQAALNIARSWLFLRSQEYKKYQTNKTTGNTDKRAFVETWQSFYRKKLKEVWKPAV

SEQ ID NO: 41022 - protein, 978 aa, synthetic construct
  REGION 1..978: note = engineered CasX variant
QEGKRINKIRRRLVKDSNTKKAGKTGPMKTLLVRVMTPDLRERLENLRKKPENIPQPISNTSRANLNKLLTDYTEMKKAILHVYWEEFQKDPVGLMSRVAQPASKKIDQNKLKPEMDEKGNLTTAGFACSQCGQPLFVYKLEQVSEKGKAYTNYFGRCNVAEHEKLILLAQLKPEKDSDEAVTYSLGKFGQRALDFYSIHVTKESTHPVKPLAQIAGNRYASAPVGKALSDACMGTIASFLSKYQDIIIEHQKVVKGNQKRLESLRELAGKENLEYPSVTLPPQPHTKEGVDAYNEVIARVRMWVNLNLWQKLKLSRDDAKPLLRLKGFPSFPLVERQANEVDWWDMVCNVKKLINEKKEDGKVFWQNLAGYKRQEALRPYLSSEEDRKKGKKFARYQLGDLLLHLEKKHGEDWGDVYDEAWERIDKKVEGLSKHIKLEEERRSEDAQSKAALTDWLRAKASFVIEGLKEADKDEFCRCELKLQKWYGDLRGKPFAIEAENSILDISGFSKQYNCAFIWQKDGVKKLNLYLIINYFKGGKLRFKKIKPEAFEANRFYTVINKKSGEIVPMEVNFNFDDPNLIILPLAFGKRQGREFIWNDLLSLETGSLKLANGRVIEKTLYNRRTRQDEPALFVALTFERREVLDSSNIKPMNLIGVDRGENIPAVIALTDPEGCPLSRFKDSLGNPTHILRIGESYKEKQRTIQAKKEVEQRRAGGYSRKYASKAKNLADDMVRNTARDLLYYAVTQDAMLIFENLSRGFGRQGKRTFMAERQYTRMEDWLTAKLAYEGLPSKTYLSKTLAQYTSKTCSNCGFTITSADYDRVLEKLKKTATGWMTTINGKELKVEGQITYYNRYKRQNVVKDLSVELDRLSEESVNNDISSWTKGRSGEALSLLKKRFSHRPVQEKFVCLNCGFETHADEQAALNIARSWLFLRSQEYKKYQTNKTTGNTDKRAFVETWQSFYRKKLKEVWKPAV

SEQ ID NO: 41023 - protein, 978 aa, synthetic construct
  REGION 1..978: note = engineered CasX variant
QEGKRINKIRRRLVKDSNTKKAGKTGPMKTLLVRVMTPDLRERLENLRKKPENIPQPISNTSRANLNKLLTDYTEMKKAILHVYWEEFQKDPVGLMSRVAQPASKKIDQNKLKPEMDEKGNLTTAGFACSQCGQPLFVYKLEQVSEKGKAYTNYFGRCNVAEHEKLILLAQLKPEKDSDEAVTYSLGKFGQRALDFYSIHVTKESTHPVKPLAQIAGNRYASVPVGKALSDACMGTIASFLSKYQDIIIEHQKVVKGNQKRLESLRELAGKENLEYPSVTLPPQPHTKEGVDAYNEVIARVRMWVNLNLWQKLKLSRDDAKPLLRLKGFPSFPLVERQANEVDWWDMVCNVKKLINEKKEDGKVFWQNLAGYKRQEALRPYLSSEEDRKKGKKFARYQLGDLLLHLEKKHGEDWGDVYDEAWERIDKKVEGLSKHIKLEEERRSEDAQSKAALTDWLRAKASFVIEGLKEADKDEFCRCELKLQKWYGDLRGKPFAIEAENSILDISGFSKQYNCAFIWQKDGVKKLNLYLIINYFKGGKLRFKKIKPEAFEANRFYTVINKKSGEIVPMEVNFNFDDPNLIILPLAFGKRQGREFIWNDLLSLETGSLKLANGRVIEKTLYNRRTRQDEPALFVALTFERREVLDSSNIKPMNLIGVDRGENIPAVIALTDPEGCPLSRFKDSLGNPTHILRIGESYKEKQRTIQAKKEVEQRRAGGYSRKYASKAKNLADDMVRNTARDLLYYAVTQDAMLIFENLSRGFGRQGKRTFMAERQYTRMEDWLTAKLAYEGLPSKTYLSKTLAQYTSKTCSNCGFTITSADYDRVLEKLKKTATGWMTTINGKELKVEGQITYYNRYKRQNVVKDLSVELDRLSEESVNNDISSWTKGRSGEALSLLKKRFSHRPVQEKFVCLNCGFETHADEQAALNIARSWLFLRSQEYKKYQTNKTTGNTDKRAFVETWQSFYRKKLKEVWKPAV

SEQ ID NO: 41024 - protein, 978 aa, synthetic construct
  REGION 1..978: note = engineered CasX variant
QEGKRINKIRRRLVKDSNTKKAGKTGPMKTLLVRVMTPDLRERLENLRKKPENIPQPISNTSRANLNKLLTDYTEMKKAILHVYWEEFQKDPVGLMSRVAQPASKKIDQNKLKPEMDEKGNLTTAGFACSQCGQPLFVYKLEQVSEKGKAYTNYFGRCNVAEHEKLIKLAQLKPEKDSDEAVTYSLGKFGQRALDFYSIHVTKESTHPVKPLAQIAGNRYASGPVGKALSDACMGTIASFLSKYQDIIIEHQKVVKGNQKRLESLRELAGKENLEYPSVTLPPQPHTKEGVDAYNEVIARVRMWVNLNLWQKLKLSRDDAKPLLRLKGFPSFPLVERQANEVDWWDMVCNVKKLINEKKEDGKVFWQNLAGYKRQEALRPYLSSEEDRKKGKKFARYQLGDLLLHLEKKHGEDWGDVYDEAWERIDKKVEGLSKHIKLEEERRSEDAQSKAALTDWLRAKASFVIEGLKEADKDEFCRCELKLQKWYGDLRGKPFAIEAENSILDISGFSKQYNCAFIWQKDGVKKLNLYLIINYFKGGKLRFKKIKPEAFEANRFYTVINKKSGEIVPMEVNFNFDDPNLIILPLAFGKRQGREFIWNDLLSLETGSLKLANGRVIEKTLYNRRTRQDEPALFVALTFERREVLDSSNIKPMNLIGVDRGENIPAVIALTDPEGCPLSRFKDSLGNPTHILRIGESYKEKQRTIQAKKEVEQRRAGGYSRKYASKAKNLADDMVRNTARDLLYYAVTQDAMLIFENLSRGFGRQGKRTFMAERQYTRMEDWLTAKLAYEGLPSKTYLSKTLAQYTSKTCSNCGFTITSADYDRVLEKLKKTATGWMTTINGKELKVEGQITYYNRYKRQNVVKDLSVELDRLSEESVNNDISSWTKGRSGEALSLLKKRFSHRPVQEKFVCLNCGFETHADEQAALNIARSWLFLRSQEYKKYQTNKTTGNTDKRAFVETWQSFYRKKLKEVWKPAV

SEQ ID NO: 41025 - protein, 977 aa, synthetic construct
  REGION 1..977: note = engineered CasX variant
QEGKRINKIRRRLVKDSNTKKAGKTGPMKTLLVRVMTPDLRERLENLRKKPENIPQPISNTSRANLNKLLTDYTEMKKAILHVYWEEFQKDPVGLMSRVAQPASKKIDQNKLKPEMDEKGNLTTAGFACSQCGQPLFVYKLEQVSEKGKAYTNYFGRCNVAEHEKLILLAQLKPEKDSDEAVTYSLGKFGQRALDFYSIHVTKESTHPVKPLAQIAGNRYASPVGKALSDACMGTIASFLSKYQDIIIEHQKVVKGNQKRLESLRELAGKENLEYPSVTLPPQPHTKEGVDAYNEVIARVRMWVNLNLWQKLKLSRDDAKPLLRLKGFPSFPLVERQANEVDWWDMVCNVKKLINEKKEDGKVFWQNLAGYKRQEALRPYLSSEEDRKKGKKFARYQLGDLLLHLEKKHGEDWGDVYDEAWERIDKKVEGLSKHIKLEEERRSEDAQSKAALTDWLRAKASFVIEGLKEADKDEFCRCELKLQKWYGDLRGKPFAIEAENSILDISGFSKQYNCAFIWQKDGVKKLNLYLIINYFKGGKLRFKKIKPEAFEANRFYTVINKKSGEIVPMEVNFNFDDPNLIILPLAFGKRQGREFIWNDLLSLETGSLKLANGRVIEKTLYNRRTRQDEPALFVALTFERREVLDSSNIKPMNLIGVDRGENIPAVIALTDPEGCPLSRFKDSLGNPTHILRIGESYKEKQRTIQAKKEVEQRRAGGYSRKYASKAKNLADDMVRNTARDLLYYAVTQDAMLIFENLSRGFGRQGKRTFMAERQYTRMEDWLTAKLAYEGLPSKTYLSKTLAQYTSKTCSNCGFTITSADYDRVLEKLKKTATGWMTTINGKELKVEGQITYYNRYKRQNVVKDLSVELDRLSEESVNNDISSWTKGRSGEALSLLKKRFSHRPVQEKFVCLNCGFETHADEQAALNIARSWLFLRSQEYKKYQTNKTTGNTDKRAFVETWQSFYRKKLKEVWKPAV

SEQ ID NO: 41026 - protein, 978 aa, synthetic construct
  REGION 1..978: note = engineered CasX variant
QEGKRINKIRRRLVKDSNTKKAGKTGPMKTLLVRVMTPDLRERLENLRKKPENIPQPISNTSRANLNKLLTDYTEMKKAILHVYWEEFQKDPVGLMSRVAQPASKKIDQNKLKPEMDEKGNLTTAGFACSQCGQPLFVYKLEQVSEKGKAYTNYFGRCNVAEHEKLILLAQLKPEKDSDEAVTYSLGKFGQRALDFYSIHVTKESTHPVKPLAQIAGNRYASYPVGKALSDACMGTIASFLSKYQDIIIEHQKVVKGNQKRLESLRELAGKENLEYPSVTLPPQPHTKEGVDAYNEVIARVRMWVNLNLWQKLKLSRDDAKPLLRLKGFPSFPLVERQANEVDWWDMVCNVKKLINEKKEDGKVFWQNLAGYKRQEALRPYLSSEEDRKKGKKFARYQLGDLLLHLEKKHGEDWGKVYGEAWERIDKKVEGLSKHIKLEEERRSEDAQSKAALTDWLRAKASFVIEGLKEADKDEFCRCELKLQKWYGDLRGKPFAIEAENSILDISGFSKQYNCAFIWQKDGVKKLNLYLIINYFKGGKLRFKKIKPEAFEANRFYTVINKKSGEIVPMEVNFNFDDPNLIILPLAFGKRQGREFIWNDLLSLETGSLKLANGRVIEKTLYNRRTRQDEPALFVALTFERREVLDSSNIKPMNLIGVDRGENIPAVIALTDPEGCPLSRFKDSLGNPTHILRIGESYKEKQRTIQAKKEVEQRRAGGYSRKYASKAKNLADDMVRNTARDLLYYAVTQDAMLIFENLSRGFGRQGKRTFMAERQYTRMEDWLTAKLAYEGLPSKTYLSKTLAQYTSKTCSNCGFTITSADYDRVLEKLKKTATGWMTTINGKELKVEGQITYYNRYKRQNVVKDLSVELDRLSEESVNNDISSWTKGRSGEALSLLKKRFSHRPVQEKFVCLNCGFETHADEQAALNIARSWLFLRSQEYKKYQTNKTTGNTDKRAFVETWQSFYRKKLKEVWKPAV

SEQ ID NO: 41027 - protein, 978 aa, synthetic construct
  REGION 1..978: note = engineered CasX variant
QEGKRINKIRRRLVKDSNTKKAGKTGPMKTLLVRVMTPDLRERLENLRKKPENIPQPISNTSRANLNKLLTDYTEMKKAILHVYWEEFQKDPVGLMSRVAQPASKKIDQNKLKPEMDEKGNLTTAGFACSQCGQPLFVYKLEQVSEKGKAYTNYFGRCNVAEHEKLILLAQLKPEKDSDEAVTYSLGKFGQRALDFYSIHVTKESTHPVKPLAQIAGNRYASHPVGKALSDACMGTIASFLSKYQDIIIEHQKVVKGNQKRLESLRELAGKENLEYPSVTLPPQPHTKEGVDAYNEVIARVRMWVNLNLWQKLKLSRDDAKPLLRLKGFPSFPLVERQANEVDWWDMVCNVKKLINEKKEDGKVFWQNLAGYKRQEALRPYLSSEEDRKKGKKFARYQLGDLLLHLEKKHGEDWGKVYGEAWERIDKKVEGLSKHIKLEEERRSEDAQSKAALTDWLRAKASFVIEGLKEADKDEFCRCELKLQKWYGDLRGKPFAIEAENSILDISGFSKQYNCAFIWQKDGVKKLNLYLIINYFKGGKLRFKKIKPEAFEANRFYTVINKKSGEIVPMEVNFNFDDPNLIILPLAFGKRQGREFIWNDLLSLETGSLKLANGRVIEKTLYNRRTRQDEPALFVALTFERREVLDSSNIKPMNLIGVDRGENIPAVIALTDPEGCPLSRFKDSLGNPTHILRIGESYKEKQRTIQAKKEVEQRRAGGYSRKYASKAKNLADDMVRNTARDLLYYAVTQDAMLIFENLSRGFGRQGKRTFMAERQYTRMEDWLTAKLAYEGLPSKTYLSKTLAQYTSKTCSNCGFTITSADYDRVLEKLKKTATGWMTTINGKELKVEGQITYYNRYKRQNVVKDLSVELDRLSEESVNNDISSWTKGRSGEALSLLKKRFSHRPVQEKFVCLNCGFETHADEQAALNIARSWLFLRSQEYKKYQTNKTTGNTDKRAFVETWQSFYRKKLKEVWKPAV

SEQ ID NO: 41028 - protein, 978 aa, synthetic construct
  REGION 1..978: note = engineered CasX variant
QEGKRINKIRRRLVKDSNTKKAGKTGPMKTLLVRVMTPDLRERLENLRKKPENIPQPISNTSRANLNKLLTDYTEMKKAILHVYWEEFQKDPVGLMSRVAQPASKKIDQNKLKPEMDEKGNLTTAGFACSQCGQPLFVYKLEQVSEKGKAYTNYFGRCNVAEHEKLILLAQLKPEKDSDEAVTYSLGKFGQRALDFYSIHVTKESTHPVKPLAQIAGNRYASSPVGKALSDACMGTIASFLSKYQDIIIEHQKVVKGNQKRLESLRELAGKENLEYPSVTLPPQPHTKEGVDAYNEVIARVRMWVNLNLWQKLKLSRDDAKPLLRLKGFPSFPLVERQANEVDWWDMVCNVKKLINEKKEDGKVFWQNLAGYKRQEALRPYLSSEEDRKKGKKFARYQLGDLLLHLEKKHGEDWGKVYGEAWERIDKKVEGLSKHIKLEEERRSEDAQSKAALTDWLRAKASFVIEGLKEADKDEFCRCELKLQKWYGDLRGKPFAIEAENSILDISGFSKQYNCAFIWQKDGVKKLNLYLIINYFKGGKLRFKKIKPEAFEANRFYTVINKKSGEIVPMEVNFNFDDPNLIILPLAFGKRQGREFIWNDLLSLETGSLKLANGRVIEKTLYNRRTRQDEPALFVALTFERREVLDSSNIKPMNLIGVDRGENIPAVIALTDPEGCPLSRFKDSLGNPTHILRIGESYKEKQRTIQAKKEVEQRRAGGYSRKYASKAKNLADDMVRNTARDLLYYAVTQDAMLIFENLSRGFGRQGKRTFMAERQYTRMEDWLTAKLAYEGLPSKTYLSKTLAQYTSKTCSNCGFTITSADYDRVLEKLKKTATGWMTTINGKELKVEGQITYYNRYKRQNVVKDLSVELDRLSEESVNNDISSWTKGRSGEALSLLKKRFSHRPVQEKFVCLNCGFETHADEQAALNIARSWLFLRSQEYKKYQTNKTTGNTDKRAFVETWQSFYRKKLKEVWKPAV

SEQ ID NO: 41029 - protein, 978 aa, synthetic construct
  REGION 1..978: note = engineered CasX variant
QEGKRINKIRRRLVKDSNTKKAGKTGPMKTLLVRVMTPDLRERLENLRKKPENIPQPISNTSRANLNKLLTDYTEMKKAILHVYWEEFQKDPVGLMSRVAQPASKKIDQNKLKPEMDEKGNLTTAGFACSQCGQPLFVYKLEQVSEKGKAYTNYFGRCNVAEHEKLILLAQLKPEKDSDEAVTYSLGKFGQRALDFYSIHVTKESTHPVKPLAQIAGNRYASTPVGKALSDACMGTIASFLSKYQDIIIEHQKVVKGNQKRLESLRELAGKENLEYPSVTLPPQPHTKEGVDAYNEVIARVRMWVNLNLWQKLKLSRDDAKPLLRLKGFPSFPLVERQANEVDWWDMVCNVKKLINEKKEDGKVFWQNLAGYKRQEALRPYLSSEEDRKKGKKFARYQLGDLLLHLEKKHGEDWGKVYGEAWERIDKKVEGLSKHIKLEEERRSEDAQSKAALTDWLRAKASFVIEGLKEADKDEFCRCELKLQKWYGDLRGKPFAIEAENSILDISGFSKQYNCAFIWQKDGVKKLNLYLIINYFKGGKLRFKKIKPEAFEANRFYTVINKKSGEIVPMEVNFNFDDPNLIILPLAFGKRQGREFIWNDLLSLETGSLKLANGRVIEKTLYNRRTRQDEPALFVALTFERREVLDSSNIKPMNLIGVDRGENIPAVIALTDPEGCPLSRFKDSLGNPTHILRIGESYKEKQRTIQAKKEVEQRRAGGYSRKYASKAKNLADDMVRNTARDLLYYAVTQDAMLIFENLSRGFGRQGKRTFMAERQYTRMEDWLTAKLAYEGLPSKTYLSKTLAQYTSKTCSNCGFTITSADYDRVLEKLKKTATGWMTTINGKELKVEGQITYYNRYKRQNVVKDLSVELDRLSEESVNNDISSWTKGRSGEALSLLKKRFSHRPVQEKFVCLNCGFETHADEQAALNIARSWLFLRSQEYKKYQTNKTTGNTDKRAFVETWQSFYRKKLKEVWKPAV

SEQ ID NO: 41030 - protein, 978 aa, synthetic construct
  REGION 1..978: note = engineered CasX variant
QEGKRINKIRRRLVKDSNTKKAGKTGPMKTLLVRVMTPDLRERLENLRKKPENIPQPISNTSRANLNKLLTDYTEMKKAILHVYWEEFQKDPVGLMSRVAQPASKKIDQNKLKPEMDEKGNLTTAGFACSQCGQPLFVYKLEQVSEKGKAYTNYFGRCNVAEHEKLILLAQLKPEKDSDEAVTYSLGKFGQRALDFYSIHVTKESTHPVKPLAQIAGNRYASAPVGKALSDACMGTIASFLSKYQDIIIEHQKVVKGNQKRLESLRELAGKENLEYPSVTLPPQPHTKEGVDAYNEVIARVRMWVNLNLWQKLKLSRDDAKPLLRLKGFPSFPLVERQANEVDWWDMVCNVKKLINEKKEDGKVFWQNLAGYKRQEALRPYLSSEEDRKKGKKFARYQLGDLLLHLEKKHGEDWGKVYGEAWERIDKKVEGLSKHIKLEEERRSEDAQSKAALTDWLRAKASFVIEGLKEADKDEFCRCELKLQKWYGDLRGKPFAIEAENSILDISGFSKQYNCAFIWQKDGVKKLNLYLIINYFKGGKLRFKKIKPEAFEANRFYTVINKKSGEIVPMEVNFNFDDPNLIILPLAFGKRQGREFIWNDLLSLETGSLKLANGRVIEKTLYNRRTRQDEPALFVALTFERREVLDSSNIKPMNLIGVDRGENIPAVIALTDPEGCPLSRFKDSLGNPTHILRIGESYKEKQRTIQAKKEVEQRRAGGYSRKYASKAKNLADDMVRNTARDLLYYAVTQDAMLIFENLSRGFGRQGKRTFMAERQYTRMEDWLTAKLAYEGLPSKTYLSKTLAQYTSKTCSNCGFTITSADYDRVLEKLKKTATGWMTTINGKELKVEGQITYYNRYKRQNVVKDLSVELDRLSEESVNNDISSWTKGRSGEALSLLKKRFSHRPVQEKFVCLNCGFETHADEQAALNIARSWLFLRSQEYKKYQTNKTTGNTDKRAFVETWQSFYRKKLKEVWKPAV

SEQ ID NO: 41031 - protein, 978 aa, synthetic construct
  REGION 1..978: note = engineered CasX variant
QEGKRINKIRRRLVKDSNTKKAGKTGPMKTLLVRVMTPDLRERLENLRKKPENIPQPISNTSRANLNKLLTDYTEMKKAILHVYWEEFQKDPVGLMSRVAQPASKKIDQNKLKPEMDEKGNLTTAGFACSQCGQPLFVYKLEQVSEKGKAYTNYFGRCNVAEHEKLILLAQLKPEKDSDEAVTYSLGKFGQRALDFYSIHVTKESTHPVKPLAQIAGNRYASVPVGKALSDACMGTIASFLSKYQDIIIEHQKVVKGNQKRLESLRELAGKENLEYPSVTLPPQPHTKEGVDAYNEVIARVRMWVNLNLWQKLKLSRDDAKPLLRLKGFPSFPLVERQANEVDWWDMVCNVKKLINEKKEDGKVFWQNLAGYKRQEALRPYLSSEEDRKKGKKFARYQLGDLLLHLEKKHGEDWGKVYGEAWERIDKKVEGLSKHIKLEEERRSEDAQSKAALTDWLRAKASFVIEGLKEADKDEFCRCELKLQKWYGDLRGKPFAIEAENSILDISGFSKQYNCAFIWQKDGVKKLNLYLIINYFKGGKLRFKKIKPEAFEANRFYTVINKKSGEIVPMEVNFNFDDPNLIILPLAFGKRQGREFIWNDLLSLETGSLKLANGRVIEKTLYNRRTRQDEPALFVALTFERREVLDSSNIKPMNLIGVDRGENIPAVIALTDPEGCPLSRFKDSLGNPTHILRIGESYKEKQRTIQAKKEVEQRRAGGYSRKYASKAKNLADDMVRNTARDLLYYAVTQDAMLIFENLSRGFGRQGKRTFMAERQYTRMEDWLTAKLAYEGLPSKTYLSKTLAQYTSKTCSNCGFTITSADYDRVLEKLKKTATGWMTTINGKELKVEGQITYYNRYKRQNVVKDLSVELDRLSEESVNNDISSWTKGRSGEALSLLKKRFSHRPVQEKFVCLNCGFETHADEQAALNIARSWLFLRSQEYKKYQTNKTTGNTDKRAFVETWQSFYRKKLKEVWKPAV

SEQ ID NO: 41032 - protein, 978 aa, synthetic construct
  REGION 1..978: note = engineered CasX variant
QEGKRINKIRRRLVKDSNTKKAGKTGPMKTLLVRVMTPDLRERLENLRKKPENIPQPISNTSRANLNKLLTDYTEMKKAILHVYWEEFQKDPVGLMSRVAQPASKKIDQNKLKPEMDEKGNLTTAGFACSQCGQPLFVYKLEQVSEKGKAYTNYFGRCNVAEHEKLIKLAQLKPEKDSDEAVTYSLGKFGQRALDFYSIHVTKESTHPVKPLAQIAGNRYASGPVGKALSDACMGTIASFLSKYQDIIIEHQKVVKGNQKRLESLRELAGKENLEYPSVTLPPQPHTKEGVDAYNEVIARVRMWVNLNLWQKLKLSRDDAKPLLRLKGFPSFPLVERQANEVDWWDMVCNVKKLINEKKEDGKVFWQNLAGYKRQEALRPYLSSEEDRKKGKKFARYQLGDLLLHLEKKHGEDWGKVYGEAWERIDKKVEGLSKHIKLEEERRSEDAQSKAALTDWLRAKASFVIEGLKEADKDEFCRCELKLQKWYGDLRGKPFAIEAENSILDISGFSKQYNCAFIWQKDGVKKLNLYLIINYFKGGKLRFKKIKPEAFEANRFYTVINKKSGEIVPMEVNFNFDDPNLIILPLAFGKRQGREFIWNDLLSLETGSLKLANGRVIEKTLYNRRTRQDEPALFVALTFERREVLDSSNIKPMNLIGVDRGENIPAVIALTDPEGCPLSRFKDSLGNPTHILRIGESYKEKQRTIQAKKEVEQRRAGGYSRKYASKAKNLADDMVRNTARDLLYYAVTQDAMLIFENLSRGFGRQGKRTFMAERQYTRMEDWLTAKLAYEGLPSKTYLSKTLAQYTSKTCSNCGFTITSADYDRVLEKLKKTATGWMTTINGKELKVEGQITYYNRYKRQNVVKDLSVELDRLSEESVNNDISSWTKGRSGEALSLLKKRFSHRPVQEKFVCLNCGFETHADEQAALNIARSWLFLRSQEYKKYQTNKTTGNTDKRAFVETWQSFYRKKLKEVWKPAV

SEQ ID NO: 41033 - protein, 977 aa, synthetic construct
  REGION 1..977: note = engineered CasX variant
QEGKRINKIRRRLVKDSNTKKAGKTGPMKTLLVRVMTPDLRERLENLRKKPENIPQPISNTSRANLNKLLTDYTEMKKAILHVYWEEFQKDPVGLMSRVAQPASKKIDQNKLKPEMDEKGNLTTAGFACSQCGQPLFVYKLEQVSEKGKAYTNYFGRCNVAEHEKLILLAQLKPEKDSDEAVTYSLGKFGQRALDFYSIHVTKESTHPVKPLAQIAGNRYASPVGKALSDACMGTIASFLSKYQDIIIEHQKVVKGNQKRLESLRELAGKENLEYPSVTLPPQPHTKEGVDAYNEVIARVRMWVNLNLWQKLKLSRDDAKPLLRLKGFPSFPLVERQANEVDWWDMVCNVKKLINEKKEDGKVFWQNLAGYKRQEALRPYLSSEEDRKKGKKFARYQLGDLLLHLEKKHGEDWGKVYGEAWERIDKKVEGLSKHIKLEEERRSEDAQSKAALTDWLRAKASFVIEGLKEADKDEFCRCELKLQKWYGDLRGKPFAIEAENSILDISGFSKQYNCAFIWQKDGVKKLNLYLIINYFKGGKLRFKKIKPEAFEANRFYTVINKKSGEIVPMEVNFNFDDPNLIILPLAFGKRQGREFIWNDLLSLETGSLKLANGRVIEKTLYNRRTRQDEPALFVALTFERREVLDSSNIKPMNLIGVDRGENIPAVIALTDPEGCPLSRFKDSLGNPTHILRIGESYKEKQRTIQAKKEVEQRRAGGYSRKYASKAKNLADDMVRNTARDLLYYAVTQDAMLIFENLSRGFGRQGKRTFMAERQYTRMEDWLTAKLAYEGLPSKTYLSKTLAQYTSKTCSNCGFTITSADYDRVLEKLKKTATGWMTTINGKELKVEGQITYYNRYKRQNVVKDLSVELDRLSEESVNNDISSWTKGRSGEALSLLKKRFSHRPVQEKFVCLNCGFETHADEQAALNIARSWLFLRSQEYKKYQTNKTTGNTDKRAFVETWQSFYRKKLKEVWKPAV

SEQ ID NO: 41034 - protein, 978 aa, synthetic construct
  REGION 1..978: note = engineered CasX variant
QEGKRINKIRRRLVKDSNTKKAGKTGPMKTLLVRVMTPDLRERLENLRKKPENIPQPISNTSRANLNKLLTDYTEMKKAILHVYWEEFQKDPVGLMSRVAQPASKKIDQNKLKPEMDEKGNLTTAGFACSQCGQPLFVYKLEQVSEKGKAYTNYFGRCNVAEHEKLILLAQLKPEKDSDEAVTYSLGKFGQRALDFYSIHVTKESTHPVKPLAQIAGNRYASYPVGKALSDACMGTIASFLSKYQDIIIEHQKVVKGNQKRLESLRELAGKENLEYPSVTLPPQPHTKEGVDAYNEVIARVRMWVNLNLWQKLKLSRDDAKPLLRLKGFPSFPLVERQANEVDWWDMVCNVKKLINEKKEDGKVFWQNLAGYKRQEALRPYLSSEEDRKKGKKFARYQLGDLLLHLEKKHGEDWGKVYDEAWERIDKKVEGLSKHIKLEEERRSEDAQSKAALTDWLRAKASFVIEGKKEADKDEFCRCELKLQKWYGDLRGKPFAIEAENSILDISGFSKQYNCAFIWQKDGVKKLNLYLIINYFKGGKLRFKKIKPEAFEANRFYTVINKKSGEIVPMEVNFNFDDPNLIILPLAFGKRQGREFIWNDLLSLETGSLKLANGRVIEKTLYNRRTRQDEPALFVALTFERREVLDSSNIKPMNLIGVDRGENIPAVIALTDPEGCPLSRFKDSLGNPTHILRIGESYKEKQRTIQAKKEVEQRRAGGYSRKYASKAKNLADDMVRNTARDLLYYAVTQDAMLIFENLSRGFGRQGKRTFMAERQYTRMEDWLTAKLAYEGLPSKTYLSKTLAQYTSKTCSNCGFTITSADYDRVLEKLKKTATGWMTTINGKELKVEGQITYYNRYKRQNVVKDLSVELDRLSEESVNNDISSWTKGRSGEALSLLKKRFSHRPVQEKFVCLNCGFETHADEQAALNIARSWLFLRSQEYKKYQTNKTTGNTDKRAFVETWQSFYRKKLKEVWKPAV

SEQ ID NO: 41035 - protein, 978 aa, synthetic construct
  REGION 1..978: note = engineered CasX variant
QEGKRINKIRRRLVKDSNTKKAGKTGPMKTLLVRVMTPDLRERLENLRKKPENIPQPISNTSRANLNKLLTDYTEMKKAILHVYWEEFQKDPVGLMSRVAQPASKKIDQNKLKPEMDEKGNLTTAGFACSQCGQPLFVYKLEQVSEKGKAYTNYFGRCNVAEHEKLILLAQLKPEKDSDEAVTYSLGKFGQRALDFYSIHVTKESTHPVKPLAQIAGNRYASHPVGKALSDACMGTIASFLSKYQDIIIEHQKVVKGNQKRLESLRELAGKENLEYPSVTLPPQPHTKEGVDAYNEVIARVRMWVNLNLWQKLKLSRDDAKPLLRLKGFPSFPLVERQANEVDWWDMVCNVKKLINEKKEDGKVFWQNLAGYKRQEALRPYLSSEEDRKKGKKFARYQLGDLLLHLEKKHGEDWGKVYDEAWERIDKKVEGLSKHIKLEEERRSEDAQSKAALTDWLRAKASFVIEGKKEADKDEFCRCELKLQKWYGDLRGKPFAIEAENSILDISGFSKQYNCAFIWQKDGVKKLNLYLIINYFKGGKLRFKKIKPEAFEANRFYTVINKKSGEIVPMEVNFNFDDPNLIILPLAFGKRQGREFIWNDLLSLETGSLKLANGRVIEKTLYNRRTRQDEPALFVALTFERREVLDSSNIKPMNLIGVDRGENIPAVIALTDPEGCPLSRFKDSLGNPTHILRIGESYKEKQRTIQAKKEVEQRRAGGYSRKYASKAKNLADDMVRNTARDLLYYAVTQDAMLIFENLSRGFGRQGKRTFMAERQYTRMEDWLTAKLAYEGLPSKTYLSKTLAQYTSKTCSNCGFTITSADYDRVLEKLKKTATGWMTTINGKELKVEGQITYYNRYKRQNVVKDLSVELDRLSEESVNNDISSWTKGRSGEALSLLKKRFSHRPVQEKFVCLNCGFETHADEQAALNIARSWLFLRSQEYKKYQTNKTTGNTDKRAFVETWQSFYRKKLKEVWKPAV

SEQ ID NO: 41036 - protein, 978 aa, synthetic construct
  REGION 1..978: note = engineered CasX variant
QEGKRINKIRRRLVKDSNTKKAGKTGPMKTLLVRVMTPDLRERLENLRKKPENIPQPISNTSRANLNKLLTDYTEMKKAILHVYWEEFQKDPVGLMSRVAQPASKKIDQNKLKPEMDEKGNLTTAGFACSQCGQPLFVYKLEQVSEKGKAYTNYFGRCNVAEHEKLILLAQLKPEKDSDEAVTYSLGKFGQRALDFYSIHVTKESTHPVKPLAQIAGNRYASSPVGKALSDACMGTIASFLSKYQDIIIEHQKVVKGNQKRLESLRELAGKENLEYPSVTLPPQPHTKEGVDAYNEVIARVRMWVNLNLWQKLKLSRDDAKPLLRLKGFPSFPLVERQANEVDWWDMVCNVKKLINEKKEDGKVFWQNLAGYKRQEALRPYLSSEEDRKKGKKFARYQLGDLLLHLEKKHGEDWGKVYDEAWERIDKKVEGLSKHIKLEEERRSEDAQSKAALTDWLRAKASFVIEGKKEADKDEFCRCELKLQKWYGDLRGKPFAIEAENSILDISGFSKQYNCAFIWQKDGVKKLNLYLIINYFKGGKLRFKKIKPEAFEANRFYTVINKKSGEIVPMEVNFNFDDPNLIILPLAFGKRQGREFIWNDLLSLETGSLKLANGRVIEKTLYNRRTRQDEPALFVALTFERREVLDSSNIKPMNLIGVDRGENIPAVIALTDPEGCPLSRFKDSLGNPTHILRIGESYKEKQRTIQAKKEVEQRRAGGYSRKYASKAKNLADDMVRNTARDLLYYAVTQDAMLIFENLSRGFGRQGKRTFMAERQYTRMEDWLTAKLAYEGLPSKTYLSKTLAQYTSKTCSNCGFTITSADYDRVLEKLKKTATGWMTTINGKELKVEGQITYYNRYKRQNVVKDLSVELDRLSEESVNNDISSWTKGRSGEALSLLKKRFSHRPVQEKFVCLNCGFETHADEQAALNIARSWLFLRSQEYKKYQTNKTTGNTDKRAFVETWQSFYRKKLKEVWKPAV

SEQ ID NO: 41037 - protein, 978 aa, synthetic construct
  REGION 1..978: note = engineered CasX variant
QEGKRINKIRRRLVKDSNTKKAGKTGPMKTLLVRVMTPDLRERLENLRKKPENIPQPISNTSRANLNKLLTDYTEMKKAILHVYWEEFQKDPVGLMSRVAQPASKKIDQNKLKPEMDEKGNLTTAGFACSQCGQPLFVYKLEQVSEKGKAYTNYFGRCNVAEHEKLILLAQLKPEKDSDEAVTYSLGKFGQRALDFYSIHVTKESTHPVKPLAQIAGNRYASTPVGKALSDACMGTIASFLSKYQDIIIEHQKVVKGNQKRLESLRELAGKENLEYPSVTLPPQPHTKEGVDAYNEVIARVRMWVNLNLWQKLKLSRDDAKPLLRLKGFPSFPLVERQANEVDWWDMVCNVKKLINEKKEDGKVFWQNLAGYKRQEALRPYLSSEEDRKKGKKFARYQLGDLLLHLEKKHGEDWGKVYDEAWERIDKKVEGLSKHIKLEEERRSEDAQSKAALTDWLRAKASFVIEGKKEADKDEFCRCELKLQKWYGDLRGKPFAIEAENSILDISGFSKQYNCAFIWQKDGVKKLNLYLIINYFKGGKLRFKKIKPEAFEANRFYTVINKKSGEIVPMEVNFNFDDPNLIILPLAFGKRQGREFIWNDLLSLETGSLKLANGRVIEKTLYNRRTRQDEPALFVALTFERREVLDSSNIKPMNLIGVDRGENIPAVIALTDPEGCPLSRFKDSLGNPTHILRIGESYKEKQRTIQAKKEVEQRRAGGYSRKYASKAKNLADDMVRNTARDLLYYAVTQDAMLIFENLSRGFGRQGKRTFMAERQYTRMEDWLTAKLAYEGLPSKTYLSKTLAQYTSKTCSNCGFTITSADYDRVLEKLKKTATGWMTTINGKELKVEGQITYYNRYKRQNVVKDLSVELDRLSEESVNNDISSWTKGRSGEALSLLKKRFSHRPVQEKFVCLNCGFETHADEQAALNIARSWLFLRSQEYKKYQTNKTTGNTDKRAFVETWQSFYRKKLKEVWKPAV

SEQ ID NO: 41038 - protein, 978 aa, synthetic construct
  REGION 1..978: note = engineered CasX variant
QEGKRINKIRRRLVKDSNTKKAGKTGPMKTLLVRVMTPDLRERLENLRKKPENIPQPISNTSRANLNKLLTDYTEMKKAILHVYWEEFQKDPVGLMSRVAQPASKKIDQNKLKPEMDEKGNLTTAGFACSQCGQPLFVYKLEQVSEKGKAYTNYFGRCNVAEHEKLILLAQLKPEKDSDEAVTYSLGKFGQRALDFYSIHVTKESTHPVKPLAQIAGNRYASAPVGKALSDACMGTIASFLSKYQDIIIEHQKVVKGNQKRLESLRELAGKENLEYPSVTLPPQPHTKEGVDAYNEVIARVRMWVNLNLWQKLKLSRDDAKPLLRLKGFPSFPLVERQANEVDWWDMVCNVKKLINEKKEDGKVFWQNLAGYKRQEALRPYLSSEEDRKKGKKFARYQLGDLLLHLEKKHGEDWGKVYDEAWERIDKKVEGLSKHIKLEEERRSEDAQSKAALTDWLRAKASFVIEGKKEADKDEFCRCELKLQKWYGDLRGKPFAIEAENSILDISGFSKQYNCAFIWQKDGVKKLNLYLIINYFKGGKLRFKKIKPEAFEANRFYTVINKKSGEIVPMEVNFNFDDPNLIILPLAFGKRQGREFIWNDLLSLETGSLKLANGRVIEKTLYNRRTRQDEPALFVALTFERREVLDSSNIKPMNLIGVDRGENIPAVIALTDPEGCPLSRFKDSLGNPTHILRIGESYKEKQRTIQAKKEVEQRRAGGYSRKYASKAKNLADDMVRNTARDLLYYAVTQDAMLIFENLSRGFGRQGKRTFMAERQYTRMEDWLTAKLAYEGLPSKTYLSKTLAQYTSKTCSNCGFTITSADYDRVLEKLKKTATGWMTTINGKELKVEGQITYYNRYKRQNVVKDLSVELDRLSEESVNNDISSWTKGRSGEALSLLKKRFSHRPVQEKFVCLNCGFETHADEQAALNIARSWLFLRSQEYKKYQTNKTTGNTDKRAFVETWQSFYRKKLKEVWKPAV

SEQ ID NO: 41039 - protein, 978 aa, synthetic construct
  REGION 1..978: note = engineered CasX variant
QEGKRINKIRRRLVKDSNTKKAGKTGPMKTLLVRVMTPDLRERLENLRKKPENIPQPISNTSRANLNKLLTDYTEMKKAILHVYWEEFQKDPVGLMSRVAQPASKKIDQNKLKPEMDEKGNLTTAGFACSQCGQPLFVYKLEQVSEKGKAYTNYFGRCNVAEHEKLILLAQLKPEKDSDEAVTYSLGKFGQRALDFYSIHVTKESTHPVKPLAQIAGNRYASVPVGKALSDACMGTIASFLSKYQDIIIEHQKVVKGNQKRLESLRELAGKENLEYPSVTLPPQPHTKEGVDAYNEVIARVRMWVNLNLWQKLKLSRDDAKPLLRLKGFPSFPLVERQANEVDWWDMVCNVKKLINEKKEDGKVFWQNLAGYKRQEALRPYLSSEEDRKKGKKFARYQLGDLLLHLEKKHGEDWGKVYDEAWERIDKKVEGLSKHIKLEEERRSEDAQSKAALTDWLRAKASFVIEGKKEADKDEFCRCELKLQKWYGDLRGKPFAIEAENSILDISGFSKQYNCAFIWQKDGVKKLNLYLIINYFKGGKLRFKKIKPEAFEANRFYTVINKKSGEIVPMEVNFNFDDPNLIILPLAFGKRQGREFIWNDLLSLETGSLKLANGRVIEKTLYNRRTRQDEPALFVALTFERREVLDSSNIKPMNLIGVDRGENIPAVIALTDPEGCPLSRFKDSLGNPTHILRIGESYKEKQRTIQAKKEVEQRRAGGYSRKYASKAKNLADDMVRNTARDLLYYAVTQDAMLIFENLSRGFGRQGKRTFMAERQYTRMEDWLTAKLAYEGLPSKTYLSKTLAQYTSKTCSNCGFTITSADYDRVLEKLKKTATGWMTTINGKELKVEGQITYYNRYKRQNVVKDLSVELDRLSEESVNNDISSWTKGRSGEALSLLKKRFSHRPVQEKFVCLNCGFETHADEQAALNIARSWLFLRSQEYKKYQTNKTTGNTDKRAFVETWQSFYRKKLKEVWKPAV

SEQ ID NO: 41040 - protein, 978 aa, synthetic construct
  REGION 1..978: note = engineered CasX variant
QEGKRINKIRRRLVKDSNTKKAGKTGPMKTLLVRVMTPDLRERLENLRKKPENIPQPISNTSRANLNKLLTDYTEMKKAILHVYWEEFQKDPVGLMSRVAQPASKKIDQNKLKPEMDEKGNLTTAGFACSQCGQPLFVYKLEQVSEKGKAYTNYFGRCNVAEHEKLIKLAQLKPEKDSDEAVTYSLGKFGQRALDFYSIHVTKESTHPVKPLAQIAGNRYASGPVGKALSDACMGTIASFLSKYQDIIIEHQKVVKGNQKRLESLRELAGKENLEYPSVTLPPQPHTKEGVDAYNEVIARVRMWVNLNLWQKLKLSRDDAKPLLRLKGFPSFPLVERQANEVDWWDMVCNVKKLINEKKEDGKVFWQNLAGYKRQEALRPYLSSEEDRKKGKKFARYQLGDLLLHLEKKHGEDWGKVYDEAWERIDKKVEGLSKHIKLEEERRSEDAQSKAALTDWLRAKASFVIEGKKEADKDEFCRCELKLQKWYGDLRGKPFAIEAENSILDISGFSKQYNCAFIWQKDGVKKLNLYLIINYFKGGKLRFKKIKPEAFEANRFYTVINKKSGEIVPMEVNFNFDDPNLIILPLAFGKRQGREFIWNDLLSLETGSLKLANGRVIEKTLYNRRTRQDEPALFVALTFERREVLDSSNIKPMNLIGVDRGENIPAVIALTDPEGCPLSRFKDSLGNPTHILRIGESYKEKQRTIQAKKEVEQRRAGGYSRKYASKAKNLADDMVRNTARDLLYYAVTQDAMLIFENLSRGFGRQGKRTFMAERQYTRMEDWLTAKLAYEGLPSKTYLSKTLAQYTSKTCSNCGFTITSADYDRVLEKLKKTATGWMTTINGKELKVEGQITYYNRYKRQNVVKDLSVELDRLSEESVNNDISSWTKGRSGEALSLLKKRFSHRPVQEKFVCLNCGFETHADEQAALNIARSWLFLRSQEYKKYQTNKTTGNTDKRAFVETWQSFYRKKLKEVWKPAV

SEQ ID NO: 41041 - protein, 977 aa, synthetic construct
  REGION 1..977: note = engineered CasX variant
QEGKRINKIRRRLVKDSNTKKAGKTGPMKTLLVRVMTPDLRERLENLRKKPENIPQPISNTSRANLNKLLTDYTEMKKAILHVYWEEFQKDPVGLMSRVAQPASKKIDQNKLKPEMDEKGNLTTAGFACSQCGQPLFVYKLEQVSEKGKAYTNYFGRCNVAEHEKLILLAQLKPEKDSDEAVTYSLGKFGQRALDFYSIHVTKESTHPVKPLAQIAGNRYASPVGKALSDACMGTIASFLSKYQDIIIEHQKVVKGNQKRLESLRELAGKENLEYPSVTLPPQPHTKEGVDAYNEVIARVRMWVNLNLWQKLKLSRDDAKPLLRLKGFPSFPLVERQANEVDWWDMVCNVKKLINEKKEDGKVFWQNLAGYKRQEALRPYLSSEEDRKKGKKFARYQLGDLLLHLEKKHGEDWGKVYDEAWERIDKKVEGLSKHIKLEEERRSEDAQSKAALTDWLRAKASFVIEGKKEADKDEFCRCELKLQKWYGDLRGKPFAIEAENSILDISGFSKQYNCAFIWQKDGVKKLNLYLIINYFKGGKLRFKKIKPEAFEANRFYTVINKKSGEIVPMEVNFNFDDPNLIILPLAFGKRQGREFIWNDLLSLETGSLKLANGRVIEKTLYNRRTRQDEPALFVALTFERREVLDSSNIKPMNLIGVDRGENIPAVIALTDPEGCPLSRFKDSLGNPTHILRIGESYKEKQRTIQAKKEVEQRRAGGYSRKYASKAKNLADDMVRNTARDLLYYAVTQDAMLIFENLSRGFGRQGKRTFMAERQYTRMEDWLTAKLAYEGLPSKTYLSKTLAQYTSKTCSNCGFTITSADYDRVLEKLKKTATGWMTTINGKELKVEGQITYYNRYKRQNVVKDLSVELDRLSEESVNNDISSWTKGRSGEALSLLKKRFSHRPVQEKFVCLNCGFETHADEQAALNIARSWLFLRSQEYKKYQTNKTTGNTDKRAFVETWQSFYRKKLKEVWKPAV

SEQ ID NO: 41042 - protein, 978 aa, synthetic construct
  REGION 1..978: note = engineered CasX variant
QEGKRINKIRRRLVKDSNTKKAGKTGPMKTLLVRVMTPDLRERLENLRKKPENIPQPISNTSRANLNKLLTDYTEMKKAILHVYWEEFQKDPVGLMSRVAQPASKKIDQNKLKPEMDEKGNLTTAGFACSQCGQPLFVYKLEQVSEKGKAYTNYFGRCNVAEHEKLILLAQLKPEKDSDEAVTYSLGKFGQRALDFYSIHVTKESTHPVKPLAQIAGNRYASYPVGKALSDACMGTIASFLSKYQDIIIEHQKVVKGNQKRLESLRELAGKENLEYPSVTLPPQPHTKEGVDAYNEVIARVRMWVNLNLWQKLKLSRDDAKPLLRLKGFPSFPLVERQANEVDWWDMVCNVKKLINEKKEDGKVFWQNLAGYKRQEALRPYLSSEEDRKKGKKFARYQLGDLLLHLEKKHGEDWGKVYDEAWERIDKKVEGLSKHIKLEEERRSEDAQSKAALTDWLRAKASFVIEGSKEADKDEFCRCELKLQKWYGDLRGKPFAIEAENSILDISGFSKQYNCAFIWQKDGVKKLNLYLIINYFKGGKLRFKKIKPEAFEANRFYTVINKKSGEIVPMEVNFNFDDPNLIILPLAFGKRQGREFIWNDLLSLETGSLKLANGRVIEKTLYNRRTRQDEPALFVALTFERREVLDSSNIKPMNLIGVDRGENIPAVIALTDPEGCPLSRFKDSLGNPTHILRIGESYKEKQRTIQAKKEVEQRRAGGYSRKYASKAKNLADDMVRNTARDLLYYAVTQDAMLIFENLSRGFGRQGKRTFMAERQYTRMEDWLTAKLAYEGLPSKTYLSKTLAQYTSKTCSNCGFTITSADYDRVLEKLKKTATGWMTTINGKELKVEGQITYYNRYKRQNVVKDLSVELDRLSEESVNNDISSWTKGRSGEALSLLKKRFSHRPVQEKFVCLNCGFETHADEQAALNIARSWLFLRSQEYKKYQTNKTTGNTDKRAFVETWQSFYRKKLKEVWKPAV

SEQ ID NO: 41043 - protein, 978 aa, synthetic construct
  REGION 1..978: note = engineered CasX variant
QEGKRINKIRRRLVKDSNTKKAGKTGPMKTLLVRVMTPDLRERLENLRKKPENIPQPISNTSRANLNKLLTDYTEMKKAILHVYWEEFQKDPVGLMSRVAQPASKKIDQNKLKPEMDEKGNLTTAGFACSQCGQPLFVYKLEQVSEKGKAYTNYFGRCNVAEHEKLILLAQLKPEKDSDEAVTYSLGKFGQRALDFYSIHVTKESTHPVKPLAQIAGNRYASHPVGKALSDACMGTIASFLSKYQDIIIEHQKVVKGNQKRLESLRELAGKENLEYPSVTLPPQPHTKEGVDAYNEVIARVRMWVNLNLWQKLKLSRDDAKPLLRLKGFPSFPLVERQANEVDWWDMVCNVKKLINEKKEDGKVFWQNLAGYKRQEALRPYLSSEEDRKKGKKFARYQLGDLLLHLEKKHGEDWGKVYDEAWERIDKKVEGLSKHIKLEEERRSEDAQSKAALTDWLRAKASFVIEGSKEADKDEFCRCELKLQKWYGDLRGKPFAIEAENSILDISGFSKQYNCAFIWQKDGVKKLNLYLIINYFKGGKLRFKKIKPEAFEANRFYTVINKKSGEIVPMEVNFNFDDPNLIILPLAFGKRQGREFIWNDLLSLETGSLKLANGRVIEKTLYNRRTRQDEPALFVALTFERREVLDSSNIKPMNLIGVDRGENIPAVIALTDPEGCPLSRFKDSLGNPTHILRIGESYKEKQRTIQAKKEVEQRRAGGYSRKYASKAKNLADDMVRNTARDLLYYAVTQDAMLIFENLSRGFGRQGKRTFMAERQYTRMEDWLTAKLAYEGLPSKTYLSKTLAQYTSKTCSNCGFTITSADYDRVLEKLKKTATGWMTTINGKELKVEGQITYYNRYKRQNVVKDLSVELDRLSEESVNNDISSWTKGRSGEALSLLKKRFSHRPVQEKFVCLNCGFETHADEQAALNIARSWLFLRSQEYKKYQTNKTTGNTDKRAFVETWQSFYRKKLKEVWKPAV

SEQ ID NO: 41044 - protein, 978 aa, synthetic construct
  REGION 1..978: note = engineered CasX variant
QEGKRINKIRRRLVKDSNTKKAGKTGPMKTLLVRVMTPDLRERLENLRKKPENIPQPISNTSRANLNKLLTDYTEMKKAILHVYWEEFQKDPVGLMSRVAQPASKKIDQNKLKPEMDEKGNLTTAGFACSQCGQPLFVYKLEQVSEKGKAYTNYFGRCNVAEHEKLILLAQLKPEKDSDEAVTYSLGKFGQRALDFYSIHVTKESTHPVKPLAQIAGNRYASSPVGKALSDACMGTIASFLSKYQDIIIEHQKVVKGNQKRLESLRELAGKENLEYPSVTLPPQPHTKEGVDAYNEVIARVRMWVNLNLWQKLKLSRDDAKPLLRLKGFPSFPLVERQANEVDWWDMVCNVKKLINEKKEDGKVFWQNLAGYKRQEALRPYLSSEEDRKKGKKFARYQLGDLLLHLEKKHGEDWGKVYDEAWERIDKKVEGLSKHIKLEEERRSEDAQSKAALTDWLRAKASFVIEGSKEADKDEFCRCELKLQKWYGDLRGKPFAIEAENSILDISGFSKQYNCAFIWQKDGVKKLNLYLIINYFKGGKLRFKKIKPEAFEANRFYTVINKKSGEIVPMEVNFNFDDPNLIILPLAFGKRQGREFIWNDLLSLETGSLKLANGRVIEKTLYNRRTRQDEPALFVALTFERREVLDSSNIKPMNLIGVDRGENIPAVIALTDPEGCPLSRFKDSLGNPTHILRIGESYKEKQRTIQAKKEVEQRRAGGYSRKYASKAKNLADDMVRNTARDLLYYAVTQDAMLIFENLSRGFGRQGKRTFMAERQYTRMEDWLTAKLAYEGLPSKTYLSKTLAQYTSKTCSNCGFTITSADYDRVLEKLKKTATGWMTTINGKELKVEGQITYYNRYKRQNVVKDLSVELDRLSEESVNNDISSWTKGRSGEALSLLKKRFSHRPVQEKFVCLNCGFETHADEQAALNIARSWLFLRSQEYKKYQTNKTTGNTDKRAFVETWQSFYRKKLKEVWKPAV

SEQ ID NO: 41045 - protein, 978 aa, synthetic construct
  REGION 1..978: note = engineered CasX variant
QEGKRINKIRRRLVKDSNTKKAGKTGPMKTLLVRVMTPDLRERLENLRKKPENIPQPISNTSRANLNKLLTDYTEMKKAILHVYWEEFQKDPVGLMSRVAQPASKKIDQNKLKPEMDEKGNLTTAGFACSQCGQPLFVYKLEQVSEKGKAYTNYFGRCNVAEHEKLILLAQLKPEKDSDEAVTYSLGKFGQRALDFYSIHVTKESTHPVKPLAQIAGNRYASTPVGKALSDACMGTIASFLSKYQDIIIEHQKVVKGNQKRLESLRELAGKENLEYPSVTLPPQPHTKEGVDAYNEVIARVRMWVNLNLWQKLKLSRDDAKPLLRLKGFPSFPLVERQANEVDWWDMVCNVKKLINEKKEDGKVFWQNLAGYKRQEALRPYLSSEEDRKKGKKFARYQLGDLLLHLEKKHGEDWGKVYDEAWERIDKKVEGLSKHIKLEEERRSEDAQSKAALTDWLRAKASFVIEGSKEADKDEFCRCELKLQKWYGDLRGKPFAIEAENSILDISGFSKQYNCAFIWQKDGVKKLNLYLIINYFKGGKLRFKKIKPEAFEANRFYTVINKKSGEIVPMEVNFNFDDPNLIILPLAFGKRQGREFIWNDLLSLETGSLKLANGRVIEKTLYNRRTRQDEPALFVALTFERREVLDSSNIKPMNLIGVDRGENIPAVIALTDPEGCPLSRFKDSLGNPTHILRIGESYKEKQRTIQAKKEVEQRRAGGYSRKYASKAKNLADDMVRNTARDLLYYAVTQDAMLIFENLSRGFGRQGKRTFMAERQYTRMEDWLTAKLAYEGLPSKTYLSKTLAQYTSKTCSNCGFTITSADYDRVLEKLKKTATGWMTTINGKELKVEGQITYYNRYKRQNVVKDLSVELDRLSEESVNNDISSWTKGRSGEALSLLKKRFSHRPVQEKFVCLNCGFETHADEQAALNIARSWLFLRSQEYKKYQTNKTTGNTDKRAFVETWQSFYRKKLKEVWKPAV

SEQ ID NO: 41046 - protein, 978 aa, synthetic construct
  REGION 1..978: note = engineered CasX variant
QEGKRINKIRRRLVKDSNTKKAGKTGPMKTLLVRVMTPDLRERLENLRKKPENIPQPISNTSRANLNKLLTDYTEMKKAILHVYWEEFQKDPVGLMSRVAQPASKKIDQNKLKPEMDEKGNLTTAGFACSQCGQPLFVYKLEQVSEKGKAYTNYFGRCNVAEHEKLILLAQLKPEKDSDEAVTYSLGKFGQRALDFYSIHVTKESTHPVKPLAQIAGNRYASAPVGKALSDACMGTIASFLSKYQDIIIEHQKVVKGNQKRLESLRELAGKENLEYPSVTLPPQPHTKEGVDAYNEVIARVRMWVNLNLWQKLKLSRDDAKPLLRLKGFPSFPLVERQANEVDWWDMVCNVKKLINEKKEDGKVFWQNLAGYKRQEALRPYLSSEEDRKKGKKFARYQLGDLLLHLEKKHGEDWGKVYDEAWERIDKKVEGLSKHIKLEEERRSEDAQSKAALTDWLRAKASFVIEGSKEADKDEFCRCELKLQKWYGDLRGKPFAIEAENSILDISGFSKQYNCAFIWQKDGVKKLNLYLIINYFKGGKLRFKKIKPEAFEANRFYTVINKKSGEIVPMEVNFNFDDPNLIILPLAFGKRQGREFIWNDLLSLETGSLKLANGRVIEKTLYNRRTRQDEPALFVALTFERREVLDSSNIKPMNLIGVDRGENIPAVIALTDPEGCPLSRFKDSLGNPTHILRIGESYKEKQRTIQAKKEVEQRRAGGYSRKYASKAKNLADDMVRNTARDLLYYAVTQDAMLIFENLSRGFGRQGKRTFMAERQYTRMEDWLTAKLAYEGLPSKTYLSKTLAQYTSKTCSNCGFTITSADYDRVLEKLKKTATGWMTTINGKELKVEGQITYYNRYKRQNVVKDLSVELDRLSEESVNNDISSWTKGRSGEALSLLKKRFSHRPVQEKFVCLNCGFETHADEQAALNIARSWLFLRSQEYKKYQTNKTTGNTDKRAFVETWQSFYRKKLKEVWKPAV

SEQ ID NO: 41047 - protein, 978 aa, synthetic construct
  REGION 1..978: note = engineered CasX variant
QEGKRINKIRRRLVKDSNTKKAGKTGPMKTLLVRVMTPDLRERLENLRKKPENIPQPISNTSRANLNKLLTDYTEMKKAILHVYWEEFQKDPVGLMSRVAQPASKKIDQNKLKPEMDEKGNLTTAGFACSQCGQPLFVYKLEQVSEKGKAYTNYFGRCNVAEHEKLILLAQLKPEKDSDEAVTYSLGKFGQRALDFYSIHVTKESTHPVKPLAQIAGNRYASVPVGKALSDACMGTIASFLSKYQDIIIEHQKVVKGNQKRLESLRELAGKENLEYPSVTLPPQPHTKEGVDAYNEVIARVRMWVNLNLWQKLKLSRDDAKPLLRLKGFPSFPLVERQANEVDWWDMVCNVKKLINEKKEDGKVFWQNLAGYKRQEALRPYLSSEEDRKKGKKFARYQLGDLLLHLEKKHGEDWGKVYDEAWERIDKKVEGLSKHIKLEEERRSEDAQSKAALTDWLRAKASFVIEGSKEADKDEFCRCELKLQKWYGDLRGKPFAIEAENSILDISGFSKQYNCAFIWQKDGVKKLNLYLIINYFKGGKLRFKKIKPEAFEANRFYTVINKKSGEIVPMEVNFNFDDPNLIILPLAFGKRQGREFIWNDLLSLETGSLKLANGRVIEKTLYNRRTRQDEPALFVALTFERREVLDSSNIKPMNLIGVDRGENIPAVIALTDPEGCPLSRFKDSLGNPTHILRIGESYKEKQRTIQAKKEVEQRRAGGYSRKYASKAKNLADDMVRNTARDLLYYAVTQDAMLIFENLSRGFGRQGKRTFMAERQYTRMEDWLTAKLAYEGLPSKTYLSKTLAQYTSKTCSNCGFTITSADYDRVLEKLKKTATGWMTTINGKELKVEGQITYYNRYKRQNVVKDLSVELDRLSEESVNNDISSWTKGRSGEALSLLKKRFSHRPVQEKFVCLNCGFETHADEQAALNIARSWLFLRSQEYKKYQTNKTTGNTDKRAFVETWQSFYRKKLKEVWKPAV

SEQ ID NO: 41048 - protein, 978 aa, synthetic construct
  REGION 1..978: note = engineered CasX variant
QEGKRINKIRRRLVKDSNTKKAGKTGPMKTLLVRVMTPDLRERLENLRKKPENIPQPISNTSRANLNKLLTDYTEMKKAILHVYWEEFQKDPVGLMSRVAQPASKKIDQNKLKPEMDEKGNLTTAGFACSQCGQPLFVYKLEQVSEKGKAYTNYFGRCNVAEHEKLIKLAQLKPEKDSDEAVTYSLGKFGQRALDFYSIHVTKESTHPVKPLAQIAGNRYASGPVGKALSDACMGTIASFLSKYQDIIIEHQKVVKGNQKRLESLRELAGKENLEYPSVTLPPQPHTKEGVDAYNEVIARVRMWVNLNLWQKLKLSRDDAKPLLRLKGFPSFPLVERQANEVDWWDMVCNVKKLINEKKEDGKVFWQNLAGYKRQEALRPYLSSEEDRKKGKKFARYQLGDLLLHLEKKHGEDWGKVYDEAWERIDKKVEGLSKHIKLEEERRSEDAQSKAALTDWLRAKASFVIEGSKEADKDEFCRCELKLQKWYGDLRGKPFAIEAENSILDISGFSKQYNCAFIWQKDGVKKLNLYLIINYFKGGKLRFKKIKPEAFEANRFYTVINKKSGEIVPMEVNFNFDDPNLIILPLAFGKRQGREFIWNDLLSLETGSLKLANGRVIEKTLYNRRTRQDEPALFVALTFERREVLDSSNIKPMNLIGVDRGENIPAVIALTDPEGCPLSRFKDSLGNPTHILRIGESYKEKQRTIQAKKEVEQRRAGGYSRKYASKAKNLADDMVRNTARDLLYYAVTQDAMLIFENLSRGFGRQGKRTFMAERQYTRMEDWLTAKLAYEGLPSKTYLSKTLAQYTSKTCSNCGFTITSADYDRVLEKLKKTATGWMTTINGKELKVEGQITYYNRYKRQNVVKDLSVELDRLSEESVNNDISSWTKGRSGEALSLLKKRFSHRPVQEKFVCLNCGFETHADEQAALNIARSWLFLRSQEYKKYQTNKTTGNTDKRAFVETWQSFYRKKLKEVWKPAV

SEQ ID NO: 41049 - protein, 977 aa, synthetic construct
  REGION 1..977: note = engineered CasX variant
QEGKRINKIRRRLVKDSNTKKAGKTGPMKTLLVRVMTPDLRERLENLRKKPENIPQPISNTSRANLNKLLTDYTEMKKAILHVYWEEFQKDPVGLMSRVAQPASKKIDQNKLKPEMDEKGNLTTAGFACSQCGQPLFVYKLEQVSEKGKAYTNYFGRCNVAEHEKLILLAQLKPEKDSDEAVTYSLGKFGQRALDFYSIHVTKESTHPVKPLAQIAGNRYASPVGKALSDACMGTIASFLSKYQDIIIEHQKVVKGNQKRLESLRELAGKENLEYPSVTLPPQPHTKEGVDAYNEVIARVRMWVNLNLWQKLKLSRDDAKPLLRLKGFPSFPLVERQANEVDWWDMVCNVKKLINEKKEDGKVFWQNLAGYKRQEALRPYLSSEEDRKKGKKFARYQLGDLLLHLEKKHGEDWGKVYDEAWERIDKKVEGLSKHIKLEEERRSEDAQSKAALTDWLRAKASFVIEGSKEADKDEFCRCELKLQKWYGDLRGKPFAIEAENSILDISGFSKQYNCAFIWQKDGVKKLNLYLIINYFKGGKLRFKKIKPEAFEANRFYTVINKKSGEIVPMEVNFNFDDPNLIILPLAFGKRQGREFIWNDLLSLETGSLKLANGRVIEKTLYNRRTRQDEPALFVALTFERREVLDSSNIKPMNLIGVDRGENIPAVIALTDPEGCPLSRFKDSLGNPTHILRIGESYKEKQRTIQAKKEVEQRRAGGYSRKYASKAKNLADDMVRNTARDLLYYAVTQDAMLIFENLSRGFGRQGKRTFMAERQYTRMEDWLTAKLAYEGLPSKTYLSKTLAQYTSKTCSNCGFTITSADYDRVLEKLKKTATGWMTTINGKELKVEGQITYYNRYKRQNVVKDLSVELDRLSEESVNNDISSWTKGRSGEALSLLKKRFSHRPVQEKFVCLNCGFETHADEQAALNIARSWLFLRSQEYKKYQTNKTTGNTDKRAFVETWQSFYRKKLKEVWKPAV

SEQ ID NO: 41050 - protein, 979 aa, synthetic construct
  REGION 1..979: note = engineered CasX variant
QEGKRINKIRRRLVKDSNTKKAGKTGPMKTLLVRVMTPDLRERLENLRKKPENIPQPISNTSRANLNKLLTDYTEMKKAILHVYWEEFQKDPVGLMSRVAQPASKKIDQNKLKPEMDEKGNLTTAGFACSQCGQPLFVYKLEQVSEKGKAYTNYFGRCNVAEHEKLILLAQLKPEKDSDEAVTYSLGKFGQRALDFYSIHVTKESTHPVKPLAQIAGNRYASYPVGKALSDACMGTIASFLSKYQDIIIEHQKVVKGNQKRLESLRELAGKENLEYPSVTLPPQPHTKEGVDAYNEVIARVRMWVNLNLWQKLKLSRDDAKPLLRLKGFPSFPLVERQANEVDWWDMVCNVKKLINEKKEDGKVFWQNLAGYKRQEALRPYLSSEEDRKKGKKFARYQLGDLLLHLEKKHGEDWGKVYDEAWERIDKKVEGLSKHIKLEEERRSEDAQSKAALTDWLRAKASFVIEGLKEADDKDEFCRCELKLQKWYGDLRGKPFAIEAENSILDISGFSKQYNCAFIWQKDGVKKLNLYLIINYFKGGKLRFKKIKPEAFEANRFYTVINKKSGEIVPMEVNFNFDDPNLIILPLAFGKRQGREFIWNDLLSLETGSLKLANGRVIEKTLYNRRTRQDEPALFVALTFERREVLDSSNIKPMNLIGVDRGENIPAVIALTDPEGCPLSRFKDSLGNPTHILRIGESYKEKQRTIQAKKEVEQRRAGGYSRKYASKAKNLADDMVRNTARDLLYYAVTQDAMLIFENLSRGFGRQGKRTFMAERQYTRMEDWLTAKLAYEGLPSKTYLSKTLAQYTSKTCSNCGFTITSADYDRVLEKLKKTATGWMTTINGKELKVEGQITYYNRYKRQNVVKDLSVELDRLSEESVNNDISSWTKGRSGEALSLLKKRFSHRPVQEKFVCLNCGFETHADEQAALNIARSWLFLRSQEYKKYQTNKTTGNTDKRAFVETWQSFYRKKLKEVWKPAV

SEQ ID NO: 41051 - protein, 979 aa, synthetic construct
  REGION 1..979: note = engineered CasX variant
QEGKRINKIRRRLVKDSNTKKAGKTGPMKTLLVRVMTPDLRERLENLRKKPENIPQPISNTSRANLNKLLTDYTEMKKAILHVYWEEFQKDPVGLMSRVAQPASKKIDQNKLKPEMDEKGNLTTAGFACSQCGQPLFVYKLEQVSEKGKAYTNYFGRCNVAEHEKLILLAQLKPEKDSDEAVTYSLGKFGQRALDFYSIHVTKESTHPVKPLAQIAGNRYASHPVGKALSDACMGTIASFLSKYQDIIIEHQKVVKGNQKRLESLRELAGKENLEYPSVTLPPQPHTKEGVDAYNEVIARVRMWVNLNLWQKLKLSRDDAKPLLRLKGFPSFPLVERQANEVDWWDMVCNVKKLINEKKEDGKVFWQNLAGYKRQEALRPYLSSEEDRKKGKKFARYQLGDLLLHLEKKHGEDWGKVYDEAWERIDKKVEGLSKHIKLEEERRSEDAQSKAALTDWLRAKASFVIEGLKEADDKDEFCRCELKLQKWYGDLRGKPFAIEAENSILDISGFSKQYNCAFIWQKDGVKKLNLYLIINYFKGGKLRFKKIKPEAFEANRFYTVINKKSGEIVPMEVNFNFDDPNLIILPLAFGKRQGREFIWNDLLSLETGSLKLANGRVIEKTLYNRRTRQDEPALFVALTFERREVLDSSNIKPMNLIGVDRGENIPAVIALTDPEGCPLSRFKDSLGNPTHILRIGESYKEKQRTIQAKKEVEQRRAGGYSRKYASKAKNLADDMVRNTARDLLYYAVTQDAMLIFENLSRGFGRQGKRTFMAERQYTRMEDWLTAKLAYEGLPSKTYLSKTLAQYTSKTCSNCGFTITSADYDRVLEKLKKTATGWMTTINGKELKVEGQITYYNRYKRQNVVKDLSVELDRLSEESVNNDISSWTKGRSGEALSLLKKRFSHRPVQEKFVCLNCGFETHADEQAALNIARSWLFLRSQEYKKYQTNKTTGNTDKRAFVETWQSFYRKKLKEVWKPAV

SEQ ID NO: 41052 - protein, 979 aa, synthetic construct
  REGION 1..979: note = engineered CasX variant
QEGKRINKIRRRLVKDSNTKKAGKTGPMKTLLVRVMTPDLRERLENLRKKPENIPQPISNTSRANLNKLLTDYTEMKKAILHVYWEEFQKDPVGLMSRVAQPASKKIDQNKLKPEMDEKGNLTTAGFACSQCGQPLFVYKLEQVSEKGKAYTNYFGRCNVAEHEKLILLAQLKPEKDSDEAVTYSLGKFGQRALDFYSIHVTKESTHPVKPLAQIAGNRYASSPVGKALSDACMGTIASFLSKYQDIIIEHQKVVKGNQKRLESLRELAGKENLEYPSVTLPPQPHTKEGVDAYNEVIARVRMWVNLNLWQKLKLSRDDAKPLLRLKGFPSFPLVERQANEVDWWDMVCNVKKLINEKKEDGKVFWQNLAGYKRQEALRPYLSSEEDRKKGKKFARYQLGDLLLHLEKKHGEDWGKVYDEAWERIDKKVEGLSKHIKLEEERRSEDAQSKAALTDWLRAKASFVIEGLKEADDKDEFCRCELKLQKWYGDLRGKPFAIEAENSILDISGFSKQYNCAFIWQKDGVKKLNLYLIINYFKGGKLRFKKIKPEAFEANRFYTVINKKSGEIVPMEVNFNFDDPNLIILPLAFGKRQGREFIWNDLLSLETGSLKLANGRVIEKTLYNRRTRQDEPALFVALTFERREVLDSSNIKPMNLIGVDRGENIPAVIALTDPEGCPLSRFKDSLGNPTHILRIGESYKEKQRTIQAKKEVEQRRAGGYSRKYASKAKNLADDMVRNTARDLLYYAVTQDAMLIFENLSRGFGRQGKRTFMAERQYTRMEDWLTAKLAYEGLPSKTYLSKTLAQYTSKTCSNCGFTITSADYDRVLEKLKKTATGWMTTINGKELKVEGQITYYNRYKRQNVVKDLSVELDRLSEESVNNDISSWTKGRSGEALSLLKKRFSHRPVQEKFVCLNCGFETHADEQAALNIARSWLFLRSQEYKKYQTNKTTGNTDKRAFVETWQSFYRKKLKEVWKPAV

SEQ ID NO: 41053 - protein, 979 aa, synthetic construct
  REGION 1..979: note = engineered CasX variant
QEGKRINKIRRRLVKDSNTKKAGKTGPMKTLLVRVMTPDLRERLENLRKKPENIPQPISNTSRANLNKLLTDYTEMKKAILHVYWEEFQKDPVGLMSRVAQPASKKIDQNKLKPEMDEKGNLTTAGFACSQCGQPLFVYKLEQVSEKGKAYTNYFGRCNVAEHEKLILLAQLKPEKDSDEAVTYSLGKFGQRALDFYSIHVTKESTHPVKPLAQIAGNRYASTPVGKALSDACMGTIASFLSKYQDIIIEHQKVVKGNQKRLESLRELAGKENLEYPSVTLPPQPHTKEGVDAYNEVIARVRMWVNLNLWQKLKLSRDDAKPLLRLKGFPSFPLVERQANEVDWWDMVCNVKKLINEKKEDGKVFWQNLAGYKRQEALRPYLSSEEDRKKGKKFARYQLGDLLLHLEKKHGEDWGKVYDEAWERIDKKVEGLSKHIKLEEERRSEDAQSKAALTDWLRAKASFVIEGLKEADDKDEFCRCELKLQKWYGDLRGKPFAIEAENSILDISGFSKQYNCAFIWQKDGVKKLNLYLIINYFKGGKLRFKKIKPEAFEANRFYTVINKKSGEIVPMEVNFNFDDPNLIILPLAFGKRQGREFIWNDLLSLETGSLKLANGRVIEKTLYNRRTRQDEPALFVALTFERREVLDSSNIKPMNLIGVDRGENIPAVIALTDPEGCPLSRFKDSLGNPTHILRIGESYKEKQRTIQAKKEVEQRRAGGYSRKYASKAKNLADDMVRNTARDLLYYAVTQDAMLIFENLSRGFGRQGKRTFMAERQYTRMEDWLTAKLAYEGLPSKTYLSKTLAQYTSKTCSNCGFTITSADYDRVLEKLKKTATGWMTTINGKELKVEGQITYYNRYKRQNVVKDLSVELDRLSEESVNNDISSWTKGRSGEALSLLKKRFSHRPVQEKFVCLNCGFETHADEQAALNIARSWLFLRSQEYKKYQTNKTTGNTDKRAFVETWQSFYRKKLKEVWKPAV

SEQ ID NO: 41054 - protein, 979 aa, synthetic construct
  REGION 1..979: note = engineered CasX variant
QEGKRINKIRRRLVKDSNTKKAGKTGPMKTLLVRVMTPDLRERLENLRKKPENIPQPISNTSRANLNKLLTDYTEMKKAILHVYWEEFQKDPVGLMSRVAQPASKKIDQNKLKPEMDEKGNLTTAGFACSQCGQPLFVYKLEQVSEKGKAYTNYFGRCNVAEHEKLILLAQLKPEKDSDEAVTYSLGKFGQRALDFYSIHVTKESTHPVKPLAQIAGNRYASAPVGKALSDACMGTIASFLSKYQDIIIEHQKVVKGNQKRLESLRELAGKENLEYPSVTLPPQPHTKEGVDAYNEVIARVRMWVNLNLWQKLKLSRDDAKPLLRLKGFPSFPLVERQANEVDWWDMVCNVKKLINEKKEDGKVFWQNLAGYKRQEALRPYLSSEEDRKKGKKFARYQLGDLLLHLEKKHGEDWGKVYDEAWERIDKKVEGLSKHIKLEEERRSEDAQSKAALTDWLRAKASFVIEGLKEADDKDEFCRCELKLQKWYGDLRGKPFAIEAENSILDISGFSKQYNCAFIWQKDGVKKLNLYLIINYFKGGKLRFKKIKPEAFEANRFYTVINKKSGEIVPMEVNFNFDDPNLIILPLAFGKRQGREFIWNDLLSLETGSLKLANGRVIEKTLYNRRTRQDEPALFVALTFERREVLDSSNIKPMNLIGVDRGENIPAVIALTDPEGCPLSRFKDSLGNPTHILRIGESYKEKQRTIQAKKEVEQRRAGGYSRKYASKAKNLADDMVRNTARDLLYYAVTQDAMLIFENLSRGFGRQGKRTFMAERQYTRMEDWLTAKLAYEGLPSKTYLSKTLAQYTSKTCSNCGFTITSADYDRVLEKLKKTATGWMTTINGKELKVEGQITYYNRYKRQNVVKDLSVELDRLSEESVNNDISSWTKGRSGEALSLLKKRFSHRPVQEKFVCLNCGFETHADEQAALNIARSWLFLRSQEYKKYQTNKTTGNTDKRAFVETWQSFYRKKLKEVWKPAV

SEQ ID NO: 41055 - protein, 979 aa, synthetic construct
  REGION 1..979: note = engineered CasX variant
QEGKRINKIRRRLVKDSNTKKAGKTGPMKTLLVRVMTPDLRERLENLRKKPENIPQPISNTSRANLNKLLTDYTEMKKAILHVYWEEFQKDPVGLMSRVAQPASKKIDQNKLKPEMDEKGNLTTAGFACSQCGQPLFVYKLEQVSEKGKAYTNYFGRCNVAEHEKLILLAQLKPEKDSDEAVTYSLGKFGQRALDFYSIHVTKESTHPVKPLAQIAGNRYASVPVGKALSDACMGTIASFLSKYQDIIIEHQKVVKGNQKRLESLRELAGKENLEYPSVTLPPQPHTKEGVDAYNEVIARVRMWVNLNLWQKLKLSRDDAKPLLRLKGFPSFPLVERQANEVDWWDMVCNVKKLINEKKEDGKVFWQNLAGYKRQEALRPYLSSEEDRKKGKKFARYQLGDLLLHLEKKHGEDWGKVYDEAWERIDKKVEGLSKHIKLEEERRSEDAQSKAALTDWLRAKASFVIEGLKEADDKDEFCRCELKLQKWYGDLRGKPFAIEAENSILDISGFSKQYNCAFIWQKDGVKKLNLYLIINYFKGGKLRFKKIKPEAFEANRFYTVINKKSGEIVPMEVNFNFDDPNLIILPLAFGKRQGREFIWNDLLSLETGSLKLANGRVIEKTLYNRRTRQDEPALFVALTFERREVLDSSNIKPMNLIGVDRGENIPAVIALTDPEGCPLSRFKDSLGNPTHILRIGESYKEKQRTIQAKKEVEQRRAGGYSRKYASKAKNLADDMVRNTARDLLYYAVTQDAMLIFENLSRGFGRQGKRTFMAERQYTRMEDWLTAKLAYEGLPSKTYLSKTLAQYTSKTCSNCGFTITSADYDRVLEKLKKTATGWMTTINGKELKVEGQITYYNRYKRQNVVKDLSVELDRLSEESVNNDISSWTKGRSGEALSLLKKRFSHRPVQEKFVCLNCGFETHADEQAALNIARSWLFLRSQEYKKYQTNKTTGNTDKRAFVETWQSFYRKKLKEVWKPAV

SEQ ID NO: 41056 - protein, 979 aa, synthetic construct
  REGION 1..979: note = engineered CasX variant
QEGKRINKIRRRLVKDSNTKKAGKTGPMKTLLVRVMTPDLRERLENLRKKPENIPQPISNTSRANLNKLLTDYTEMKKAILHVYWEEFQKDPVGLMSRVAQPASKKIDQNKLKPEMDEKGNLTTAGFACSQCGQPLFVYKLEQVSEKGKAYTNYFGRCNVAEHEKLIKLAQLKPEKDSDEAVTYSLGKFGQRALDFYSIHVTKESTHPVKPLAQIAGNRYASGPVGKALSDACMGTIASFLSKYQDIIIEHQKVVKGNQKRLESLRELAGKENLEYPSVTLPPQPHTKEGVDAYNEVIARVRMWVNLNLWQKLKLSRDDAKPLLRLKGFPSFPLVERQANEVDWWDMVCNVKKLINEKKEDGKVFWQNLAGYKRQEALRPYLSSEEDRKKGKKFARYQLGDLLLHLEKKHGEDWGKVYDEAWERIDKKVEGLSKHIKLEEERRSEDAQSKAALTDWLRAKASFVIEGLKEADDKDEFCRCELKLQKWYGDLRGKPFAIEAENSILDISGFSKQYNCAFIWQKDGVKKLNLYLIINYFKGGKLRFKKIKPEAFEANRFYTVINKKSGEIVPMEVNFNFDDPNLIILPLAFGKRQGREFIWNDLLSLETGSLKLANGRVIEKTLYNRRTRQDEPALFVALTFERREVLDSSNIKPMNLIGVDRGENIPAVIALTDPEGCPLSRFKDSLGNPTHILRIGESYKEKQRTIQAKKEVEQRRAGGYSRKYASKAKNLADDMVRNTARDLLYYAVTQDAMLIFENLSRGFGRQGKRTFMAERQYTRMEDWLTAKLAYEGLPSKTYLSKTLAQYTSKTCSNCGFTITSADYDRVLEKLKKTATGWMTTINGKELKVEGQITYYNRYKRQNVVKDLSVELDRLSEESVNNDISSWTKGRSGEALSLLKKRFSHRPVQEKFVCLNCGFETHADEQAALNIARSWLFLRSQEYKKYQTNKTTGNTDKRAFVETWQSFYRKKLKEVWKPAV

SEQ ID NO: 41057 - protein, 978 aa, synthetic construct
  REGION 1..978: note = engineered CasX variant
QEGKRINKIRRRLVKDSNTKKAGKTGPMKTLLVRVMTPDLRERLENLRKKPENIPQPISNTSRANLNKLLTDYTEMKKAILHVYWEEFQKDPVGLMSRVAQPASKKIDQNKLKPEMDEKGNLTTAGFACSQCGQPLFVYKLEQVSEKGKAYTNYFGRCNVAEHEKLILLAQLKPEKDSDEAVTYSLGKFGQRALDFYSIHVTKESTHPVKPLAQIAGNRYASPVGKALSDACMGTIASFLSKYQDIIIEHQKVVKGNQKRLESLRELAGKENLEYPSVTLPPQPHTKEGVDAYNEVIARVRMWVNLNLWQKLKLSRDDAKPLLRLKGFPSFPLVERQANEVDWWDMVCNVKKLINEKKEDGKVFWQNLAGYKRQEALRPYLSSEEDRKKGKKFARYQLGDLLLHLEKKHGEDWGKVYDEAWERIDKKVEGLSKHIKLEEERRSEDAQSKAALTDWLRAKASFVIEGLKEADDKDEFCRCELKLQKWYGDLRGKPFAIEAENSILDISGFSKQYNCAFIWQKDGVKKLNLYLIINYFKGGKLRFKKIKPEAFEANRFYTVINKKSGEIVPMEVNFNFDDPNLIILPLAFGKRQGREFIWNDLLSLETGSLKLANGRVIEKTLYNRRTRQDEPALFVALTFERREVLDSSNIKPMNLIGVDRGENIPAVIALTDPEGCPLSRFKDSLGNPTHILRIGESYKEKQRTIQAKKEVEQRRAGGYSRKYASKAKNLADDMVRNTARDLLYYAVTQDAMLIFENLSRGFGRQGKRTFMAERQYTRMEDWLTAKLAYEGLPSKTYLSKTLAQYTSKTCSNCGFTITSADYDRVLEKLKKTATGWMTTINGKELKVEGQITYYNRYKRQNVVKDLSVELDRLSEESVNNDISSWTKGRSGEALSLLKKRFSHRPVQEKFVCLNCGFETHADEQAALNIARSWLFLRSQEYKKYQTNKTTGNTDKRAFVETWQSFYRKKLKEVWKPAV

SEQ ID NO: 41058 - protein, 979 aa, synthetic construct
  REGION 1..979: note = engineered CasX variant
QEGKRINKIRRRLVKDSNTKKAGKTGPMKTLLVRVMTPDLRERLENLRKKPENIPQPISNTSRANLNKLLTDYTEMKKAILHVYWEEFQKDPVGLMSRVAQPASKKIDQNKLKPEMDEKGNLTTAGFACSQCGQPLFVYKLEQVSEKGKAYTNYFGRCNVAEHEKLILLAQLKPEKDSDEAVTYSLGKFGQRALDFYSIHVTKESTHPVKPLAQIAGNRYASYPVGKALSDACMGTIASFLSKYQDIIIEHQKVVKGNQKRLESLRELAGKENLEYPSVTLPPQPHTKEGVDAYNEVIARVRMWVNLNLWQKLKLSRDDAKPLLRLKGFPSFPLVERQANEVDWWDMVCNVKKLINEKKEDGKVFWQNLAGYKRQEALRPYLSSEEDRKKGKKFARYQLGDLLLHLEKKHGEDWGKVYDEAWERIDKKVEGLSKHIKLEEERRSEDAQSKAALTDWLRAKASFVIEGLKEADKDEFCRCELKLQKWYGDLRGKPFAIEAENSILDISGFSKQYNCAFIWQKDGVKKLNLYLIINYFKGGKLRFKKIKPEAFEANRFYTVINKKSGEIVPMEVNFNFDDPNLIILPLAFGKRQGREFIWNDLLSLETGSLKLANGRVIEKTLYNRRTRQDEPALFVALTFERREVLDSSNIKPMNLIGVDRGENIPAVIALTDPEGCPLSRFKDSLGNPTHILRIGESYKEKQRTIQAKKEVEQRRAGGYSRKYASKAKNLADDMVRNTARDLLYYAVTQDAMLIFENLSRGFGRQGKRTFMAERQYTRMEDWLTAKLAYEGLPSKTYLSKTLAQYTSKTCSNCGFTITSADYDRVLEKLKKTATGWMTTINGKELKVEGQITYYNRYKRQNVVKDLSVELDRLSEESVNNDISSWTKGRSGNEALSLLKKRFSHRPVQEKFVCLNCGFETHADEQAALNIARSWLFLRSQEYKKYQTNKTTGNTDKRAFVETWQSFYRKKLKEVWKPAV

SEQ ID NO: 41059 - protein, 979 aa, synthetic construct
  REGION 1..979: note = engineered CasX variant
QEGKRINKIRRRLVKDSNTKKAGKTGPMKTLLVRVMTPDLRERLENLRKKPENIPQPISNTSRANLNKLLTDYTEMKKAILHVYWEEFQKDPVGLMSRVAQPASKKIDQNKLKPEMDEKGNLTTAGFACSQCGQPLFVYKLEQVSEKGKAYTNYFGRCNVAEHEKLILLAQLKPEKDSDEAVTYSLGKFGQRALDFYSIHVTKESTHPVKPLAQIAGNRYASHPVGKALSDACMGTIASFLSKYQDIIIEHQKVVKGNQKRLESLRELAGKENLEYPSVTLPPQPHTKEGVDAYNEVIARVRMWVNLNLWQKLKLSRDDAKPLLRLKGFPSFPLVERQANEVDWWDMVCNVKKLINEKKEDGKVFWQNLAGYKRQEALRPYLSSEEDRKKGKKFARYQLGDLLLHLEKKHGEDWGKVYDEAWERIDKKVEGLSKHIKLEEERRSEDAQSKAALTDWLRAKASFVIEGLKEADKDEFCRCELKLQKWYGDLRGKPFAIEAENSILDISGFSKQYNCAFIWQKDGVKKLNLYLIINYFKGGKLRFKKIKPEAFEANRFYTVINKKSGEIVPMEVNFNFDDPNLIILPLAFGKRQGREFIWNDLLSLETGSLKLANGRVIEKTLYNRRTRQDEPALFVALTFERREVLDSSNIKPMNLIGVDRGENIPAVIALTDPEGCPLSRFKDSLGNPTHILRIGESYKEKQRTIQAKKEVEQRRAGGYSRKYASKAKNLADDMVRNTARDLLYYAVTQDAMLIFENLSRGFGRQGKRTFMAERQYTRMEDWLTAKLAYEGLPSKTYLSKTLAQYTSKTCSNCGFTITSADYDRVLEKLKKTATGWMTTINGKELKVEGQITYYNRYKRQNVVKDLSVELDRLSEESVNNDISSWTKGRSGNEALSLLKKRFSHRPVQEKFVCLNCGFETHADEQAALNIARSWLFLRSQEYKKYQTNKTTGNTDKRAFVETWQSFYRKKLKEVWKPAV

SEQ ID NO: 41060 - protein, 979 aa, synthetic construct
  REGION 1..979: note = engineered CasX variant
QEGKRINKIRRRLVKDSNTKKAGKTGPMKTLLVRVMTPDLRERLENLRKKPENIPQPISNTSRANLNKLLTDYTEMKKAILHVYWEEFQKDPVGLMSRVAQPASKKIDQNKLKPEMDEKGNLTTAGFACSQCGQPLFVYKLEQVSEKGKAYTNYFGRCNVAEHEKLILLAQLKPEKDSDEAVTYSLGKFGQRALDFYSIHVTKESTHPVKPLAQIAGNRYASSPVGKALSDACMGTIASFLSKYQDIIIEHQKVVKGNQKRLESLRELAGKENLEYPSVTLPPQPHTKEGVDAYNEVIARVRMWVNLNLWQKLKLSRDDAKPLLRLKGFPSFPLVERQANEVDWWDMVCNVKKLINEKKEDGKVFWQNLAGYKRQEALRPYLSSEEDRKKGKKFARYQLGDLLLHLEKKHGEDWGKVYDEAWERIDKKVEGLSKHIKLEEERRSEDAQSKAALTDWLRAKASFVIEGLKEADKDEFCRCELKLQKWYGDLRGKPFAIEAENSILDISGFSKQYNCAFIWQKDGVKKLNLYLIINYFKGGKLRFKKIKPEAFEANRFYTVINKKSGEIVPMEVNFNFDDPNLIILPLAFGKRQGREFIWNDLLSLETGSLKLANGRVIEKTLYNRRTRQDEPALFVALTFERREVLDSSNIKPMNLIGVDRGENIPAVIALTDPEGCPLSRFKDSLGNPTHILRIGESYKEKQRTIQAKKEVEQRRAGGYSRKYASKAKNLADDMVRNTARDLLYYAVTQDAMLIFENLSRGFGRQGKRTFMAERQYTRMEDWLTAKLAYEGLPSKTYLSKTLAQYTSKTCSNCGFTITSADYDRVLEKLKKTATGWMTTINGKELKVEGQITYYNRYKRQNVVKDLSVELDRLSEESVNNDISSWTKGRSGNEALSLLKKRFSHRPVQEKFVCLNCGFETHADEQAALNIARSWLFLRSQEYKKYQTNKTTGNTDKRAFVETWQSFYRKKLKEVWKPAV

SEQ ID NO: 41061 - protein, 979 aa, synthetic construct
  REGION 1..979: note = engineered CasX variant
QEGKRINKIRRRLVKDSNTKKAGKTGPMKTLLVRVMTPDLRERLENLRKKPENIPQPISNTSRANLNKLLTDYTEMKKAILHVYWEEFQKDPVGLMSRVAQPASKKIDQNKLKPEMDEKGNLTTAGFACSQCGQPLFVYKLEQVSEKGKAYTNYFGRCNVAEHEKLILLAQLKPEKDSDEAVTYSLGKFGQRALDFYSIHVTKESTHPVKPLAQIAGNRYASTPVGKALSDACMGTIASFLSKYQDIIIEHQKVVKGNQKRLESLRELAGKENLEYPSVTLPPQPHTKEGVDAYNEVIARVRMWVNLNLWQKLKLSRDDAKPLLRLKGFPSFPLVERQANEVDWWDMVCNVKKLINEKKEDGKVFWQNLAGYKRQEALRPYLSSEEDRKKGKKFARYQLGDLLLHLEKKHGEDWGKVYDEAWERIDKKVEGLSKHIKLEEERRSEDAQSKAALTDWLRAKASFVIEGLKEADKDEFCRCELKLQKWYGDLRGKPFAIEAENSILDISGFSKQYNCAFIWQKDGVKKLNLYLIINYFKGGKLRFKKIKPEAFEANRFYTVINKKSGEIVPMEVNFNFDDPNLIILPLAFGKRQGREFIWNDLLSLETGSLKLANGRVIEKTLYNRRTRQDEPALFVALTFERREVLDSSNIKPMNLIGVDRGENIPAVIALTDPEGCPLSRFKDSLGNPTHILRIGESYKEKQRTIQAKKEVEQRRAGGYSRKYASKAKNLADDMVRNTARDLLYYAVTQDAMLIFENLSRGFGRQGKRTFMAERQYTRMEDWLTAKLAYEGLPSKTYLSKTLAQYTSKTCSNCGFTITSADYDRVLEKLKKTATGWMTTINGKELKVEGQITYYNRYKRQNVVKDLSVELDRLSEESVNNDISSWTKGRSGNEALSLLKKRFSHRPVQEKFVCLNCGFETHADEQAALNIARSWLFLRSQEYKKYQTNKTTGNTDKRAFVETWQSFYRKKLKEVWKPAV

SEQ ID NO: 41062 - protein, 979 aa, synthetic construct
  REGION 1..979: note = engineered CasX variant
QEGKRINKIRRRLVKDSNTKKAGKTGPMKTLLVRVMTPDLRERLENLRKKPENIPQPISNTSRANLNKLLTDYTEMKKAILHVYWEEFQKDPVGLMSRVAQPASKKIDQNKLKPEMDEKGNLTTAGFACSQCGQPLFVYKLEQVSEKGKAYTNYFGRCNVAEHEKLILLAQLKPEKDSDEAVTYSLGKFGQRALDFYSIHVTKESTHPVKPLAQIAGNRYASAPVGKALSDACMGTIASFLSKYQDIIIEHQKVVKGNQKRLESLRELAGKENLEYPSVTLPPQPHTKEGVDAYNEVIARVRMWVNLNLWQKLKLSRDDAKPLLRLKGFPSFPLVERQANEVDWWDMVCNVKKLINEKKEDGKVFWQNLAGYKRQEALRPYLSSEEDRKKGKKFARYQLGDLLLHLEKKHGEDWGKVYDEAWERIDKKVEGLSKHIKLEEERRSEDAQSKAALTDWLRAKASFVIEGLKEADKDEFCRCELKLQKWYGDLRGKPFAIEAENSILDISGFSKQYNCAFIWQKDGVKKLNLYLIINYFKGGKLRFKKIKPEAFEANRFYTVINKKSGEIVPMEVNFNFDDPNLIILPLAFGKRQGREFIWNDLLSLETGSLKLANGRVIEKTLYNRRTRQDEPALFVALTFERREVLDSSNIKPMNLIGVDRGENIPAVIALTDPEGCPLSRFKDSLGNPTHILRIGESYKEKQRTIQAKKEVEQRRAGGYSRKYASKAKNLADDMVRNTARDLLYYAVTQDAMLIFENLSRGFGRQGKRTFMAERQYTRMEDWLTAKLAYEGLPSKTYLSKTLAQYTSKTCSNCGFTITSADYDRVLEKLKKTATGWMTTINGKELKVEGQITYYNRYKRQNVVKDLSVELDRLSEESVNNDISSWTKGRSGNEALSLLKKRFSHRPVQEKFVCLNCGFETHADEQAALNIARSWLFLRSQEYKKYQTNKTTGNTDKRAFVETWQSFYRKKLKEVWKPAV

SEQ ID NO: 41063 - protein, 979 aa, synthetic construct
  REGION 1..979: note = engineered CasX variant
QEGKRINKIRRRLVKDSNTKKAGKTGPMKTLLVRVMTPDLRERLENLRKKPENIPQPISNTSRANLNKLLTDYTEMKKAILHVYWEEFQKDPVGLMSRVAQPASKKIDQNKLKPEMDEKGNLTTAGFACSQCGQPLFVYKLEQVSEKGKAYTNYFGRCNVAEHEKLILLAQLKPEKDSDEAVTYSLGKFGQRALDFYSIHVTKESTHPVKPLAQIAGNRYASVPVGKALSDACMGTIASFLSKYQDIIIEHQKVVKGNQKRLESLRELAGKENLEYPSVTLPPQPHTKEGVDAYNEVIARVRMWVNLNLWQKLKLSRDDAKPLLRLKGFPSFPLVERQANEVDWWDMVCNVKKLINEKKEDGKVFWQNLAGYKRQEALRPYLSSEEDRKKGKKFARYQLGDLLLHLEKKHGEDWGKVYDEAWERIDKKVEGLSKHIKLEEERRSEDAQSKAALTDWLRAKASFVIEGLKEADKDEFCRCELKLQKWYGDLRGKPFAIEAENSILDISGFSKQYNCAFIWQKDGVKKLNLYLIINYFKGGKLRFKKIKPEAFEANRFYTVINKKSGEIVPMEVNFNFDDPNLIILPLAFGKRQGREFIWNDLLSLETGSLKLANGRVIEKTLYNRRTRQDEPALFVALTFERREVLDSSNIKPMNLIGVDRGENIPAVIALTDPEGCPLSRFKDSLGNPTHILRIGESYKEKQRTIQAKKEVEQRRAGGYSRKYASKAKNLADDMVRNTARDLLYYAVTQDAMLIFENLSRGFGRQGKRTFMAERQYTRMEDWLTAKLAYEGLPSKTYLSKTLAQYTSKTCSNCGFTITSADYDRVLEKLKKTATGWMTTINGKELKVEGQITYYNRYKRQNVVKDLSVELDRLSEESVNNDISSWTKGRSGNEALSLLKKRFSHRPVQEKFVCLNCGFETHADEQAALNIARSWLFLRSQEYKKYQTNKTTGNTDKRAFVETWQSFYRKKLKEVWKPAV

SEQ ID NO: 41064 - protein, 979 aa, synthetic construct
  REGION 1..979: note = engineered CasX variant
QEGKRINKIRRRLVKDSNTKKAGKTGPMKTLLVRVMTPDLRERLENLRKKPENIPQPISNTSRANLNKLLTDYTEMKKAILHVYWEEFQKDPVGLMSRVAQPASKKIDQNKLKPEMDEKGNLTTAGFACSQCGQPLFVYKLEQVSEKGKAYTNYFGRCNVAEHEKLIKLAQLKPEKDSDEAVTYSLGKFGQRALDFYSIHVTKESTHPVKPLAQIAGNRYASGPVGKALSDACMGTIASFLSKYQDIIIEHQKVVKGNQKRLESLRELAGKENLEYPSVTLPPQPHTKEGVDAYNEVIARVRMWVNLNLWQKLKLSRDDAKPLLRLKGFPSFPLVERQANEVDWWDMVCNVKKLINEKKEDGKVFWQNLAGYKRQEALRPYLSSEEDRKKGKKFARYQLGDLLLHLEKKHGEDWGKVYDEAWERIDKKVEGLSKHIKLEEERRSEDAQSKAALTDWLRAKASFVIEGLKEADKDEFCRCELKLQKWYGDLRGKPFAIEAENSILDISGFSKQYNCAFIWQKDGVKKLNLYLIINYFKGGKLRFKKIKPEAFEANRFYTVINKKSGEIVPMEVNFNFDDPNLIILPLAFGKRQGREFIWNDLLSLETGSLKLANGRVIEKTLYNRRTRQDEPALFVALTFERREVLDSSNIKPMNLIGVDRGENIPAVIALTDPEGCPLSRFKDSLGNPTHILRIGESYKEKQRTIQAKKEVEQRRAGGYSRKYASKAKNLADDMVRNTARDLLYYAVTQDAMLIFENLSRGFGRQGKRTFMAERQYTRMEDWLTAKLAYEGLPSKTYLSKTLAQYTSKTCSNCGFTITSADYDRVLEKLKKTATGWMTTINGKELKVEGQITYYNRYKRQNVVKDLSVELDRLSEESVNNDISSWTKGRSGNEALSLLKKRFSHRPVQEKFVCLNCGFETHADEQAALNIARSWLFLRSQEYKKYQTNKTTGNTDKRAFVETWQSFYRKKLKEVWKPAV

SEQ ID NO: 41065 - protein, 978 aa, synthetic construct
  REGION 1..978: note = engineered CasX variant
QEGKRINKIRRRLVKDSNTKKAGKTGPMKTLLVRVMTPDLRERLENLRKKPENIPQPISNTSRANLNKLLTDYTEMKKAILHVYWEEFQKDPVGLMSRVAQPASKKIDQNKLKPEMDEKGNLTTAGFACSQCGQPLFVYKLEQVSEKGKAYTNYFGRCNVAEHEKLILLAQLKPEKDSDEAVTYSLGKFGQRALDFYSIHVTKESTHPVKPLAQIAGNRYASPVGKALSDACMGTIASFLSKYQDIIIEHQKVVKGNQKRLESLRELAGKENLEYPSVTLPPQPHTKEGVDAYNEVIARVRMWVNLNLWQKLKLSRDDAKPLLRLKGFPSFPLVERQANEVDWWDMVCNVKKLINEKKEDGKVFWQNLAGYKRQEALRPYLSSEEDRKKGKKFARYQLGDLLLHLEKKHGEDWGKVYDEAWERIDKKVEGLSKHIKLEEERRSEDAQSKAALTDWLRAKASFVIEGLKEADKDEFCRCELKLQKWYGDLRGKPFAIEAENSILDISGFSKQYNCAFIWQKDGVKKLNLYLIINYFKGGKLRFKKIKPEAFEANRFYTVINKKSGEIVPMEVNFNFDDPNLIILPLAFGKRQGREFIWNDLLSLETGSLKLANGRVIEKTLYNRRTRQDEPALFVALTFERREVLDSSNIKPMNLIGVDRGENIPAVIALTDPEGCPLSRFKDSLGNPTHILRIGESYKEKQRTIQAKKEVEQRRAGGYSRKYASKAKNLADDMVRNTARDLLYYAVTQDAMLIFENLSRGFGRQGKRTFMAERQYTRMEDWLTAKLAYEGLPSKTYLSKTLAQYTSKTCSNCGFTITSADYDRVLEKLKKTATGWMTTINGKELKVEGQITYYNRYKRQNVVKDLSVELDRLSEESVNNDISSWTKGRSGNEALSLLKKRFSHRPVQEKFVCLNCGFETHADEQAALNIARSWLFLRSQEYKKYQTNKTTGNTDKRAFVETWQSFYRKKLKEVWKPAV

SEQ ID NO: 41066 - protein, 978 aa, synthetic construct
  REGION 1..978: note = engineered CasX variant
QEGKRINKIRRRLVKDSNTKKAGKTGPMKTLLVRVMTPDLRERLENLRKKPENIPQPISNTSRANLNKLLTDYTEMKKAILHVYWEEFQKDPVGLMSRVAQPASKKIDQNKLKPEMDEKGNLTTAGFACSQCGQPLFVYKLEQVSEKGKAYTNYFGRCNVAEHEKLILLAQLKPEKDSDEAVTYSLGKFGQRALDFYSIHVTKESTHPVKPLAQIAGNRYASYPVGKALSDACMGTIASFLSKYQDIIIEHQKVVKGNQKRLESLRELAGKENLEYPSVTLPPQPHTKEGVDAYNEVIARVRMWVNLNLWQKLKLSRDDAKPLLRLKGFPSFPLVERQANEVDWWDMVCNVKKLINEKKEDGKVFWQNLAGYKRQEALRPYLSSEEDRQKGKKFARYQLGDLLLHLEKKHGEDWGKVYDEAWERIDKKVEGLSKHIKLEEERRSEDAQSKAALTDWLRAKASFVIEGLKEADKDEFCRCELKLQKWYGDLRGKPFAIEAENSILDISGFSKQYNCAFIWQKDGVKKLNLYLIINYFKGGKLRFKKIKPEAFEANRFYTVINKKSGEIVPMEVNFNFDDPNLIILPLAFGKRQGREFIWNDLLSLETGSLKLANGRVIEKTLYNRRTRQDEPALFVALTFERREVLDSSNIKPMNLIGVDRGENIPAVIALTDPEGCPLSRFKDSLGNPTHILRIGESYKEKQRTIQAKKEVEQRRAGGYSRKYASKAKNLADDMVRNTARDLLYYAVTQDAMLIFENLSRGFGRQGKRTFMAERQYTRMEDWLTAKLAYEGLPSKTYLSKTLAQYTSKTCSNCGFTITSADYDRVLEKLKKTATGWMTTINGKELKVEGQITYYNRYKRQNVVKDLSVELDRLSEESVNNDISSWTKGRSGEALSLLKKRFSHRPVQEKFVCLNCGFETHADEQAALNIARSWLFLRSQEYKKYQTNKTTGNTDKRAFVETWQSFYRKKLKEVWKPAV

SEQ ID NO: 41067 - protein, 978 aa, synthetic construct
  REGION 1..978: note = engineered CasX variant
QEGKRINKIRRRLVKDSNTKKAGKTGPMKTLLVRVMTPDLRERLENLRKKPENIPQPISNTSRANLNKLLTDYTEMKKAILHVYWEEFQKDPVGLMSRVAQPASKKIDQNKLKPEMDEKGNLTTAGFACSQCGQPLFVYKLEQVSEKGKAYTNYFGRCNVAEHEKLILLAQLKPEKDSDEAVTYSLGKFGQRALDFYSIHVTKESTHPVKPLAQIAGNRYASHPVGKALSDACMGTIASFLSKYQDIIIEHQKVVKGNQKRLESLRELAGKENLEYPSVTLPPQPHTKEGVDAYNEVIARVRMWVNLNLWQKLKLSRDDAKPLLRLKGFPSFPLVERQANEVDWWDMVCNVKKLINEKKEDGKVFWQNLAGYKRQEALRPYLSSEEDRQKGKKFARYQLGDLLLHLEKKHGEDWGKVYDEAWERIDKKVEGLSKHIKLEEERRSEDAQSKAALTDWLRAKASFVIEGLKEADKDEFCRCELKLQKWYGDLRGKPFAIEAENSILDISGFSKQYNCAFIWQKDGVKKLNLYLIINYFKGGKLRFKKIKPEAFEANRFYTVINKKSGEIVPMEVNFNFDDPNLIILPLAFGKRQGREFIWNDLLSLETGSLKLANGRVIEKTLYNRRTRQDEPALFVALTFERREVLDSSNIKPMNLIGVDRGENIPAVIALTDPEGCPLSRFKDSLGNPTHILRIGESYKEKQRTIQAKKEVEQRRAGGYSRKYASKAKNLADDMVRNTARDLLYYAVTQDAMLIFENLSRGFGRQGKRTFMAERQYTRMEDWLTAKLAYEGLPSKTYLSKTLAQYTSKTCSNCGFTITSADYDRVLEKLKKTATGWMTTINGKELKVEGQITYYNRYKRQNVVKDLSVELDRLSEESVNNDISSWTKGRSGEALSLLKKRFSHRPVQEKFVCLNCGFETHADEQAALNIARSWLFLRSQEYKKYQTNKTTGNTDKRAFVETWQSFYRKKLKEVWKPAV

SEQ ID NO: 41068 - protein, 978 aa, synthetic construct
  REGION 1..978: note = engineered CasX variant
QEGKRINKIRRRLVKDSNTKKAGKTGPMKTLLVRVMTPDLRERLENLRKKPENIPQPISNTSRANLNKLLTDYTEMKKAILHVYWEEFQKDPVGLMSRVAQPASKKIDQNKLKPEMDEKGNLTTAGFACSQCGQPLFVYKLEQVSEKGKAYTNYFGRCNVAEHEKLILLAQLKPEKDSDEAVTYSLGKFGQRALDFYSIHVTKESTHPVKPLAQIAGNRYASSPVGKALSDACMGTIASFLSKYQDIIIEHQKVVKGNQKRLESLRELAGKENLEYPSVTLPPQPHTKEGVDAYNEVIARVRMWVNLNLWQKLKLSRDDAKPLLRLKGFPSFPLVERQANEVDWWDMVCNVKKLINEKKEDGKVFWQNLAGYKRQEALRPYLSSEEDRQKGKKFARYQLGDLLLHLEKKHGEDWGKVYDEAWERIDKKVEGLSKHIKLEEERRSEDAQSKAALTDWLRAKASFVIEGLKEADKDEFCRCELKLQKWYGDLRGKPFAIEAENSILDISGFSKQYNCAFIWQKDGVKKLNLYLIINYFKGGKLRFKKIKPEAFEANRFYTVINKKSGEIVPMEVNFNFDDPNLIILPLAFGKRQGREFIWNDLLSLETGSLKLANGRVIEKTLYNRRTRQDEPALFVALTFERREVLDSSNIKPMNLIGVDRGENIPAVIALTDPEGCPLSRFKDSLGNPTHILRIGESYKEKQRTIQAKKEVEQRRAGGYSRKYASKAKNLADDMVRNTARDLLYYAVTQDAMLIFENLSRGFGRQGKRTFMAERQYTRMEDWLTAKLAYEGLPSKTYLSKTLAQYTSKTCSNCGFTITSADYDRVLEKLKKTATGWMTTINGKELKVEGQITYYNRYKRQNVVKDLSVELDRLSEESVNNDISSWTKGRSGEALSLLKKRFSHRPVQEKFVCLNCGFETHADEQAALNIARSWLFLRSQEYKKYQTNKTTGNTDKRAFVETWQSFYRKKLKEVWKPAV

SEQ ID NO: 41069 - protein, 978 aa, synthetic construct
  REGION 1..978: note = engineered CasX variant
QEGKRINKIRRRLVKDSNTKKAGKTGPMKTLLVRVMTPDLRERLENLRKKPENIPQPISNTSRANLNKLLTDYTEMKKAILHVYWEEFQKDPVGLMSRVAQPASKKIDQNKLKPEMDEKGNLTTAGFACSQCGQPLFVYKLEQVSEKGKAYTNYFGRCNVAEHEKLILLAQLKPEKDSDEAVTYSLGKFGQRALDFYSIHVTKESTHPVKPLAQIAGNRYASTPVGKALSDACMGTIASFLSKYQDIIIEHQKVVKGNQKRLESLRELAGKENLEYPSVTLPPQPHTKEGVDAYNEVIARVRMWVNLNLWQKLKLSRDDAKPLLRLKGFPSFPLVERQANEVDWWDMVCNVKKLINEKKEDGKVFWQNLAGYKRQEALRPYLSSEEDRQKGKKFARYQLGDLLLHLEKKHGEDWGKVYDEAWERIDKKVEGLSKHIKLEEERRSEDAQSKAALTDWLRAKASFVIEGLKEADKDEFCRCELKLQKWYGDLRGKPFAIEAENSILDISGFSKQYNCAFIWQKDGVKKLNLYLIINYFKGGKLRFKKIKPEAFEANRFYTVINKKSGEIVPMEVNFNFDDPNLIILPLAFGKRQGREFIWNDLLSLETGSLKLANGRVIEKTLYNRRTRQDEPALFVALTFERREVLDSSNIKPMNLIGVDRGENIPAVIALTDPEGCPLSRFKDSLGNPTHILRIGESYKEKQRTIQAKKEVEQRRAGGYSRKYASKAKNLADDMVRNTARDLLYYAVTQDAMLIFENLSRGFGRQGKRTFMAERQYTRMEDWLTAKLAYEGLPSKTYLSKTLAQYTSKTCSNCGFTITSADYDRVLEKLKKTATGWMTTINGKELKVEGQITYYNRYKRQNVVKDLSVELDRLSEESVNNDISSWTKGRSGEALSLLKKRFSHRPVQEKFVCLNCGFETHADEQAALNIARSWLFLRSQEYKKYQTNKTTGNTDKRAFVETWQSFYRKKLKEVWKPAV

SEQ ID NO: 41070 - protein, 978 aa, synthetic construct
  REGION 1..978: note = engineered CasX variant
QEGKRINKIRRRLVKDSNTKKAGKTGPMKTLLVRVMTPDLRERLENLRKKPENIPQPISNTSRANLNKLLTDYTEMKKAILHVYWEEFQKDPVGLMSRVAQPASKKIDQNKLKPEMDEKGNLTTAGFACSQCGQPLFVYKLEQVSEKGKAYTNYFGRCNVAEHEKLILLAQLKPEKDSDEAVTYSLGKFGQRALDFYSIHVTKESTHPVKPLAQIAGNRYASAPVGKALSDACMGTIASFLSKYQDIIIEHQKVVKGNQKRLESLRELAGKENLEYPSVTLPPQPHTKEGVDAYNEVIARVRMWVNLNLWQKLKLSRDDAKPLLRLKGFPSFPLVERQANEVDWWDMVCNVKKLINEKKEDGKVFWQNLAGYKRQEALRPYLSSEEDRQKGKKFARYQLGDLLLHLEKKHGEDWGKVYDEAWERIDKKVEGLSKHIKLEEERRSEDAQSKAALTDWLRAKASFVIEGLKEADKDEFCRCELKLQKWYGDLRGKPFAIEAENSILDISGFSKQYNCAFIWQKDGVKKLNLYLIINYFKGGKLRFKKIKPEAFEANRFYTVINKKSGEIVPMEVNFNFDDPNLIILPLAFGKRQGREFIWNDLLSLETGSLKLANGRVIEKTLYNRRTRQDEPALFVALTFERREVLDSSNIKPMNLIGVDRGENIPAVIALTDPEGCPLSRFKDSLGNPTHILRIGESYKEKQRTIQAKKEVEQRRAGGYSRKYASKAKNLADDMVRNTARDLLYYAVTQDAMLIFENLSRGFGRQGKRTFMAERQYTRMEDWLTAKLAYEGLPSKTYLSKTLAQYTSKTCSNCGFTITSADYDRVLEKLKKTATGWMTTINGKELKVEGQITYYNRYKRQNVVKDLSVELDRLSEESVNNDISSWTKGRSGEALSLLKKRFSHRPVQEKFVCLNCGFETHADEQAALNIARSWLFLRSQEYKKYQTNKTTGNTDKRAFVETWQSFYRKKLKEVWKPAV

SEQ ID NO: 41071 - protein, 978 aa, synthetic construct
  REGION 1..978: note = engineered CasX variant
QEGKRINKIRRRLVKDSNTKKAGKTGPMKTLLVRVMTPDLRERLENLRKKPENIPQPISNTSRANLNKLLTDYTEMKKAILHVYWEEFQKDPVGLMSRVAQPASKKIDQNKLKPEMDEKGNLTTAGFACSQCGQPLFVYKLEQVSEKGKAYTNYFGRCNVAEHEKLILLAQLKPEKDSDEAVTYSLGKFGQRALDFYSIHVTKESTHPVKPLAQIAGNRYASVPVGKALSDACMGTIASFLSKYQDIIIEHQKVVKGNQKRLESLRELAGKENLEYPSVTLPPQPHTKEGVDAYNEVIARVRMWVNLNLWQKLKLSRDDAKPLLRLKGFPSFPLVERQANEVDWWDMVCNVKKLINEKKEDGKVFWQNLAGYKRQEALRPYLSSEEDRQKGKKFARYQLGDLLLHLEKKHGEDWGKVYDEAWERIDKKVEGLSKHIKLEEERRSEDAQSKAALTDWLRAKASFVIEGLKEADKDEFCRCELKLQKWYGDLRGKPFAIEAENSILDISGFSKQYNCAFIWQKDGVKKLNLYLIINYFKGGKLRFKKIKPEAFEANRFYTVINKKSGEIVPMEVNFNFDDPNLIILPLAFGKRQGREFIWNDLLSLETGSLKLANGRVIEKTLYNRRTRQDEPALFVALTFERREVLDSSNIKPMNLIGVDRGENIPAVIALTDPEGCPLSRFKDSLGNPTHILRIGESYKEKQRTIQAKKEVEQRRAGGYSRKYASKAKNLADDMVRNTARDLLYYAVTQDAMLIFENLSRGFGRQGKRTFMAERQYTRMEDWLTAKLAYEGLPSKTYLSKTLAQYTSKTCSNCGFTITSADYDRVLEKLKKTATGWMTTINGKELKVEGQITYYNRYKRQNVVKDLSVELDRLSEESVNNDISSWTKGRSGEALSLLKKRFSHRPVQEKFVCLNCGFETHADEQAALNIARSWLFLRSQEYKKYQTNKTTGNTDKRAFVETWQSFYRKKLKEVWKPAV

SEQ ID NO: 41072 - protein, 978 aa, synthetic construct
  REGION 1..978: note = engineered CasX variant
QEGKRINKIRRRLVKDSNTKKAGKTGPMKTLLVRVMTPDLRERLENLRKKPENIPQPISNTSRANLNKLLTDYTEMKKAILHVYWEEFQKDPVGLMSRVAQPASKKIDQNKLKPEMDEKGNLTTAGFACSQCGQPLFVYKLEQVSEKGKAYTNYFGRCNVAEHEKLIKLAQLKPEKDSDEAVTYSLGKFGQRALDFYSIHVTKESTHPVKPLAQIAGNRYASGPVGKALSDACMGTIASFLSKYQDIIIEHQKVVKGNQKRLESLRELAGKENLEYPSVTLPPQPHTKEGVDAYNEVIARVRMWVNLNLWQKLKLSRDDAKPLLRLKGFPSFPLVERQANEVDWWDMVCNVKKLINEKKEDGKVFWQNLAGYKRQEALRPYLSSEEDRQKGKKFARYQLGDLLLHLEKKHGEDWGKVYDEAWERIDKKVEGLSKHIKLEEERRSEDAQSKAALTDWLRAKASFVIEGLKEADKDEFCRCELKLQKWYGDLRGKPFAIEAENSILDISGFSKQYNCAFIWQKDGVKKLNLYLIINYFKGGKLRFKKIKPEAFEANRFYTVINKKSGEIVPMEVNFNFDDPNLIILPLAFGKRQGREFIWNDLLSLETGSLKLANGRVIEKTLYNRRTRQDEPALFVALTFERREVLDSSNIKPMNLIGVDRGENIPAVIALTDPEGCPLSRFKDSLGNPTHILRIGESYKEKQRTIQAKKEVEQRRAGGYSRKYASKAKNLADDMVRNTARDLLYYAVTQDAMLIFENLSRGFGRQGKRTFMAERQYTRMEDWLTAKLAYEGLPSKTYLSKTLAQYTSKTCSNCGFTITSADYDRVLEKLKKTATGWMTTINGKELKVEGQITYYNRYKRQNVVKDLSVELDRLSEESVNNDISSWTKGRSGEALSLLKKRFSHRPVQEKFVCLNCGFETHADEQAALNIARSWLFLRSQEYKKYQTNKTTGNTDKRAFVETWQSFYRKKLKEVWKPAV

SEQ ID NO: 41073 - protein, 977 aa, synthetic construct
  REGION 1..977: note = engineered CasX variant
QEGKRINKIRRRLVKDSNTKKAGKTGPMKTLLVRVMTPDLRERLENLRKKPENIPQPISNTSRANLNKLLTDYTEMKKAILHVYWEEFQKDPVGLMSRVAQPASKKIDQNKLKPEMDEKGNLTTAGFACSQCGQPLFVYKLEQVSEKGKAYTNYFGRCNVAEHEKLILLAQLKPEKDSDEAVTYSLGKFGQRALDFYSIHVTKESTHPVKPLAQIAGNRYASPVGKALSDACMGTIASFLSKYQDIIIEHQKVVKGNQKRLESLRELAGKENLEYPSVTLPPQPHTKEGVDAYNEVIARVRMWVNLNLWQKLKLSRDDAKPLLRLKGFPSFPLVERQANEVDWWDMVCNVKKLINEKKEDGKVFWQNLAGYKRQEALRPYLSSEEDRQKGKKFARYQLGDLLLHLEKKHGEDWGKVYDEAWERIDKKVEGLSKHIKLEEERRSEDAQSKAALTDWLRAKASFVIEGLKEADKDEFCRCELKLQKWYGDLRGKPFAIEAENSILDISGFSKQYNCAFIWQKDGVKKLNLYLIINYFKGGKLRFKKIKPEAFEANRFYTVINKKSGEIVPMEVNFNFDDPNLIILPLAFGKRQGREFIWNDLLSLETGSLKLANGRVIEKTLYNRRTRQDEPALFVALTFERREVLDSSNIKPMNLIGVDRGENIPAVIALTDPEGCPLSRFKDSLGNPTHILRIGESYKEKQRTIQAKKEVEQRRAGGYSRKYASKAKNLADDMVRNTARDLLYYAVTQDAMLIFENLSRGFGRQGKRTFMAERQYTRMEDWLTAKLAYEGLPSKTYLSKTLAQYTSKTCSNCGFTITSADYDRVLEKLKKTATGWMTTINGKELKVEGQITYYNRYKRQNVVKDLSVELDRLSEESVNNDISSWTKGRSGEALSLLKKRFSHRPVQEKFVCLNCGFETHADEQAALNIARSWLFLRSQEYKKYQTNKTTGNTDKRAFVETWQSFYRKKLKEVWKPAV

SEQ ID NO: 41074 - protein, 978 aa, synthetic construct
  REGION 1..978: note = engineered CasX variant
QEGKRINKIRRRLVKDSNTKKAGKTGPMKTLLVRVMTPDLRERLENLRKKPENIPQPISNTSRANLNKLLTDYTEMKKAILHVYWEEFQKDPVGLMSRVAQPASKKIDQNKLKPEMDEKGNLTTAGFACSQCGQPLFVYKLEQVSEKGKAYTNYFGRCNVAEHEKLILLAQLKPEKDSDEAVTYSLGKFGQRALDFYSIHVTKESTHPVKPLAQIAGNRYASYPVGKALSDACMGTIASFLSKYQDIIIEHQKVVKGNQKRLESLRELAGKENLEYPSVTLPPQPHTKEGVDAYNEVIARVRMWVNLNLWQKLKLSRDDAKPLLRLKGFPSFPLVERQANEVDWWDMVCNVKKLINEKKEDGKVFWQNLAGYKRQEALRPYLSSEEDRKKGKKFARYQLGDLLLHLEKKHGEDWGKVYDEAWERIDKKVEGLSKHIKLEEERRSEDAQSKAALTDWLRAKASFVIEGLKEADKDEFCRCELKLQKWYGDLRGKPFAIEAENSILDISGFSKQYNCAFIWQKDGVKKLNLYLIINYFKGGKLRFKKIKPEAFEANRFYTVINKKSGEIVPMEVNFNFDDPNLIILPLAFGKRQGREFIWNDLLSLETGSLKLANGRVIEKTLYNRRTRQDEPALFVALTFERREVLDSSNIKPMNLIGVDRGENIPAVIALTDPEGCPLSRFKDSLGNPTHILRIGESYKEKQRTIQAKKEVEQRRAGGYSRKYASKAKNLADDMVRNTARDLLYYAVTQDAMLIFENLSRGFGRQGKRTFMAERQYTRMEDWLTAKLAYEGLPSQTYLSKTLAQYTSKTCSNCGFTITSADYDRVLEKLKKTATGWMTTINGKELKVEGQITYYNRYKRQNVVKDLSVELDRLSEESVNNDISSWTKGRSGEALSLLKKRFSHRPVQEKFVCLNCGFETHADEQAALNIARSWLFLRSQEYKKYQTNKTTGNTDKRAFVETWQSFYRKKLKEVWKPAV

SEQ ID NO: 41075 - protein, 978 aa, synthetic construct
  REGION 1..978: note = engineered CasX variant
QEGKRINKIRRRLVKDSNTKKAGKTGPMKTLLVRVMTPDLRERLENLRKKPENIPQPISNTSRANLNKLLTDYTEMKKAILHVYWEEFQKDPVGLMSRVAQPASKKIDQNKLKPEMDEKGNLTTAGFACSQCGQPLFVYKLEQVSEKGKAYTNYFGRCNVAEHEKLILLAQLKPEKDSDEAVTYSLGKFGQRALDFYSIHVTKESTHPVKPLAQIAGNRYASHPVGKALSDACMGTIASFLSKYQDIIIEHQKVVKGNQKRLESLRELAGKENLEYPSVTLPPQPHTKEGVDAYNEVIARVRMWVNLNLWQKLKLSRDDAKPLLRLKGFPSFPLVERQANEVDWWDMVCNVKKLINEKKEDGKVFWQNLAGYKRQEALRPYLSSEEDRKKGKKFARYQLGDLLLHLEKKHGEDWGKVYDEAWERIDKKVEGLSKHIKLEEERRSEDAQSKAALTDWLRAKASFVIEGLKEADKDEFCRCELKLQKWYGDLRGKPFAIEAENSILDISGFSKQYNCAFIWQKDGVKKLNLYLIINYFKGGKLRFKKIKPEAFEANRFYTVINKKSGEIVPMEVNFNFDDPNLIILPLAFGKRQGREFIWNDLLSLETGSLKLANGRVIEKTLYNRRTRQDEPALFVALTFERREVLDSSNIKPMNLIGVDRGENIPAVIALTDPEGCPLSRFKDSLGNPTHILRIGESYKEKQRTIQAKKEVEQRRAGGYSRKYASKAKNLADDMVRNTARDLLYYAVTQDAMLIFENLSRGFGRQGKRTFMAERQYTRMEDWLTAKLAYEGLPSQTYLSKTLAQYTSKTCSNCGFTITSADYDRVLEKLKKTATGWMTTINGKELKVEGQITYYNRYKRQNVVKDLSVELDRLSEESVNNDISSWTKGRSGEALSLLKKRFSHRPVQEKFVCLNCGFETHADEQAALNIARSWLFLRSQEYKKYQTNKTTGNTDKRAFVETWQSFYRKKLKEVWKPAV

SEQ ID NO: 41076 - protein, 978 aa, synthetic construct
  REGION 1..978: note = engineered CasX variant
QEGKRINKIRRRLVKDSNTKKAGKTGPMKTLLVRVMTPDLRERLENLRKKPENIPQPISNTSRANLNKLLTDYTEMKKAILHVYWEEFQKDPVGLMSRVAQPASKKIDQNKLKPEMDEKGNLTTAGFACSQCGQPLFVYKLEQVSEKGKAYTNYFGRCNVAEHEKLILLAQLKPEKDSDEAVTYSLGKFGQRALDFYSIHVTKESTHPVKPLAQIAGNRYASSPVGKALSDACMGTIASFLSKYQDIIIEHQKVVKGNQKRLESLRELAGKENLEYPSVTLPPQPHTKEGVDAYNEVIARVRMWVNLNLWQKLKLSRDDAKPLLRLKGFPSFPLVERQANEVDWWDMVCNVKKLINEKKEDGKVFWQNLAGYKRQEALRPYLSSEEDRKKGKKFARYQLGDLLLHLEKKHGEDWGKVYDEAWERIDKKVEGLSKHIKLEEERRSEDAQSKAALTDWLRAKASFVIEGLKEADKDEFCRCELKLQKWYGDLRGKPFAIEAENSILDISGFSKQYNCAFIWQKDGVKKLNLYLIINYFKGGKLRFKKIKPEAFEANRFYTVINKKSGEIVPMEVNFNFDDPNLIILPLAFGKRQGREFIWNDLLSLETGSLKLANGRVIEKTLYNRRTRQDEPALFVALTFERREVLDSSNIKPMNLIGVDRGENIPAVIALTDPEGCPLSRFKDSLGNPTHILRIGESYKEKQRTIQAKKEVEQRRAGGYSRKYASKAKNLADDMVRNTARDLLYYAVTQDAMLIFENLSRGFGRQGKRTFMAERQYTRMEDWLTAKLAYEGLPSQTYLSKTLAQYTSKTCSNCGFTITSADYDRVLEKLKKTATGWMTTINGKELKVEGQITYYNRYKRQNVVKDLSVELDRLSEESVNNDISSWTKGRSGEALSLLKKRFSHRPVQEKFVCLNCGFETHADEQAALNIARSWLFLRSQEYKKYQTNKTTGNTDKRAFVETWQSFYRKKLKEVWKPAV

SEQ ID NO: 41077 - protein, 978 aa, synthetic construct
  REGION 1..978: note = engineered CasX variant
QEGKRINKIRRRLVKDSNTKKAGKTGPMKTLLVRVMTPDLRERLENLRKKPENIPQPISNTSRANLNKLLTDYTEMKKAILHVYWEEFQKDPVGLMSRVAQPASKKIDQNKLKPEMDEKGNLTTAGFACSQCGQPLFVYKLEQVSEKGKAYTNYFGRCNVAEHEKLILLAQLKPEKDSDEAVTYSLGKFGQRALDFYSIHVTKESTHPVKPLAQIAGNRYASTPVGKALSDACMGTIASFLSKYQDIIIEHQKVVKGNQKRLESLRELAGKENLEYPSVTLPPQPHTKEGVDAYNEVIARVRMWVNLNLWQKLKLSRDDAKPLLRLKGFPSFPLVERQANEVDWWDMVCNVKKLINEKKEDGKVFWQNLAGYKRQEALRPYLSSEEDRKKGKKFARYQLGDLLLHLEKKHGEDWGKVYDEAWERIDKKVEGLSKHIKLEEERRSEDAQSKAALTDWLRAKASFVIEGLKEADKDEFCRCELKLQKWYGDLRGKPFAIEAENSILDISGFSKQYNCAFIWQKDGVKKLNLYLIINYFKGGKLRFKKIKPEAFEANRFYTVINKKSGEIVPMEVNFNFDDPNLIILPLAFGKRQGREFIWNDLLSLETGSLKLANGRVIEKTLYNRRTRQDEPALFVALTFERREVLDSSNIKPMNLIGVDRGENIPAVIALTDPEGCPLSRFKDSLGNPTHILRIGESYKEKQRTIQAKKEVEQRRAGGYSRKYASKAKNLADDMVRNTARDLLYYAVTQDAMLIFENLSRGFGRQGKRTFMAERQYTRMEDWLTAKLAYEGLPSQTYLSKTLAQYTSKTCSNCGFTITSADYDRVLEKLKKTATGWMTTINGKELKVEGQITYYNRYKRQNVVKDLSVELDRLSEESVNNDISSWTKGRSGEALSLLKKRFSHRPVQEKFVCLNCGFETHADEQAALNIARSWLFLRSQEYKKYQTNKTTGNTDKRAFVETWQSFYRKKLKEVWKPAV

SEQ ID NO: 41078 - protein, 978 aa, synthetic construct
  REGION 1..978: note = engineered CasX variant
QEGKRINKIRRRLVKDSNTKKAGKTGPMKTLLVRVMTPDLRERLENLRKKPENIPQPISNTSRANLNKLLTDYTEMKKAILHVYWEEFQKDPVGLMSRVAQPASKKIDQNKLKPEMDEKGNLTTAGFACSQCGQPLFVYKLEQVSEKGKAYTNYFGRCNVAEHEKLILLAQLKPEKDSDEAVTYSLGKFGQRALDFYSIHVTKESTHPVKPLAQIAGNRYASAPVGKALSDACMGTIASFLSKYQDIIIEHQKVVKGNQKRLESLRELAGKENLEYPSVTLPPQPHTKEGVDAYNEVIARVRMWVNLNLWQKLKLSRDDAKPLLRLKGFPSFPLVERQANEVDWWDMVCNVKKLINEKKEDGKVFWQNLAGYKRQEALRPYLSSEEDRKKGKKFARYQLGDLLLHLEKKHGEDWGKVYDEAWERIDKKVEGLSKHIKLEEERRSEDAQSKAALTDWLRAKASFVIEGLKEADKDEFCRCELKLQKWYGDLRGKPFAIEAENSILDISGFSKQYNCAFIWQKDGVKKLNLYLIINYFKGGKLRFKKIKPEAFEANRFYTVINKKSGEIVPMEVNFNFDDPNLIILPLAFGKRQGREFIWNDLLSLETGSLKLANGRVIEKTLYNRRTRQDEPALFVALTFERREVLDSSNIKPMNLIGVDRGENIPAVIALTDPEGCPLSRFKDSLGNPTHILRIGESYKEKQRTIQAKKEVEQRRAGGYSRKYASKAKNLADDMVRNTARDLLYYAVTQDAMLIFENLSRGFGRQGKRTFMAERQYTRMEDWLTAKLAYEGLPSQTYLSKTLAQYTSKTCSNCGFTITSADYDRVLEKLKKTATGWMTTINGKELKVEGQITYYNRYKRQNVVKDLSVELDRLSEESVNNDISSWTKGRSGEALSLLKKRFSHRPVQEKFVCLNCGFETHADEQAALNIARSWLFLRSQEYKKYQTNKTTGNTDKRAFVETWQSFYRKKLKEVWKPAV

SEQ ID NO: 41079 - protein, 978 aa, synthetic construct
  REGION 1..978: note = engineered CasX variant
QEGKRINKIRRRLVKDSNTKKAGKTGPMKTLLVRVMTPDLRERLENLRKKPENIPQPISNTSRANLNKLLTDYTEMKKAILHVYWEEFQKDPVGLMSRVAQPASKKIDQNKLKPEMDEKGNLTTAGFACSQCGQPLFVYKLEQVSEKGKAYTNYFGRCNVAEHEKLILLAQLKPEKDSDEAVTYSLGKFGQRALDFYSIHVTKESTHPVKPLAQIAGNRYASVPVGKALSDACMGTIASFLSKYQDIIIEHQKVVKGNQKRLESLRELAGKENLEYPSVTLPPQPHTKEGVDAYNEVIARVRMWVNLNLWQKLKLSRDDAKPLLRLKGFPSFPLVERQANEVDWWDMVCNVKKLINEKKEDGKVFWQNLAGYKRQEALRPYLSSEEDRKKGKKFARYQLGDLLLHLEKKHGEDWGKVYDEAWERIDKKVEGLSKHIKLEEERRSEDAQSKAALTDWLRAKASFVIEGLKEADKDEFCRCELKLQKWYGDLRGKPFAIEAENSILDISGFSKQYNCAFIWQKDGVKKLNLYLIINYFKGGKLRFKKIKPEAFEANRFYTVINKKSGEIVPMEVNFNFDDPNLIILPLAFGKRQGREFIWNDLLSLETGSLKLANGRVIEKTLYNRRTRQDEPALFVALTFERREVLDSSNIKPMNLIGVDRGENIPAVIALTDPEGCPLSRFKDSLGNPTHILRIGESYKEKQRTIQAKKEVEQRRAGGYSRKYASKAKNLADDMVRNTARDLLYYAVTQDAMLIFENLSRGFGRQGKRTFMAERQYTRMEDWLTAKLAYEGLPSQTYLSKTLAQYTSKTCSNCGFTITSADYDRVLEKLKKTATGWMTTINGKELKVEGQITYYNRYKRQNVVKDLSVELDRLSEESVNNDISSWTKGRSGEALSLLKKRFSHRPVQEKFVCLNCGFETHADEQAALNIARSWLFLRSQEYKKYQTNKTTGNTDKRAFVETWQSFYRKKLKEVWKPAV

SEQ ID NO: 41080 - protein, 978 aa, synthetic construct
  REGION 1..978: note = engineered CasX variant
QEGKRINKIRRRLVKDSNTKKAGKTGPMKTLLVRVMTPDLRERLENLRKKPENIPQPISNTSRANLNKLLTDYTEMKKAILHVYWEEFQKDPVGLMSRVAQPASKKIDQNKLKPEMDEKGNLTTAGFACSQCGQPLFVYKLEQVSEKGKAYTNYFGRCNVAEHEKLIKLAQLKPEKDSDEAVTYSLGKFGQRALDFYSIHVTKESTHPVKPLAQIAGNRYASGPVGKALSDACMGTIASFLSKYQDIIIEHQKVVKGNQKRLESLRELAGKENLEYPSVTLPPQPHTKEGVDAYNEVIARVRMWVNLNLWQKLKLSRDDAKPLLRLKGFPSFPLVERQANEVDWWDMVCNVKKLINEKKEDGKVFWQNLAGYKRQEALRPYLSSEEDRKKGKKFARYQLGDLLLHLEKKHGEDWGKVYDEAWERIDKKVEGLSKHIKLEEERRSEDAQSKAALTDWLRAKASFVIEGLKEADKDEFCRCELKLQKWYGDLRGKPFAIEAENSILDISGFSKQYNCAFIWQKDGVKKLNLYLIINYFKGGKLRFKKIKPEAFEANRFYTVINKKSGEIVPMEVNFNFDDPNLIILPLAFGKRQGREFIWNDLLSLETGSLKLANGRVIEKTLYNRRTRQDEPALFVALTFERREVLDSSNIKPMNLIGVDRGENIPAVIALTDPEGCPLSRFKDSLGNPTHILRIGESYKEKQRTIQAKKEVEQRRAGGYSRKYASKAKNLADDMVRNTARDLLYYAVTQDAMLIFENLSRGFGRQGKRTFMAERQYTRMEDWLTAKLAYEGLPSQTYLSKTLAQYTSKTCSNCGFTITSADYDRVLEKLKKTATGWMTTINGKELKVEGQITYYNRYKRQNVVKDLSVELDRLSEESVNNDISSWTKGRSGEALSLLKKRFSHRPVQEKFVCLNCGFETHADEQAALNIARSWLFLRSQEYKKYQTNKTTGNTDKRAFVETWQSFYRKKLKEVWKPAV

SEQ ID NO: 41081 - protein, 977 aa, synthetic construct
  REGION 1..977: note = engineered CasX variant
QEGKRINKIRRRLVKDSNTKKAGKTGPMKTLLVRVMTPDLRERLENLRKKPENIPQPISNTSRANLNKLLTDYTEMKKAILHVYWEEFQKDPVGLMSRVAQPASKKIDQNKLKPEMDEKGNLTTAGFACSQCGQPLFVYKLEQVSEKGKAYTNYFGRCNVAEHEKLILLAQLKPEKDSDEAVTYSLGKFGQRALDFYSIHVTKESTHPVKPLAQIAGNRYASPVGKALSDACMGTIASFLSKYQDIIIEHQKVVKGNQKRLESLRELAGKENLEYPSVTLPPQPHTKEGVDAYNEVIARVRMWVNLNLWQKLKLSRDDAKPLLRLKGFPSFPLVERQANEVDWWDMVCNVKKLINEKKEDGKVFWQNLAGYKRQEALRPYLSSEEDRKKGKKFARYQLGDLLLHLEKKHGEDWGKVYDEAWERIDKKVEGLSKHIKLEEERRSEDAQSKAALTDWLRAKASFVIEGLKEADKDEFCRCELKLQKWYGDLRGKPFAIEAENSILDISGFSKQYNCAFIWQKDGVKKLNLYLIINYFKGGKLRFKKIKPEAFEANRFYTVINKKSGEIVPMEVNFNFDDPNLIILPLAFGKRQGREFIWNDLLSLETGSLKLANGRVIEKTLYNRRTRQDEPALFVALTFERREVLDSSNIKPMNLIGVDRGENIPAVIALTDPEGCPLSRFKDSLGNPTHILRIGESYKEKQRTIQAKKEVEQRRAGGYSRKYASKAKNLADDMVRNTARDLLYYAVTQDAMLIFENLSRGFGRQGKRTFMAERQYTRMEDWLTAKLAYEGLPSQTYLSKTLAQYTSKTCSNCGFTITSADYDRVLEKLKKTATGWMTTINGKELKVEGQITYYNRYKRQNVVKDLSVELDRLSEESVNNDISSWTKGRSGEALSLLKKRFSHRPVQEKFVCLNCGFETHADEQAALNIARSWLFLRSQEYKKYQTNKTTGNTDKRAFVETWQSFYRKKLKEVWKPAV

SEQ ID NO: 41082 - protein, 978 aa, synthetic construct
  REGION 1..978: note = engineered CasX variant
QEGKRINKIRRRLVKDSNTKKAGKTGPMKTLLVRVMTPDLRERLENLRKKPENIPQPISNTSRANLNKLLTDYTEMKKAILHVYWEEFQKDPVGLMSRVAQPASKKIDQNKLKPEMDEKGNLTTAGFACSQCGQPLFVYKLEQVSEKGKAYTNYFGRCNVAEHEKLILLAQLKPEKDSDEAVTYSLGKFGQRALDFYSIHVTKESTHPVKPLAQIAGNRYASYPVGKALSDACMGTIASFLSKYQDIIIEHQKVVKGNQKRLESLRELAGKENLEYPSVTLPPQPHTKEGVDAYNEVIARVRMWVNLNLWQKLKLSRDDAKPLLRLKGFPSFPLVERQANEVDWWDMVCNVKKLINEKKEDGKVFWQNLAGYKRQEALRPYLSSEEDRKKGKKFARYQLGDLLLHLEKKHGEDWGKVYDEAWERIDKKVEGLSKHIKLEEERRSEDAQSKAALTDWLRAKASFVIEGLKEADKDEFCRCELKLQKWYGDLRGKPFAIEAENSILDISGFSKQYNCAFIWQKDGVKKLNLYLIINYFKGGKLRFKKIKPEAFEANRFYTVINKKSGEIVPMEVNFNFDDPNLIILPLAFGKRQGREFIWNDLLSLETGSLKLANGRVIEKTLYNRRTRQDEPALFVALTFERREVLDSSNIKPMNLIGVDRGENIPAVIALTDPEGCPLSRFKDSLGNPTHILRIGESYKEKQRTIQAKKEVEQRRAGGYSRKYASKAKNLADDMVRNTARDLLYYAVTQDAMLIFENLSRGFGRQGKRTFMAERQYTRMEDWLTAKLAYNGLPSKTYLSKTLAQYTSKTCSNCGFTITSADYDRVLEKLKKTATGWMTTINGKELKVEGQITYYNRYKRQNVVKDLSVELDRLSEESVNNDISSWTKGRSGEALSLLKKRFSHRPVQEKFVCLNCGFETHADEQAALNIARSWLFLRSQEYKKYQTNKTTGNTDKRAFVETWQSFYRKKLKEVWKPAV

SEQ ID NO: 41083 - protein, 978 aa, synthetic construct
  REGION 1..978: note = engineered CasX variant
QEGKRINKIRRRLVKDSNTKKAGKTGPMKTLLVRVMTPDLRERLENLRKKPENIPQPISNTSRANLNKLLTDYTEMKKAILHVYWEEFQKDPVGLMSRVAQPASKKIDQNKLKPEMDEKGNLTTAGFACSQCGQPLFVYKLEQVSEKGKAYTNYFGRCNVAEHEKLILLAQLKPEKDSDEAVTYSLGKFGQRALDFYSIHVTKESTHPVKPLAQIAGNRYASHPVGKALSDACMGTIASFLSKYQDIIIEHQKVVKGNQKRLESLRELAGKENLEYPSVTLPPQPHTKEGVDAYNEVIARVRMWVNLNLWQKLKLSRDDAKPLLRLKGFPSFPLVERQANEVDWWDMVCNVKKLINEKKEDGKVFWQNLAGYKRQEALRPYLSSEEDRKKGKKFARYQLGDLLLHLEKKHGEDWGKVYDEAWERIDKKVEGLSKHIKLEEERRSEDAQSKAALTDWLRAKASFVIEGLKEADKDEFCRCELKLQKWYGDLRGKPFAIEAENSILDISGFSKQYNCAFIWQKDGVKKLNLYLIINYFKGGKLRFKKIKPEAFEANRFYTVINKKSGEIVPMEVNFNFDDPNLIILPLAFGKRQGREFIWNDLLSLETGSLKLANGRVIEKTLYNRRTRQDEPALFVALTFERREVLDSSNIKPMNLIGVDRGENIPAVIALTDPEGCPLSRFKDSLGNPTHILRIGESYKEKQRTIQAKKEVEQRRAGGYSRKYASKAKNLADDMVRNTARDLLYYAVTQDAMLIFENLSRGFGRQGKRTFMAERQYTRMEDWLTAKLAYNGLPSKTYLSKTLAQYTSKTCSNCGFTITSADYDRVLEKLKKTATGWMTTINGKELKVEGQITYYNRYKRQNVVKDLSVELDRLSEESVNNDISSWTKGRSGEALSLLKKRFSHRPVQEKFVCLNCGFETHADEQAALNIARSWLFLRSQEYKKYQTNKTTGNTDKRAFVETWQSFYRKKLKEVWKPAV

SEQ ID NO: 41084 - protein, 978 aa, synthetic construct
  REGION 1..978: note = engineered CasX variant
QEGKRINKIRRRLVKDSNTKKAGKTGPMKTLLVRVMTPDLRERLENLRKKPENIPQPISNTSRANLNKLLTDYTEMKKAILHVYWEEFQKDPVGLMSRVAQPASKKIDQNKLKPEMDEKGNLTTAGFACSQCGQPLFVYKLEQVSEKGKAYTNYFGRCNVAEHEKLILLAQLKPEKDSDEAVTYSLGKFGQRALDFYSIHVTKESTHPVKPLAQIAGNRYASSPVGKALSDACMGTIASFLSKYQDIIIEHQKVVKGNQKRLESLRELAGKENLEYPSVTLPPQPHTKEGVDAYNEVIARVRMWVNLNLWQKLKLSRDDAKPLLRLKGFPSFPLVERQANEVDWWDMVCNVKKLINEKKEDGKVFWQNLAGYKRQEALRPYLSSEEDRKKGKKFARYQLGDLLLHLEKKHGEDWGKVYDEAWERIDKKVEGLSKHIKLEEERRSEDAQSKAALTDWLRAKASFVIEGLKEADKDEFCRCELKLQKWYGDLRGKPFAIEAENSILDISGFSKQYNCAFIWQKDGVKKLNLYLIINYFKGGKLRFKKIKPEAFEANRFYTVINKKSGEIVPMEVNFNFDDPNLIILPLAFGKRQGREFIWNDLLSLETGSLKLANGRVIEKTLYNRRTRQDEPALFVALTFERREVLDSSNIKPMNLIGVDRGENIPAVIALTDPEGCPLSRFKDSLGNPTHILRIGESYKEKQRTIQAKKEVEQRRAGGYSRKYASKAKNLADDMVRNTARDLLYYAVTQDAMLIFENLSRGFGRQGKRTFMAERQYTRMEDWLTAKLAYNGLPSKTYLSKTLAQYTSKTCSNCGFTITSADYDRVLEKLKKTATGWMTTINGKELKVEGQITYYNRYKRQNVVKDLSVELDRLSEESVNNDISSWTKGRSGEALSLLKKRFSHRPVQEKFVCLNCGFETHADEQAALNIARSWLFLRSQEYKKYQTNKTTGNTDKRAFVETWQSFYRKKLKEVWKPAV

SEQ ID NO: 41085 - protein, 978 aa, synthetic construct
  REGION 1..978: note = engineered CasX variant
QEGKRINKIRRRLVKDSNTKKAGKTGPMKTLLVRVMTPDLRERLENLRKKPENIPQPISNTSRANLNKLLTDYTEMKKAILHVYWEEFQKDPVGLMSRVAQPASKKIDQNKLKPEMDEKGNLTTAGFACSQCGQPLFVYKLEQVSEKGKAYTNYFGRCNVAEHEKLILLAQLKPEKDSDEAVTYSLGKFGQRALDFYSIHVTKESTHPVKPLAQIAGNRYASTPVGKALSDACMGTIASFLSKYQDIIIEHQKVVKGNQKRLESLRELAGKENLEYPSVTLPPQPHTKEGVDAYNEVIARVRMWVNLNLWQKLKLSRDDAKPLLRLKGFPSFPLVERQANEVDWWDMVCNVKKLINEKKEDGKVFWQNLAGYKRQEALRPYLSSEEDRKKGKKFARYQLGDLLLHLEKKHGEDWGKVYDEAWERIDKKVEGLSKHIKLEEERRSEDAQSKAALTDWLRAKASFVIEGLKEADKDEFCRCELKLQKWYGDLRGKPFAIEAENSILDISGFSKQYNCAFIWQKDGVKKLNLYLIINYFKGGKLRFKKIKPEAFEANRFYTVINKKSGEIVPMEVNFNFDDPNLIILPLAFGKRQGREFIWNDLLSLETGSLKLANGRVIEKTLYNRRTRQDEPALFVALTFERREVLDSSNIKPMNLIGVDRGENIPAVIALTDPEGCPLSRFKDSLGNPTHILRIGESYKEKQRTIQAKKEVEQRRAGGYSRKYASKAKNLADDMVRNTARDLLYYAVTQDAMLIFENLSRGFGRQGKRTFMAERQYTRMEDWLTAKLAYNGLPSKTYLSKTLAQYTSKTCSNCGFTITSADYDRVLEKLKKTATGWMTTINGKELKVEGQITYYNRYKRQNVVKDLSVELDRLSEESVNNDISSWTKGRSGEALSLLKKRFSHRPVQEKFVCLNCGFETHADEQAALNIARSWLFLRSQEYKKYQTNKTTGNTDKRAFVETWQSFYRKKLKEVWKPAV

SEQ ID NO: 41086 - protein, 978 aa, synthetic construct
  REGION 1..978: note = engineered CasX variant
QEGKRINKIRRRLVKDSNTKKAGKTGPMKTLLVRVMTPDLRERLENLRKKPENIPQPISNTSRANLNKLLTDYTEMKKAILHVYWEEFQKDPVGLMSRVAQPASKKIDQNKLKPEMDEKGNLTTAGFACSQCGQPLFVYKLEQVSEKGKAYTNYFGRCNVAEHEKLILLAQLKPEKDSDEAVTYSLGKFGQRALDFYSIHVTKESTHPVKPLAQIAGNRYASAPVGKALSDACMGTIASFLSKYQDIIIEHQKVVKGNQKRLESLRELAGKENLEYPSVTLPPQPHTKEGVDAYNEVIARVRMWVNLNLWQKLKLSRDDAKPLLRLKGFPSFPLVERQANEVDWWDMVCNVKKLINEKKEDGKVFWQNLAGYKRQEALRPYLSSEEDRKKGKKFARYQLGDLLLHLEKKHGEDWGKVYDEAWERIDKKVEGLSKHIKLEEERRSEDAQSKAALTDWLRAKASFVIEGLKEADKDEFCRCELKLQKWYGDLRGKPFAIEAENSILDISGFSKQYNCAFIWQKDGVKKLNLYLIINYFKGGKLRFKKIKPEAFEANRFYTVINKKSGEIVPMEVNFNFDDPNLIILPLAFGKRQGREFIWNDLLSLETGSLKLANGRVIEKTLYNRRTRQDEPALFVALTFERREVLDSSNIKPMNLIGVDRGENIPAVIALTDPEGCPLSRFKDSLGNPTHILRIGESYKEKQRTIQAKKEVEQRRAGGYSRKYASKAKNLADDMVRNTARDLLYYAVTQDAMLIFENLSRGFGRQGKRTFMAERQYTRMEDWLTAKLAYNGLPSKTYLSKTLAQYTSKTCSNCGFTITSADYDRVLEKLKKTATGWMTTINGKELKVEGQITYYNRYKRQNVVKDLSVELDRLSEESVNNDISSWTKGRSGEALSLLKKRFSHRPVQEKFVCLNCGFETHADEQAALNIARSWLFLRSQEYKKYQTNKTTGNTDKRAFVETWQSFYRKKLKEVWKPAV

SEQ ID NO: 41087 - protein, 978 aa, synthetic construct
  REGION 1..978: note = engineered CasX variant
QEGKRINKIRRRLVKDSNTKKAGKTGPMKTLLVRVMTPDLRERLENLRKKPENIPQPISNTSRANLNKLLTDYTEMKKAILHVYWEEFQKDPVGLMSRVAQPASKKIDQNKLKPEMDEKGNLTTAGFACSQCGQPLFVYKLEQVSEKGKAYTNYFGRCNVAEHEKLILLAQLKPEKDSDEAVTYSLGKFGQRALDFYSIHVTKESTHPVKPLAQIAGNRYASVPVGKALSDACMGTIASFLSKYQDIIIEHQKVVKGNQKRLESLRELAGKENLEYPSVTLPPQPHTKEGVDAYNEVIARVRMWVNLNLWQKLKLSRDDAKPLLRLKGFPSFPLVERQANEVDWWDMVCNVKKLINEKKEDGKVFWQNLAGYKRQEALRPYLSSEEDRKKGKKFARYQLGDLLLHLEKKHGEDWGKVYDEAWERIDKKVEGLSKHIKLEEERRSEDAQSKAALTDWLRAKASFVIEGLKEADKDEFCRCELKLQKWYGDLRGKPFAIEAENSILDISGFSKQYNCAFIWQKDGVKKLNLYLIINYFKGGKLRFKKIKPEAFEANRFYTVINKKSGEIVPMEVNFNFDDPNLIILPLAFGKRQGREFIWNDLLSLETGSLKLANGRVIEKTLYNRRTRQDEPALFVALTFERREVLDSSNIKPMNLIGVDRGENIPAVIALTDPEGCPLSRFKDSLGNPTHILRIGESYKEKQRTIQAKKEVEQRRAGGYSRKYASKAKNLADDMVRNTARDLLYYAVTQDAMLIFENLSRGFGRQGKRTFMAERQYTRMEDWLTAKLAYNGLPSKTYLSKTLAQYTSKTCSNCGFTITSADYDRVLEKLKKTATGWMTTINGKELKVEGQITYYNRYKRQNVVKDLSVELDRLSEESVNNDISSWTKGRSGEALSLLKKRFSHRPVQEKFVCLNCGFETHADEQAALNIARSWLFLRSQEYKKYQTNKTTGNTDKRAFVETWQSFYRKKLKEVWKPAV

SEQ ID NO: 41088 - protein, 978 aa, synthetic construct
  REGION 1..978: note = engineered CasX variant
QEGKRINKIRRRLVKDSNTKKAGKTGPMKTLLVRVMTPDLRERLENLRKKPENIPQPISNTSRANLNKLLTDYTEMKKAILHVYWEEFQKDPVGLMSRVAQPASKKIDQNKLKPEMDEKGNLTTAGFACSQCGQPLFVYKLEQVSEKGKAYTNYFGRCNVAEHEKLIKLAQLKPEKDSDEAVTYSLGKFGQRALDFYSIHVTKESTHPVKPLAQIAGNRYASGPVGKALSDACMGTIASFLSKYQDIIIEHQKVVKGNQKRLESLRELAGKENLEYPSVTLPPQPHTKEGVDAYNEVIARVRMWVNLNLWQKLKLSRDDAKPLLRLKGFPSFPLVERQANEVDWWDMVCNVKKLINEKKEDGKVFWQNLAGYKRQEALRPYLSSEEDRKKGKKFARYQLGDLLLHLEKKHGEDWGKVYDEAWERIDKKVEGLSKHIKLEEERRSEDAQSKAALTDWLRAKASFVIEGLKEADKDEFCRCELKLQKWYGDLRGKPFAIEAENSILDISGFSKQYNCAFIWQKDGVKKLNLYLIINYFKGGKLRFKKIKPEAFEANRFYTVINKKSGEIVPMEVNFNFDDPNLIILPLAFGKRQGREFIWNDLLSLETGSLKLANGRVIEKTLYNRRTRQDEPALFVALTFERREVLDSSNIKPMNLIGVDRGENIPAVIALTDPEGCPLSRFKDSLGNPTHILRIGESYKEKQRTIQAKKEVEQRRAGGYSRKYASKAKNLADDMVRNTARDLLYYAVTQDAMLIFENLSRGFGRQGKRTFMAERQYTRMEDWLTAKLAYNGLPSKTYLSKTLAQYTSKTCSNCGFTITSADYDRVLEKLKKTATGWMTTINGKELKVEGQITYYNRYKRQNVVKDLSVELDRLSEESVNNDISSWTKGRSGEALSLLKKRFSHRPVQEKFVCLNCGFETHADEQAALNIARSWLFLRSQEYKKYQTNKTTGNTDKRAFVETWQSFYRKKLKEVWKPAV

SEQ ID NO: 41089 - protein, 977 aa, synthetic construct
  REGION 1..977: note = engineered CasX variant
QEGKRINKIRRRLVKDSNTKKAGKTGPMKTLLVRVMTPDLRERLENLRKKPENIPQPISNTSRANLNKLLTDYTEMKKAILHVYWEEFQKDPVGLMSRVAQPASKKIDQNKLKPEMDEKGNLTTAGFACSQCGQPLFVYKLEQVSEKGKAYTNYFGRCNVAEHEKLILLAQLKPEKDSDEAVTYSLGKFGQRALDFYSIHVTKESTHPVKPLAQIAGNRYASPVGKALSDACMGTIASFLSKYQDIIIEHQKVVKGNQKRLESLRELAGKENLEYPSVTLPPQPHTKEGVDAYNEVIARVRMWVNLNLWQKLKLSRDDAKPLLRLKGFPSFPLVERQANEVDWWDMVCNVKKLINEKKEDGKVFWQNLAGYKRQEALRPYLSSEEDRKKGKKFARYQLGDLLLHLEKKHGEDWGKVYDEAWERIDKKVEGLSKHIKLEEERRSEDAQSKAALTDWLRAKASFVIEGLKEADKDEFCRCELKLQKWYGDLRGKPFAIEAENSILDISGFSKQYNCAFIWQKDGVKKLNLYLIINYFKGGKLRFKKIKPEAFEANRFYTVINKKSGEIVPMEVNFNFDDPNLIILPLAFGKRQGREFIWNDLLSLETGSLKLANGRVIEKTLYNRRTRQDEPALFVALTFERREVLDSSNIKPMNLIGVDRGENIPAVIALTDPEGCPLSRFKDSLGNPTHILRIGESYKEKQRTIQAKKEVEQRRAGGYSRKYASKAKNLADDMVRNTARDLLYYAVTQDAMLIFENLSRGFGRQGKRTFMAERQYTRMEDWLTAKLAYNGLPSKTYLSKTLAQYTSKTCSNCGFTITSADYDRVLEKLKKTATGWMTTINGKELKVEGQITYYNRYKRQNVVKDLSVELDRLSEESVNNDISSWTKGRSGEALSLLKKRFSHRPVQEKFVCLNCGFETHADEQAALNIARSWLFLRSQEYKKYQTNKTTGNTDKRAFVETWQSFYRKKLKEVWKPAV

SEQ ID NO: 41090 - protein, 978 aa, synthetic construct
  REGION 1..978: note = engineered CasX variant
QEGKRINKIRRRLVKDSNTKKAGKTGPMKTLLVRVMTPDLRERLENLRKKPENIPQPISNTSRANLNKLLTDYTEMKKAILHVYWEEFQKDPVGLMSRVAQPASKKIDQNKLKPEMDEKGNLTTAGFACSQCGQPLFVYKLEQVSEKGKAYTNYFGRCNVAEHEKLIQLAQLKPEKDSDEAVTYSLGKFGQRALDFYSIHVTKESTHPVKPLAQIAGNRYASYPVGKALSDACMGTIASFLSKYQDIIIEHQKVVKGNQKRLESLRELAGKENLEYPSVTLPPQPHTKEGVDAYNEVIARVRMWVNLNLWQKLKLSRDDAKPLLRLKGFPSFPLVERQANEVDWWDMVCNVKKLINEKKEDGKVFWQNLAGYKRQEALRPYLSSEEDRKKGKKFARYQLGDLLLHLEKKHGEDWGKVYDEAWERIDKKVEGLSKHIKLEEERRSEDAQSKAALTDWLRAKASFVIEGLKEADKDEFCRCELKLQKWYGDLRGKPFAIEAENSILDISGFSKQYNCAFIWQKDGVKKLNLYLIINYFKGGKLRFKKIKPEAFEANRFYTVINKKSGEIVPMEVNFNFDDPNLIILPLAFGKRQGREFIWNDLLSLETGSLKLANGRVIEKTLYNRRTRQDEPALFVALTFERREVLDSSNIKPMNLIGVDRGENIPAVIALTDPEGCPLSRFKDSLGNPTHILRIGESYKEKQRTIQAKKEVEQRRAGGYSRKYASKAKNLADDMVRNTARDLLYYAVTQDAMLIFENLSRGFGRQGKRTFMAERQYTRMEDWLTAKLAYEGLPSKTYLSKTLAQYTSKTCSNCGFTITSADYDRVLEKLKKTATGWMTTINGKELKVEGQITYYNRYKRQNVVKDLSVELDRLSEESVNNDISSWTKGRSGEALSLLKKRFSHRPVQEKFVCLNCGFETHADEQAALNIARSWLFLRSQEYKKYQTNKTTGNTDKRAFVETWQSFYRKKLKEVWKPAV

SEQ ID NO: 41091 - protein, 978 aa, synthetic construct
  REGION 1..978: note = engineered CasX variant
QEGKRINKIRRRLVKDSNTKKAGKTGPMKTLLVRVMTPDLRERLENLRKKPENIPQPISNTSRANLNKLLTDYTEMKKAILHVYWEEFQKDPVGLMSRVAQPASKKIDQNKLKPEMDEKGNLTTAGFACSQCGQPLFVYKLEQVSEKGKAYTNYFGRCNVAEHEKLIQLAQLKPEKDSDEAVTYSLGKFGQRALDFYSIHVTKESTHPVKPLAQIAGNRYASHPVGKALSDACMGTIASFLSKYQDIIIEHQKVVKGNQKRLESLRELAGKENLEYPSVTLPPQPHTKEGVDAYNEVIARVRMWVNLNLWQKLKLSRDDAKPLLRLKGFPSFPLVERQANEVDWWDMVCNVKKLINEKKEDGKVFWQNLAGYKRQEALRPYLSSEEDRKKGKKFARYQLGDLLLHLEKKHGEDWGKVYDEAWERIDKKVEGLSKHIKLEEERRSEDAQSKAALTDWLRAKASFVIEGLKEADKDEFCRCELKLQKWYGDLRGKPFAIEAENSILDISGFSKQYNCAFIWQKDGVKKLNLYLIINYFKGGKLRFKKIKPEAFEANRFYTVINKKSGEIVPMEVNFNFDDPNLIILPLAFGKRQGREFIWNDLLSLETGSLKLANGRVIEKTLYNRRTRQDEPALFVALTFERREVLDSSNIKPMNLIGVDRGENIPAVIALTDPEGCPLSRFKDSLGNPTHILRIGESYKEKQRTIQAKKEVEQRRAGGYSRKYASKAKNLADDMVRNTARDLLYYAVTQDAMLIFENLSRGFGRQGKRTFMAERQYTRMEDWLTAKLAYEGLPSKTYLSKTLAQYTSKTCSNCGFTITSADYDRVLEKLKKTATGWMTTINGKELKVEGQITYYNRYKRQNVVKDLSVELDRLSEESVNNDISSWTKGRSGEALSLLKKRFSHRPVQEKFVCLNCGFETHADEQAALNIARSWLFLRSQEYKKYQTNKTTGNTDKRAFVETWQSFYRKKLKEVWKPAV

SEQ ID NO: 41092 - protein, 978 aa, synthetic construct
  REGION 1..978: note = engineered CasX variant
QEGKRINKIRRRLVKDSNTKKAGKTGPMKTLLVRVMTPDLRERLENLRKKPENIPQPISNTSRANLNKLLTDYTEMKKAILHVYWEEFQKDPVGLMSRVAQPASKKIDQNKLKPEMDEKGNLTTAGFACSQCGQPLFVYKLEQVSEKGKAYTNYFGRCNVAEHEKLIQLAQLKPEKDSDEAVTYSLGKFGQRALDFYSIHVTKESTHPVKPLAQIAGNRYASSPVGKALSDACMGTIASFLSKYQDIIIEHQKVVKGNQKRLESLRELAGKENLEYPSVTLPPQPHTKEGVDAYNEVIARVRMWVNLNLWQKLKLSRDDAKPLLRLKGFPSFPLVERQANEVDWWDMVCNVKKLINEKKEDGKVFWQNLAGYKRQEALRPYLSSEEDRKKGKKFARYQLGDLLLHLEKKHGEDWGKVYDEAWERIDKKVEGLSKHIKLEEERRSEDAQSKAALTDWLRAKASFVIEGLKEADKDEFCRCELKLQKWYGDLRGKPFAIEAENSILDISGFSKQYNCAFIWQKDGVKKLNLYLIINYFKGGKLRFKKIKPEAFEANRFYTVINKKSGEIVPMEVNFNFDDPNLIILPLAFGKRQGREFIWNDLLSLETGSLKLANGRVIEKTLYNRRTRQDEPALFVALTFERREVLDSSNIKPMNLIGVDRGENIPAVIALTDPEGCPLSRFKDSLGNPTHILRIGESYKEKQRTIQAKKEVEQRRAGGYSRKYASKAKNLADDMVRNTARDLLYYAVTQDAMLIFENLSRGFGRQGKRTFMAERQYTRMEDWLTAKLAYEGLPSKTYLSKTLAQYTSKTCSNCGFTITSADYDRVLEKLKKTATGWMTTINGKELKVEGQITYYNRYKRQNVVKDLSVELDRLSEESVNNDISSWTKGRSGEALSLLKKRFSHRPVQEKFVCLNCGFETHADEQAALNIARSWLFLRSQEYKKYQTNKTTGNTDKRAFVETWQSFYRKKLKEVWKPAV

SEQ ID NO: 41093 - protein, 978 aa, synthetic construct
  REGION 1..978: note = engineered CasX variant
QEGKRINKIRRRLVKDSNTKKAGKTGPMKTLLVRVMTPDLRERLENLRKKPENIPQPISNTSRANLNKLLTDYTEMKKAILHVYWEEFQKDPVGLMSRVAQPASKKIDQNKLKPEMDEKGNLTTAGFACSQCGQPLFVYKLEQVSEKGKAYTNYFGRCNVAEHEKLIQLAQLKPEKDSDEAVTYSLGKFGQRALDFYSIHVTKESTHPVKPLAQIAGNRYASTPVGKALSDACMGTIASFLSKYQDIIIEHQKVVKGNQKRLESLRELAGKENLEYPSVTLPPQPHTKEGVDAYNEVIARVRMWVNLNLWQKLKLSRDDAKPLLRLKGFPSFPLVERQANEVDWWDMVCNVKKLINEKKEDGKVFWQNLAGYKRQEALRPYLSSEEDRKKGKKFARYQLGDLLLHLEKKHGEDWGKVYDEAWERIDKKVEGLSKHIKLEEERRSEDAQSKAALTDWLRAKASFVIEGLKEADKDEFCRCELKLQKWYGDLRGKPFAIEAENSILDISGFSKQYNCAFIWQKDGVKKLNLYLIINYFKGGKLRFKKIKPEAFEANRFYTVINKKSGEIVPMEVNFNFDDPNLIILPLAFGKRQGREFIWNDLLSLETGSLKLANGRVIEKTLYNRRTRQDEPALFVALTFERREVLDSSNIKPMNLIGVDRGENIPAVIALTDPEGCPLSRFKDSLGNPTHILRIGESYKEKQRTIQAKKEVEQRRAGGYSRKYASKAKNLADDMVRNTARDLLYYAVTQDAMLIFENLSRGFGRQGKRTFMAERQYTRMEDWLTAKLAYEGLPSKTYLSKTLAQYTSKTCSNCGFTITSADYDRVLEKLKKTATGWMTTINGKELKVEGQITYYNRYKRQNVVKDLSVELDRLSEESVNNDISSWTKGRSGEALSLLKKRFSHRPVQEKFVCLNCGFETHADEQAALNIARSWLFLRSQEYKKYQTNKTTGNTDKRAFVETWQSFYRKKLKEVWKPAV

SEQ ID NO: 41094 - protein, 978 aa, synthetic construct
  REGION 1..978: note = engineered CasX variant
QEGKRINKIRRRLVKDSNTKKAGKTGPMKTLLVRVMTPDLRERLENLRKKPENIPQPISNTSRANLNKLLTDYTEMKKAILHVYWEEFQKDPVGLMSRVAQPASKKIDQNKLKPEMDEKGNLTTAGFACSQCGQPLFVYKLEQVSEKGKAYTNYFGRCNVAEHEKLIQLAQLKPEKDSDEAVTYSLGKFGQRALDFYSIHVTKESTHPVKPLAQIAGNRYASAPVGKALSDACMGTIASFLSKYQDIIIEHQKVVKGNQKRLESLRELAGKENLEYPSVTLPPQPHTKEGVDAYNEVIARVRMWVNLNLWQKLKLSRDDAKPLLRLKGFPSFPLVERQANEVDWWDMVCNVKKLINEKKEDGKVFWQNLAGYKRQEALRPYLSSEEDRKKGKKFARYQLGDLLLHLEKKHGEDWGKVYDEAWERIDKKVEGLSKHIKLEEERRSEDAQSKAALTDWLRAKASFVIEGLKEADKDEFCRCELKLQKWYGDLRGKPFAIEAENSILDISGFSKQYNCAFIWQKDGVKKLNLYLIINYFKGGKLRFKKIKPEAFEANRFYTVINKKSGEIVPMEVNFNFDDPNLIILPLAFGKRQGREFIWNDLLSLETGSLKLANGRVIEKTLYNRRTRQDEPALFVALTFERREVLDSSNIKPMNLIGVDRGENIPAVIALTDPEGCPLSRFKDSLGNPTHILRIGESYKEKQRTIQAKKEVEQRRAGGYSRKYASKAKNLADDMVRNTARDLLYYAVTQDAMLIFENLSRGFGRQGKRTFMAERQYTRMEDWLTAKLAYEGLPSKTYLSKTLAQYTSKTCSNCGFTITSADYDRVLEKLKKTATGWMTTINGKELKVEGQITYYNRYKRQNVVKDLSVELDRLSEESVNNDISSWTKGRSGEALSLLKKRFSHRPVQEKFVCLNCGFETHADEQAALNIARSWLFLRSQEYKKYQTNKTTGNTDKRAFVETWQSFYRKKLKEVWKPAV

SEQ ID NO: 41095 - protein, 978 aa, synthetic construct
  REGION 1..978: note = engineered CasX variant
QEGKRINKIRRRLVKDSNTKKAGKTGPMKTLLVRVMTPDLRERLENLRKKPENIPQPISNTSRANLNKLLTDYTEMKKAILHVYWEEFQKDPVGLMSRVAQPASKKIDQNKLKPEMDEKGNLTTAGFACSQCGQPLFVYKLEQVSEKGKAYTNYFGRCNVAEHEKLIQLAQLKPEKDSDEAVTYSLGKFGQRALDFYSIHVTKESTHPVKPLAQIAGNRYASVPVGKALSDACMGTIASFLSKYQDIIIEHQKVVKGNQKRLESLRELAGKENLEYPSVTLPPQPHTKEGVDAYNEVIARVRMWVNLNLWQKLKLSRDDAKPLLRLKGFPSFPLVERQANEVDWWDMVCNVKKLINEKKEDGKVFWQNLAGYKRQEALRPYLSSEEDRKKGKKFARYQLGDLLLHLEKKHGEDWGKVYDEAWERIDKKVEGLSKHIKLEEERRSEDAQSKAALTDWLRAKASFVIEGLKEADKDEFCRCELKLQKWYGDLRGKPFAIEAENSILDISGFSKQYNCAFIWQKDGVKKLNLYLIINYFKGGKLRFKKIKPEAFEANRFYTVINKKSGEIVPMEVNFNFDDPNLIILPLAFGKRQGREFIWNDLLSLETGSLKLANGRVIEKTLYNRRTRQDEPALFVALTFERREVLDSSNIKPMNLIGVDRGENIPAVIALTDPEGCPLSRFKDSLGNPTHILRIGESYKEKQRTIQAKKEVEQRRAGGYSRKYASKAKNLADDMVRNTARDLLYYAVTQDAMLIFENLSRGFGRQGKRTFMAERQYTRMEDWLTAKLAYEGLPSKTYLSKTLAQYTSKTCSNCGFTITSADYDRVLEKLKKTATGWMTTINGKELKVEGQITYYNRYKRQNVVKDLSVELDRLSEESVNNDISSWTKGRSGEALSLLKKRFSHRPVQEKFVCLNCGFETHADEQAALNIARSWLFLRSQEYKKYQTNKTTGNTDKRAFVETWQSFYRKKLKEVWKPAV

SEQ ID NO: 41096 - protein, 979 aa, synthetic construct
  REGION 1..979: note = engineered CasX variant
QEGKRINKIRRRLVKDSNTKKAGKTGPMKTLLVRVMTPDLRERLENLRKKPENIPQPISNTSRANLNKLLTDYTEMKKAILHVYWEEFQKDPVGLMSRVAQPASKKIDQNKLKPEMDEKGNLTTAGFACSQCGQPLFVYKLEQVSEKGKAYTNYFGRCNVAEHEKLIQKLAQLKPEKDSDEAVTYSLGKFGQRALDFYSIHVTKESTHPVKPLAQIAGNRYASGPVGKALSDACMGTIASFLSKYQDIIIEHQKVVKGNQKRLESLRELAGKENLEYPSVTLPPQPHTKEGVDAYNEVIARVRMWVNLNLWQKLKLSRDDAKPLLRLKGFPSFPLVERQANEVDWWDMVCNVKKLINEKKEDGKVFWQNLAGYKRQEALRPYLSSEEDRKKGKKFARYQLGDLLLHLEKKHGEDWGKVYDEAWERIDKKVEGLSKHIKLEEERRSEDAQSKAALTDWLRAKASFVIEGLKEADKDEFCRCELKLQKWYGDLRGKPFAIEAENSILDISGFSKQYNCAFIWQKDGVKKLNLYLIINYFKGGKLRFKKIKPEAFEANRFYTVINKKSGEIVPMEVNFNFDDPNLIILPLAFGKRQGREFIWNDLLSLETGSLKLANGRVIEKTLYNRRTRQDEPALFVALTFERREVLDSSNIKPMNLIGVDRGENIPAVIALTDPEGCPLSRFKDSLGNPTHILRIGESYKEKQRTIQAKKEVEQRRAGGYSRKYASKAKNLADDMVRNTARDLLYYAVTQDAMLIFENLSRGFGRQGKRTFMAERQYTRMEDWLTAKLAYEGLPSKTYLSKTLAQYTSKTCSNCGFTITSADYDRVLEKLKKTATGWMTTINGKELKVEGQITYYNRYKRQNVVKDLSVELDRLSEESVNNDISSWTKGRSGEALSLLKKRFSHRPVQEKFVCLNCGFETHADEQAALNIARSWLFLRSQEYKKYQTNKTTGNTDKRAFVETWQSFYRKKLKEVWKPAV

SEQ ID NO: 41097 - protein, 977 aa, synthetic construct
  REGION 1..977: note = engineered CasX variant
QEGKRINKIRRRLVKDSNTKKAGKTGPMKTLLVRVMTPDLRERLENLRKKPENIPQPISNTSRANLNKLLTDYTEMKKAILHVYWEEFQKDPVGLMSRVAQPASKKIDQNKLKPEMDEKGNLTTAGFACSQCGQPLFVYKLEQVSEKGKAYTNYFGRCNVAEHEKLIQLAQLKPEKDSDEAVTYSLGKFGQRALDFYSIHVTKESTHPVKPLAQIAGNRYASPVGKALSDACMGTIASFLSKYQDIIIEHQKVVKGNQKRLESLRELAGKENLEYPSVTLPPQPHTKEGVDAYNEVIARVRMWVNLNLWQKLKLSRDDAKPLLRLKGFPSFPLVERQANEVDWWDMVCNVKKLINEKKEDGKVFWQNLAGYKRQEALRPYLSSEEDRKKGKKFARYQLGDLLLHLEKKHGEDWGKVYDEAWERIDKKVEGLSKHIKLEEERRSEDAQSKAALTDWLRAKASFVIEGLKEADKDEFCRCELKLQKWYGDLRGKPFAIEAENSILDISGFSKQYNCAFIWQKDGVKKLNLYLIINYFKGGKLRFKKIKPEAFEANRFYTVINKKSGEIVPMEVNFNFDDPNLIILPLAFGKRQGREFIWNDLLSLETGSLKLANGRVIEKTLYNRRTRQDEPALFVALTFERREVLDSSNIKPMNLIGVDRGENIPAVIALTDPEGCPLSRFKDSLGNPTHILRIGESYKEKQRTIQAKKEVEQRRAGGYSRKYASKAKNLADDMVRNTARDLLYYAVTQDAMLIFENLSRGFGRQGKRTFMAERQYTRMEDWLTAKLAYEGLPSKTYLSKTLAQYTSKTCSNCGFTITSADYDRVLEKLKKTATGWMTTINGKELKVEGQITYYNRYKRQNVVKDLSVELDRLSEESVNNDISSWTKGRSGEALSLLKKRFSHRPVQEKFVCLNCGFETHADEQAALNIARSWLFLRSQEYKKYQTNKTTGNTDKRAFVETWQSFYRKKLKEVWKPAV

SEQ ID NO: 41098 - protein, 978 aa, synthetic construct
  REGION 1..978: note = engineered CasX variant
QEGKRINKIRRRLVKDSNTKKAGKTGPMKTLLVRVMTPDLRERLENLRKKPENIPQPISNTSRANLNKLLTDYTEMKKAILHVYWEEFQKDPVGLMSRVAQPASKKIDQNKLKPEMDEKGNLTTAGFACSQCGQPLFVYKLEQVSEKGKAYTNYFGRCNVAEHEKLILLAQLKPEKDSDEAVTYSLGKFGQRALDFYSIHVTKESTHPVKPLAQIAGNRYASYPVGKALSDACMGTIASFLSKYQDIIIEHQKVVKGNQKRLESLRELAGKENLEYPSVTLPPQPHTKEGVDAYNEVIARVRMWVNLNLWQKLKLSRDDAKPLLRLKGFPSFPLVERQANEVDWWDMVCNVKKLINEKKEDGKVFWQNLAIYKRQEALRPYLSSEEDRKKGKKFARYQLGDLLLHLEKKHGEDWGKVYDEAWERIDKKVEGLSKHIKLEEERRSEDAQSKAALTDWLRAKASFVIEGLKEADKDEFCRCELKLQKWYGDLRGKPFAIEAENSILDISGFSKQYNCAFIWQKDGVKKLNLYLIINYFKGGKLRFKKIKPEAFEANRFYTVINKKSGEIVPMEVNFNFDDPNLIILPLAFGKRQGREFIWNDLLSLETGSLKLANGRVIEKTLYNRRTRQDEPALFVALTFERREVLDSSNIKPMNLIGVDRGENIPAVIALTDPEGCPLSRFKDSLGNPTHILRIGESYKEKQRTIQAKKEVEQRRAGGYSRKYASKAKNLADDMVRNTARDLLYYAVTQDAMLIFENLSRGFGRQGKRTFMAERQYTRMEDWLTAKLAYEGLPSKTYLSKTLAQYTSKTCSNCGFTITSADYDRVLEKLKKTATGWMTTINGKELKVEGQITYYNRYKRQNVVKDLSVELDRLSEESVNNDISSWTKGRSGEALSLLKKRFSHRPVQEKFVCLNCGFETHADEQAALNIARSWLFLRSQEYKKYQTNKTTGNTDKRAFVETWQSFYRKKLKEVWKPAV

SEQ ID NO: 41099 - protein, 978 aa, synthetic construct
  REGION 1..978: note = engineered CasX variant
QEGKRINKIRRRLVKDSNTKKAGKTGPMKTLLVRVMTPDLRERLENLRKKPENIPQPISNTSRANLNKLLTDYTEMKKAILHVYWEEFQKDPVGLMSRVAQPASKKIDQNKLKPEMDEKGNLTTAGFACSQCGQPLFVYKLEQVSEKGKAYTNYFGRCNVAEHEKLILLAQLKPEKDSDEAVTYSLGKFGQRALDFYSIHVTKESTHPVKPLAQIAGNRYASHPVGKALSDACMGTIASFLSKYQDIIIEHQKVVKGNQKRLESLRELAGKENLEYPSVTLPPQPHTKEGVDAYNEVIARVRMWVNLNLWQKLKLSRDDAKPLLRLKGFPSFPLVERQANEVDWWDMVCNVKKLINEKKEDGKVFWQNLAIYKRQEALRPYLSSEEDRKKGKKFARYQLGDLLLHLEKKHGEDWGKVYDEAWERIDKKVEGLSKHIKLEEERRSEDAQSKAALTDWLRAKASFVIEGLKEADKDEFCRCELKLQKWYGDLRGKPFAIEAENSILDISGFSKQYNCAFIWQKDGVKKLNLYLIINYFKGGKLRFKKIKPEAFEANRFYTVINKKSGEIVPMEVNFNFDDPNLIILPLAFGKRQGREFIWNDLLSLETGSLKLANGRVIEKTLYNRRTRQDEPALFVALTFERREVLDSSNIKPMNLIGVDRGENIPAVIALTDPEGCPLSRFKDSLGNPTHILRIGESYKEKQRTIQAKKEVEQRRAGGYSRKYASKAKNLADDMVRNTARDLLYYAVTQDAMLIFENLSRGFGRQGKRTFMAERQYTRMEDWLTAKLAYEGLPSKTYLSKTLAQYTSKTCSNCGFTITSADYDRVLEKLKKTATGWMTTINGKELKVEGQITYYNRYKRQNVVKDLSVELDRLSEESVNNDISSWTKGRSGEALSLLKKRFSHRPVQEKFVCLNCGFETHADEQAALNIARSWLFLRSQEYKKYQTNKTTGNTDKRAFVETWQSFYRKKLKEVWKPAV

SEQ ID NO: 41100 - protein, 978 aa, synthetic construct
  REGION 1..978: note = engineered CasX variant
QEGKRINKIRRRLVKDSNTKKAGKTGPMKTLLVRVMTPDLRERLENLRKKPENIPQPISNTSRANLNKLLTDYTEMKKAILHVYWEEFQKDPVGLMSRVAQPASKKIDQNKLKPEMDEKGNLTTAGFACSQCGQPLFVYKLEQVSEKGKAYTNYFGRCNVAEHEKLILLAQLKPEKDSDEAVTYSLGKFGQRALDFYSIHVTKESTHPVKPLAQIAGNRYASSPVGKALSDACMGTIASFLSKYQDIIIEHQKVVKGNQKRLESLRELAGKENLEYPSVTLPPQPHTKEGVDAYNEVIARVRMWVNLNLWQKLKLSRDDAKPLLRLKGFPSFPLVERQANEVDWWDMVCNVKKLINEKKEDGKVFWQNLAIYKRQEALRPYLSSEEDRKKGKKFARYQLGDLLLHLEKKHGEDWGKVYDEAWERIDKKVEGLSKHIKLEEERRSEDAQSKAALTDWLRAKASFVIEGLKEADKDEFCRCELKLQKWYGDLRGKPFAIEAENSILDISGFSKQYNCAFIWQKDGVKKLNLYLIINYFKGGKLRFKKIKPEAFEANRFYTVINKKSGEIVPMEVNFNFDDPNLIILPLAFGKRQGREFIWNDLLSLETGSLKLANGRVIEKTLYNRRTRQDEPALFVALTFERREVLDSSNIKPMNLIGVDRGENIPAVIALTDPEGCPLSRFKDSLGNPTHILRIGESYKEKQRTIQAKKEVEQRRAGGYSRKYASKAKNLADDMVRNTARDLLYYAVTQDAMLIFENLSRGFGRQGKRTFMAERQYTRMEDWLTAKLAYEGLPSKTYLSKTLAQYTSKTCSNCGFTITSADYDRVLEKLKKTATGWMTTINGKELKVEGQITYYNRYKRQNVVKDLSVELDRLSEESVNNDISSWTKGRSGEALSLLKKRFSHRPVQEKFVCLNCGFETHADEQAALNIARSWLFLRSQEYKKYQTNKTTGNTDKRAFVETWQSFYRKKLKEVWKPAV

SEQ ID NO: 41101 - protein, 978 aa, synthetic construct
  REGION 1..978: note = engineered CasX variant
QEGKRINKIRRRLVKDSNTKKAGKTGPMKTLLVRVMTPDLRERLENLRKKPENIPQPISNTSRANLNKLLTDYTEMKKAILHVYWEEFQKDPVGLMSRVAQPASKKIDQNKLKPEMDEKGNLTTAGFACSQCGQPLFVYKLEQVSEKGKAYTNYFGRCNVAEHEKLILLAQLKPEKDSDEAVTYSLGKFGQRALDFYSIHVTKESTHPVKPLAQIAGNRYASTPVGKALSDACMGTIASFLSKYQDIIIEHQKVVKGNQKRLESLRELAGKENLEYPSVTLPPQPHTKEGVDAYNEVIARVRMWVNLNLWQKLKLSRDDAKPLLRLKGFPSFPLVERQANEVDWWDMVCNVKKLINEKKEDGKVFWQNLAIYKRQEALRPYLSSEEDRKKGKKFARYQLGDLLLHLEKKHGEDWGKVYDEAWERIDKKVEGLSKHIKLEEERRSEDAQSKAALTDWLRAKASFVIEGLKEADKDEFCRCELKLQKWYGDLRGKPFAIEAENSILDISGFSKQYNCAFIWQKDGVKKLNLYLIINYFKGGKLRFKKIKPEAFEANRFYTVINKKSGEIVPMEVNFNFDDPNLIILPLAFGKRQGREFIWNDLLSLETGSLKLANGRVIEKTLYNRRTRQDEPALFVALTFERREVLDSSNIKPMNLIGVDRGENIPAVIALTDPEGCPLSRFKDSLGNPTHILRIGESYKEKQRTIQAKKEVEQRRAGGYSRKYASKAKNLADDMVRNTARDLLYYAVTQDAMLIFENLSRGFGRQGKRTFMAERQYTRMEDWLTAKLAYEGLPSKTYLSKTLAQYTSKTCSNCGFTITSADYDRVLEKLKKTATGWMTTINGKELKVEGQITYYNRYKRQNVVKDLSVELDRLSEESVNNDISSWTKGRSGEALSLLKKRFSHRPVQEKFVCLNCGFETHADEQAALNIARSWLFLRSQEYKKYQTNKTTGNTDKRAFVETWQSFYRKKLKEVWKPAV

SEQ ID NO: 41102 - protein, 978 aa, synthetic construct
  REGION 1..978: note = engineered CasX variant
QEGKRINKIRRRLVKDSNTKKAGKTGPMKTLLVRVMTPDLRERLENLRKKPENIPQPISNTSRANLNKLLTDYTEMKKAILHVYWEEFQKDPVGLMSRVAQPASKKIDQNKLKPEMDEKGNLTTAGFACSQCGQPLFVYKLEQVSEKGKAYTNYFGRCNVAEHEKLILLAQLKPEKDSDEAVTYSLGKFGQRALDFYSIHVTKESTHPVKPLAQIAGNRYASAPVGKALSDACMGTIASFLSKYQDIIIEHQKVVKGNQKRLESLRELAGKENLEYPSVTLPPQPHTKEGVDAYNEVIARVRMWVNLNLWQKLKLSRDDAKPLLRLKGFPSFPLVERQANEVDWWDMVCNVKKLINEKKEDGKVFWQNLAIYKRQEALRPYLSSEEDRKKGKKFARYQLGDLLLHLEKKHGEDWGKVYDEAWERIDKKVEGLSKHIKLEEERRSEDAQSKAALTDWLRAKASFVIEGLKEADKDEFCRCELKLQKWYGDLRGKPFAIEAENSILDISGFSKQYNCAFIWQKDGVKKLNLYLIINYFKGGKLRFKKIKPEAFEANRFYTVINKKSGEIVPMEVNFNFDDPNLIILPLAFGKRQGREFIWNDLLSLETGSLKLANGRVIEKTLYNRRTRQDEPALFVALTFERREVLDSSNIKPMNLIGVDRGENIPAVIALTDPEGCPLSRFKDSLGNPTHILRIGESYKEKQRTIQAKKEVEQRRAGGYSRKYASKAKNLADDMVRNTARDLLYYAVTQDAMLIFENLSRGFGRQGKRTFMAERQYTRMEDWLTAKLAYEGLPSKTYLSKTLAQYTSKTCSNCGFTITSADYDRVLEKLKKTATGWMTTINGKELKVEGQITYYNRYKRQNVVKDLSVELDRLSEESVNNDISSWTKGRSGEALSLLKKRFSHRPVQEKFVCLNCGFETHADEQAALNIARSWLFLRSQEYKKYQTNKTTGNTDKRAFVETWQSFYRKKLKEVWKPAV

SEQ ID NO: 41103 - protein, 978 aa, synthetic construct
  REGION 1..978: note = engineered CasX variant
QEGKRINKIRRRLVKDSNTKKAGKTGPMKTLLVRVMTPDLRERLENLRKKPENIPQPISNTSRANLNKLLTDYTEMKKAILHVYWEEFQKDPVGLMSRVAQPASKKIDQNKLKPEMDEKGNLTTAGFACSQCGQPLFVYKLEQVSEKGKAYTNYFGRCNVAEHEKLILLAQLKPEKDSDEAVTYSLGKFGQRALDFYSIHVTKESTHPVKPLAQIAGNRYASVPVGKALSDACMGTIASFLSKYQDIIIEHQKVVKGNQKRLESLRELAGKENLEYPSVTLPPQPHTKEGVDAYNEVIARVRMWVNLNLWQKLKLSRDDAKPLLRLKGFPSFPLVERQANEVDWWDMVCNVKKLINEKKEDGKVFWQNLAIYKRQEALRPYLSSEEDRKKGKKFARYQLGDLLLHLEKKHGEDWGKVYDEAWERIDKKVEGLSKHIKLEEERRSEDAQSKAALTDWLRAKASFVIEGLKEADKDEFCRCELKLQKWYGDLRGKPFAIEAENSILDISGFSKQYNCAFIWQKDGVKKLNLYLIINYFKGGKLRFKKIKPEAFEANRFYTVINKKSGEIVPMEVNFNFDDPNLIILPLAFGKRQGREFIWNDLLSLETGSLKLANGRVIEKTLYNRRTRQDEPALFVALTFERREVLDSSNIKPMNLIGVDRGENIPAVIALTDPEGCPLSRFKDSLGNPTHILRIGESYKEKQRTIQAKKEVEQRRAGGYSRKYASKAKNLADDMVRNTARDLLYYAVTQDAMLIFENLSRGFGRQGKRTFMAERQYTRMEDWLTAKLAYEGLPSKTYLSKTLAQYTSKTCSNCGFTITSADYDRVLEKLKKTATGWMTTINGKELKVEGQITYYNRYKRQNVVKDLSVELDRLSEESVNNDISSWTKGRSGEALSLLKKRFSHRPVQEKFVCLNCGFETHADEQAALNIARSWLFLRSQEYKKYQTNKTTGNTDKRAFVETWQSFYRKKLKEVWKPAV

SEQ ID NO: 41104 - protein, 978 aa, synthetic construct
  REGION 1..978: note = engineered CasX variant
QEGKRINKIRRRLVKDSNTKKAGKTGPMKTLLVRVMTPDLRERLENLRKKPENIPQPISNTSRANLNKLLTDYTEMKKAILHVYWEEFQKDPVGLMSRVAQPASKKIDQNKLKPEMDEKGNLTTAGFACSQCGQPLFVYKLEQVSEKGKAYTNYFGRCNVAEHEKLIKLAQLKPEKDSDEAVTYSLGKFGQRALDFYSIHVTKESTHPVKPLAQIAGNRYASGPVGKALSDACMGTIASFLSKYQDIIIEHQKVVKGNQKRLESLRELAGKENLEYPSVTLPPQPHTKEGVDAYNEVIARVRMWVNLNLWQKLKLSRDDAKPLLRLKGFPSFPLVERQANEVDWWDMVCNVKKLINEKKEDGKVFWQNLAIYKRQEALRPYLSSEEDRKKGKKFARYQLGDLLLHLEKKHGEDWGKVYDEAWERIDKKVEGLSKHIKLEEERRSEDAQSKAALTDWLRAKASFVIEGLKEADKDEFCRCELKLQKWYGDLRGKPFAIEAENSILDISGFSKQYNCAFIWQKDGVKKLNLYLIINYFKGGKLRFKKIKPEAFEANRFYTVINKKSGEIVPMEVNFNFDDPNLIILPLAFGKRQGREFIWNDLLSLETGSLKLANGRVIEKTLYNRRTRQDEPALFVALTFERREVLDSSNIKPMNLIGVDRGENIPAVIALTDPEGCPLSRFKDSLGNPTHILRIGESYKEKQRTIQAKKEVEQRRAGGYSRKYASKAKNLADDMVRNTARDLLYYAVTQDAMLIFENLSRGFGRQGKRTFMAERQYTRMEDWLTAKLAYEGLPSKTYLSKTLAQYTSKTCSNCGFTITSADYDRVLEKLKKTATGWMTTINGKELKVEGQITYYNRYKRQNVVKDLSVELDRLSEESVNNDISSWTKGRSGEALSLLKKRFSHRPVQEKFVCLNCGFETHADEQAALNIARSWLFLRSQEYKKYQTNKTTGNTDKRAFVETWQSFYRKKLKEVWKPAV

SEQ ID NO: 41105 - protein, 977 aa, synthetic construct
  REGION 1..977: note = engineered CasX variant
QEGKRINKIRRRLVKDSNTKKAGKTGPMKTLLVRVMTPDLRERLENLRKKPENIPQPISNTSRANLNKLLTDYTEMKKAILHVYWEEFQKDPVGLMSRVAQPASKKIDQNKLKPEMDEKGNLTTAGFACSQCGQPLFVYKLEQVSEKGKAYTNYFGRCNVAEHEKLILLAQLKPEKDSDEAVTYSLGKFGQRALDFYSIHVTKESTHPVKPLAQIAGNRYASPVGKALSDACMGTIASFLSKYQDIIIEHQKVVKGNQKRLESLRELAGKENLEYPSVTLPPQPHTKEGVDAYNEVIARVRMWVNLNLWQKLKLSRDDAKPLLRLKGFPSFPLVERQANEVDWWDMVCNVKKLINEKKEDGKVFWQNLAIYKRQEALRPYLSSEEDRKKGKKFARYQLGDLLLHLEKKHGEDWGKVYDEAWERIDKKVEGLSKHIKLEEERRSEDAQSKAALTDWLRAKASFVIEGLKEADKDEFCRCELKLQKWYGDLRGKPFAIEAENSILDISGFSKQYNCAFIWQKDGVKKLNLYLIINYFKGGKLRFKKIKPEAFEANRFYTVINKKSGEIVPMEVNFNFDDPNLIILPLAFGKRQGREFIWNDLLSLETGSLKLANGRVIEKTLYNRRTRQDEPALFVALTFERREVLDSSNIKPMNLIGVDRGENIPAVIALTDPEGCPLSRFKDSLGNPTHILRIGESYKEKQRTIQAKKEVEQRRAGGYSRKYASKAKNLADDMVRNTARDLLYYAVTQDAMLIFENLSRGFGRQGKRTFMAERQYTRMEDWLTAKLAYEGLPSKTYLSKTLAQYTSKTCSNCGFTITSADYDRVLEKLKKTATGWMTTINGKELKVEGQITYYNRYKRQNVVKDLSVELDRLSEESVNNDISSWTKGRSGEALSLLKKRFSHRPVQEKFVCLNCGFETHADEQAALNIARSWLFLRSQEYKKYQTNKTTGNTDKRAFVETWQSFYRKKLKEVWKPAV

SEQ ID NO: 41106 - protein, 978 aa, synthetic construct
  REGION 1..978: note = engineered CasX variant
QEGKRINKIRRRLVKDSNTKKAGKTGPMKTLLVRVMTPDLRERLENLRKKPENIPQPISNTSRANLNKLLTDYTEMKKAILHVYWEEFQKDPVGLMSRVAQPASKKIDQNKLKPEMDEKGNLTTAGFACSQCGQPLFVYKLEQVSEKGKAYTNYFGRCNVAEHEKLILLAQLKPEKDSDEAVTYSLGKFGQRALDFYSIHVTKESTHPVKPLAQIAGNRYASYPVGKALSDACMGTIASFLSKYQDIIIEHQKVVKGNQKRLESLRELAGKENLEYPSVTLPPQPHTKEGVDAYNEVIARVRMWVNLNLWQKLKLSRDDAKPLLRLKGFPSFPLVERQANEVDWWDMVCNVKKLINEKKEDGKVFWQNLAGYKRQEALRPYLSSEEDREKGKKFARYQLGDLLLHLEKKHGEDWGKVYDEAWERIDKKVEGLSKHIKLEEERRSEDAQSKAALTDWLRAKASFVIEGLKEADKDEFCRCELKLQKWYGDLRGKPFAIEAENSILDISGFSKQYNCAFIWQKDGVKKLNLYLIINYFKGGKLRFKKIKPEAFEANRFYTVINKKSGEIVPMEVNFNFDDPNLIILPLAFGKRQGREFIWNDLLSLETGSLKLANGRVIEKTLYNRRTRQDEPALFVALTFERREVLDSSNIKPMNLIGVDRGENIPAVIALTDPEGCPLSRFKDSLGNPTHILRIGESYKEKQRTIQAKKEVEQRRAGGYSRKYASKAKNLADDMVRNTARDLLYYAVTQDAMLIFENLSRGFGRQGKRTFMAERQYTRMEDWLTAKLAYEGLPSKTYLSKTLAQYTSKTCSNCGFTITSADYDRVLEKLKKTATGWMTTINGKELKVEGQITYYNRYKRQNVVKDLSVELDRLSEESVNNDISSWTKGRSGEALSLLKKRFSHRPVQEKFVCLNCGFETHADEQAALNIARSWLFLRSQEYKKYQTNKTTGNTDKRAFVETWQSFYRKKLKEVWKPAV

SEQ ID NO: 41107 - protein, 978 aa, synthetic construct
  REGION 1..978: note = engineered CasX variant
QEGKRINKIRRRLVKDSNTKKAGKTGPMKTLLVRVMTPDLRERLENLRKKPENIPQPISNTSRANLNKLLTDYTEMKKAILHVYWEEFQKDPVGLMSRVAQPASKKIDQNKLKPEMDEKGNLTTAGFACSQCGQPLFVYKLEQVSEKGKAYTNYFGRCNVAEHEKLILLAQLKPEKDSDEAVTYSLGKFGQRALDFYSIHVTKESTHPVKPLAQIAGNRYASHPVGKALSDACMGTIASFLSKYQDIIIEHQKVVKGNQKRLESLRELAGKENLEYPSVTLPPQPHTKEGVDAYNEVIARVRMWVNLNLWQKLKLSRDDAKPLLRLKGFPSFPLVERQANEVDWWDMVCNVKKLINEKKEDGKVFWQNLAGYKRQEALRPYLSSEEDREKGKKFARYQLGDLLLHLEKKHGEDWGKVYDEAWERIDKKVEGLSKHIKLEEERRSEDAQSKAALTDWLRAKASFVIEGLKEADKDEFCRCELKLQKWYGDLRGKPFAIEAENSILDISGFSKQYNCAFIWQKDGVKKLNLYLIINYFKGGKLRFKKIKPEAFEANRFYTVINKKSGEIVPMEVNFNFDDPNLIILPLAFGKRQGREFIWNDLLSLETGSLKLANGRVIEKTLYNRRTRQDEPALFVALTFERREVLDSSNIKPMNLIGVDRGENIPAVIALTDPEGCPLSRFKDSLGNPTHILRIGESYKEKQRTIQAKKEVEQRRAGGYSRKYASKAKNLADDMVRNTARDLLYYAVTQDAMLIFENLSRGFGRQGKRTFMAERQYTRMEDWLTAKLAYEGLPSKTYLSKTLAQYTSKTCSNCGFTITSADYDRVLEKLKKTATGWMTTINGKELKVEGQITYYNRYKRQNVVKDLSVELDRLSEESVNNDISSWTKGRSGEALSLLKKRFSHRPVQEKFVCLNCGFETHADEQAALNIARSWLFLRSQEYKKYQTNKTTGNTDKRAFVETWQSFYRKKLKEVWKPAV

SEQ ID NO: 41108 - protein, 978 aa, synthetic construct
  REGION 1..978: note = engineered CasX variant
QEGKRINKIRRRLVKDSNTKKAGKTGPMKTLLVRVMTPDLRERLENLRKKPENIPQPISNTSRANLNKLLTDYTEMKKAILHVYWEEFQKDPVGLMSRVAQPASKKIDQNKLKPEMDEKGNLTTAGFACSQCGQPLFVYKLEQVSEKGKAYTNYFGRCNVAEHEKLILLAQLKPEKDSDEAVTYSLGKFGQRALDFYSIHVTKESTHPVKPLAQIAGNRYASSPVGKALSDACMGTIASFLSKYQDIIIEHQKVVKGNQKRLESLRELAGKENLEYPSVTLPPQPHTKEGVDAYNEVIARVRMWVNLNLWQKLKLSRDDAKPLLRLKGFPSFPLVERQANEVDWWDMVCNVKKLINEKKEDGKVFWQNLAGYKRQEALRPYLSSEEDREKGKKFARYQLGDLLLHLEKKHGEDWGKVYDEAWERIDKKVEGLSKHIKLEEERRSEDAQSKAALTDWLRAKASFVIEGLKEADKDEFCRCELKLQKWYGDLRGKPFAIEAENSILDISGFSKQYNCAFIWQKDGVKKLNLYLIINYFKGGKLRFKKIKPEAFEANRFYTVINKKSGEIVPMEVNFNFDDPNLIILPLAFGKRQGREFIWNDLLSLETGSLKLANGRVIEKTLYNRRTRQDEPALFVALTFERREVLDSSNIKPMNLIGVDRGENIPAVIALTDPEGCPLSRFKDSLGNPTHILRIGESYKEKQRTIQAKKEVEQRRAGGYSRKYASKAKNLADDMVRNTARDLLYYAVTQDAMLIFENLSRGFGRQGKRTFMAERQYTRMEDWLTAKLAYEGLPSKTYLSKTLAQYTSKTCSNCGFTITSADYDRVLEKLKKTATGWMTTINGKELKVEGQITYYNRYKRQNVVKDLSVELDRLSEESVNNDISSWTKGRSGEALSLLKKRFSHRPVQEKFVCLNCGFETHADEQAALNIARSWLFLRSQEYKKYQTNKTTGNTDKRAFVETWQSFYRKKLKEVWKPAV

SEQ ID NO: 41109 - protein, 978 aa, synthetic construct
  REGION 1..978: note = engineered CasX variant
QEGKRINKIRRRLVKDSNTKKAGKTGPMKTLLVRVMTPDLRERLENLRKKPENIPQPISNTSRANLNKLLTDYTEMKKAILHVYWEEFQKDPVGLMSRVAQPASKKIDQNKLKPEMDEKGNLTTAGFACSQCGQPLFVYKLEQVSEKGKAYTNYFGRCNVAEHEKLILLAQLKPEKDSDEAVTYSLGKFGQRALDFYSIHVTKESTHPVKPLAQIAGNRYASTPVGKALSDACMGTIASFLSKYQDIIIEHQKVVKGNQKRLESLRELAGKENLEYPSVTLPPQPHTKEGVDAYNEVIARVRMWVNLNLWQKLKLSRDDAKPLLRLKGFPSFPLVERQANEVDWWDMVCNVKKLINEKKEDGKVFWQNLAGYKRQEALRPYLSSEEDREKGKKFARYQLGDLLLHLEKKHGEDWGKVYDEAWERIDKKVEGLSKHIKLEEERRSEDAQSKAALTDWLRAKASFVIEGLKEADKDEFCRCELKLQKWYGDLRGKPFAIEAENSILDISGFSKQYNCAFIWQKDGVKKLNLYLIINYFKGGKLRFKKIKPEAFEANRFYTVINKKSGEIVPMEVNFNFDDPNLIILPLAFGKRQGREFIWNDLLSLETGSLKLANGRVIEKTLYNRRTRQDEPALFVALTFERREVLDSSNIKPMNLIGVDRGENIPAVIALTDPEGCPLSRFKDSLGNPTHILRIGESYKEKQRTIQAKKEVEQRRAGGYSRKYASKAKNLADDMVRNTARDLLYYAVTQDAMLIFENLSRGFGRQGKRTFMAERQYTRMEDWLTAKLAYEGLPSKTYLSKTLAQYTSKTCSNCGFTITSADYDRVLEKLKKTATGWMTTINGKELKVEGQITYYNRYKRQNVVKDLSVELDRLSEESVNNDISSWTKGRSGEALSLLKKRFSHRPVQEKFVCLNCGFETHADEQAALNIARSWLFLRSQEYKKYQTNKTTGNTDKRAFVETWQSFYRKKLKEVWKPAV

SEQ ID NO: 41110 - protein, 978 aa, synthetic construct
  REGION 1..978: note = engineered CasX variant
QEGKRINKIRRRLVKDSNTKKAGKTGPMKTLLVRVMTPDLRERLENLRKKPENIPQPISNTSRANLNKLLTDYTEMKKAILHVYWEEFQKDPVGLMSRVAQPASKKIDQNKLKPEMDEKGNLTTAGFACSQCGQPLFVYKLEQVSEKGKAYTNYFGRCNVAEHEKLILLAQLKPEKDSDEAVTYSLGKFGQRALDFYSIHVTKESTHPVKPLAQIAGNRYASAPVGKALSDACMGTIASFLSKYQDIIIEHQKVVKGNQKRLESLRELAGKENLEYPSVTLPPQPHTKEGVDAYNEVIARVRMWVNLNLWQKLKLSRDDAKPLLRLKGFPSFPLVERQANEVDWWDMVCNVKKLINEKKEDGKVFWQNLAGYKRQEALRPYLSSEEDREKGKKFARYQLGDLLLHLEKKHGEDWGKVYDEAWERIDKKVEGLSKHIKLEEERRSEDAQSKAALTDWLRAKASFVIEGLKEADKDEFCRCELKLQKWYGDLRGKPFAIEAENSILDISGFSKQYNCAFIWQKDGVKKLNLYLIINYFKGGKLRFKKIKPEAFEANRFYTVINKKSGEIVPMEVNFNFDDPNLIILPLAFGKRQGREFIWNDLLSLETGSLKLANGRVIEKTLYNRRTRQDEPALFVALTFERREVLDSSNIKPMNLIGVDRGENIPAVIALTDPEGCPLSRFKDSLGNPTHILRIGESYKEKQRTIQAKKEVEQRRAGGYSRKYASKAKNLADDMVRNTARDLLYYAVTQDAMLIFENLSRGFGRQGKRTFMAERQYTRMEDWLTAKLAYEGLPSKTYLSKTLAQYTSKTCSNCGFTITSADYDRVLEKLKKTATGWMTTINGKELKVEGQITYYNRYKRQNVVKDLSVELDRLSEESVNNDISSWTKGRSGEALSLLKKRFSHRPVQEKFVCLNCGFETHADEQAALNIARSWLFLRSQEYKKYQTNKTTGNTDKRAFVETWQSFYRKKLKEVWKPAV

SEQ ID NO: 41111 - protein, 978 aa, synthetic construct
  REGION 1..978: note = engineered CasX variant
QEGKRINKIRRRLVKDSNTKKAGKTGPMKTLLVRVMTPDLRERLENLRKKPENIPQPISNTSRANLNKLLTDYTEMKKAILHVYWEEFQKDPVGLMSRVAQPASKKIDQNKLKPEMDEKGNLTTAGFACSQCGQPLFVYKLEQVSEKGKAYTNYFGRCNVAEHEKLILLAQLKPEKDSDEAVTYSLGKFGQRALDFYSIHVTKESTHPVKPLAQIAGNRYASVPVGKALSDACMGTIASFLSKYQDIIIEHQKVVKGNQKRLESLRELAGKENLEYPSVTLPPQPHTKEGVDAYNEVIARVRMWVNLNLWQKLKLSRDDAKPLLRLKGFPSFPLVERQANEVDWWDMVCNVKKLINEKKEDGKVFWQNLAGYKRQEALRPYLSSEEDREKGKKFARYQLGDLLLHLEKKHGEDWGKVYDEAWERIDKKVEGLSKHIKLEEERRSEDAQSKAALTDWLRAKASFVIEGLKEADKDEFCRCELKLQKWYGDLRGKPFAIEAENSILDISGFSKQYNCAFIWQKDGVKKLNLYLIINYFKGGKLRFKKIKPEAFEANRFYTVINKKSGEIVPMEVNFNFDDPNLIILPLAFGKRQGREFIWNDLLSLETGSLKLANGRVIEKTLYNRRTRQDEPALFVALTFERREVLDSSNIKPMNLIGVDRGENIPAVIALTDPEGCPLSRFKDSLGNPTHILRIGESYKEKQRTIQAKKEVEQRRAGGYSRKYASKAKNLADDMVRNTARDLLYYAVTQDAMLIFENLSRGFGRQGKRTFMAERQYTRMEDWLTAKLAYEGLPSKTYLSKTLAQYTSKTCSNCGFTITSADYDRVLEKLKKTATGWMTTINGKELKVEGQITYYNRYKRQNVVKDLSVELDRLSEESVNNDISSWTKGRSGEALSLLKKRFSHRPVQEKFVCLNCGFETHADEQAALNIARSWLFLRSQEYKKYQTNKTTGNTDKRAFVETWQSFYRKKLKEVWKPAV

SEQ ID NO: 41112 - protein, 978 aa, synthetic construct
  REGION 1..978: note = engineered CasX variant
QEGKRINKIRRRLVKDSNTKKAGKTGPMKTLLVRVMTPDLRERLENLRKKPENIPQPISNTSRANLNKLLTDYTEMKKAILHVYWEEFQKDPVGLMSRVAQPASKKIDQNKLKPEMDEKGNLTTAGFACSQCGQPLFVYKLEQVSEKGKAYTNYFGRCNVAEHEKLIKLAQLKPEKDSDEAVTYSLGKFGQRALDFYSIHVTKESTHPVKPLAQIAGNRYASGPVGKALSDACMGTIASFLSKYQDIIIEHQKVVKGNQKRLESLRELAGKENLEYPSVTLPPQPHTKEGVDAYNEVIARVRMWVNLNLWQKLKLSRDDAKPLLRLKGFPSFPLVERQANEVDWWDMVCNVKKLINEKKEDGKVFWQNLAGYKRQEALRPYLSSEEDREKGKKFARYQLGDLLLHLEKKHGEDWGKVYDEAWERIDKKVEGLSKHIKLEEERRSEDAQSKAALTDWLRAKASFVIEGLKEADKDEFCRCELKLQKWYGDLRGKPFAIEAENSILDISGFSKQYNCAFIWQKDGVKKLNLYLIINYFKGGKLRFKKIKPEAFEANRFYTVINKKSGEIVPMEVNFNFDDPNLIILPLAFGKRQGREFIWNDLLSLETGSLKLANGRVIEKTLYNRRTRQDEPALFVALTFERREVLDSSNIKPMNLIGVDRGENIPAVIALTDPEGCPLSRFKDSLGNPTHILRIGESYKEKQRTIQAKKEVEQRRAGGYSRKYASKAKNLADDMVRNTARDLLYYAVTQDAMLIFENLSRGFGRQGKRTFMAERQYTRMEDWLTAKLAYEGLPSKTYLSKTLAQYTSKTCSNCGFTITSADYDRVLEKLKKTATGWMTTINGKELKVEGQITYYNRYKRQNVVKDLSVELDRLSEESVNNDISSWTKGRSGEALSLLKKRFSHRPVQEKFVCLNCGFETHADEQAALNIARSWLFLRSQEYKKYQTNKTTGNTDKRAFVETWQSFYRKKLKEVWKPAV

SEQ ID NO: 41113 - protein, 977 aa, synthetic construct
  REGION 1..977: note = engineered CasX variant
QEGKRINKIRRRLVKDSNTKKAGKTGPMKTLLVRVMTPDLRERLENLRKKPENIPQPISNTSRANLNKLLTDYTEMKKAILHVYWEEFQKDPVGLMSRVAQPASKKIDQNKLKPEMDEKGNLTTAGFACSQCGQPLFVYKLEQVSEKGKAYTNYFGRCNVAEHEKLILLAQLKPEKDSDEAVTYSLGKFGQRALDFYSIHVTKESTHPVKPLAQIAGNRYASPVGKALSDACMGTIASFLSKYQDIIIEHQKVVKGNQKRLESLRELAGKENLEYPSVTLPPQPHTKEGVDAYNEVIARVRMWVNLNLWQKLKLSRDDAKPLLRLKGFPSFPLVERQANEVDWWDMVCNVKKLINEKKEDGKVFWQNLAGYKRQEALRPYLSSEEDREKGKKFARYQLGDLLLHLEKKHGEDWGKVYDEAWERIDKKVEGLSKHIKLEEERRSEDAQSKAALTDWLRAKASFVIEGLKEADKDEFCRCELKLQKWYGDLRGKPFAIEAENSILDISGFSKQYNCAFIWQKDGVKKLNLYLIINYFKGGKLRFKKIKPEAFEANRFYTVINKKSGEIVPMEVNFNFDDPNLIILPLAFGKRQGREFIWNDLLSLETGSLKLANGRVIEKTLYNRRTRQDEPALFVALTFERREVLDSSNIKPMNLIGVDRGENIPAVIALTDPEGCPLSRFKDSLGNPTHILRIGESYKEKQRTIQAKKEVEQRRAGGYSRKYASKAKNLADDMVRNTARDLLYYAVTQDAMLIFENLSRGFGRQGKRTFMAERQYTRMEDWLTAKLAYEGLPSKTYLSKTLAQYTSKTCSNCGFTITSADYDRVLEKLKKTATGWMTTINGKELKVEGQITYYNRYKRQNVVKDLSVELDRLSEESVNNDISSWTKGRSGEALSLLKKRFSHRPVQEKFVCLNCGFETHADEQAALNIARSWLFLRSQEYKKYQTNKTTGNTDKRAFVETWQSFYRKKLKEVWKPAV

SEQ ID NO: 41114 - protein, 978 aa, synthetic construct
  REGION 1..978: note = engineered CasX variant
QEGKRINKIRRRLVKDSNTKKAGKTGPMKTLLVRVMTPDLRERLENLRKKPENIPQPISNTSRANLNKLLTDYTEMKKAILHVYWEEFQKDPVGLMSRVAQPASKKIDQNKLKPEMDEKGNLTTAGFACSQCGQPLFVYKLEQVSEKGKAYTNYFGRCNVAEHEKLILLAQLKPEKDSDEAVTYSLGKFGQRALDFYSIHVTKESTHPVKPLAQIAGNRYASYPVGKALSDACMGTIASFLSKYQDIIIEHQKVVKGNQKRLESLRELAGKENLEYPSVTLPPQPHTKEGVDAYNEVIARVRMWVNLNLWQKLKLSRDDAKPLLRLKGFPSFPLVERQANEVDWWDMVCNVKKLINEKKEDGKVFWQNLAGYKRQEALRPYLSSEEDRKKGKKFARYQLGDLLLHLEKKHGEDWGKVYDEAWERIDKKVEGLSKHIKLEEERRSEDAQSKAALTDWLRAKASFVIEGLKEADKDEFCRCELKLQKWYGDLRGKPFAIEAENSILDISGFSKQYNCAFIWQKDGVKKLNLYLIINYFKGGKLRFKKIKPEAFEANRFYTVINKKSGEIVIMEVNFNFDDPNLIILPLAFGKRQGREFIWNDLLSLETGSLKLANGRVIEKTLYNRRTRQDEPALFVALTFERREVLDSSNIKPMNLIGVDRGENIPAVIALTDPEGCPLSRFKDSLGNPTHILRIGESYKEKQRTIQAKKEVEQRRAGGYSRKYASKAKNLADDMVRNTARDLLYYAVTQDAMLIFENLSRGFGRQGKRTFMAERQYTRMEDWLTAKLAYEGLPSKTYLSKTLAQYTSKTCSNCGFTITSADYDRVLEKLKKTATGWMTTINGKELKVEGQITYYNRYKRQNVVKDLSVELDRLSEESVNNDISSWTKGRSGEALSLLKKRFSHRPVQEKFVCLNCGFETHADEQAALNIARSWLFLRSQEYKKYQTNKTTGNTDKRAFVETWQSFYRKKLKEVWKPAV

SEQ ID NO: 41115 - protein, 978 aa, synthetic construct
  REGION 1..978: note = engineered CasX variant
QEGKRINKIRRRLVKDSNTKKAGKTGPMKTLLVRVMTPDLRERLENLRKKPENIPQPISNTSRANLNKLLTDYTEMKKAILHVYWEEFQKDPVGLMSRVAQPASKKIDQNKLKPEMDEKGNLTTAGFACSQCGQPLFVYKLEQVSEKGKAYTNYFGRCNVAEHEKLILLAQLKPEKDSDEAVTYSLGKFGQRALDFYSIHVTKESTHPVKPLAQIAGNRYASHPVGKALSDACMGTIASFLSKYQDIIIEHQKVVKGNQKRLESLRELAGKENLEYPSVTLPPQPHTKEGVDAYNEVIARVRMWVNLNLWQKLKLSRDDAKPLLRLKGFPSFPLVERQANEVDWWDMVCNVKKLINEKKEDGKVFWQNLAGYKRQEALRPYLSSEEDRKKGKKFARYQLGDLLLHLEKKHGEDWGKVYDEAWERIDKKVEGLSKHIKLEEERRSEDAQSKAALTDWLRAKASFVIEGLKEADKDEFCRCELKLQKWYGDLRGKPFAIEAENSILDISGFSKQYNCAFIWQKDGVKKLNLYLIINYFKGGKLRFKKIKPEAFEANRFYTVINKKSGEIVIMEVNFNFDDPNLIILPLAFGKRQGREFIWNDLLSLETGSLKLANGRVIEKTLYNRRTRQDEPALFVALTFERREVLDSSNIKPMNLIGVDRGENIPAVIALTDPEGCPLSRFKDSLGNPTHILRIGESYKEKQRTIQAKKEVEQRRAGGYSRKYASKAKNLADDMVRNTARDLLYYAVTQDAMLIFENLSRGFGRQGKRTFMAERQYTRMEDWLTAKLAYEGLPSKTYLSKTLAQYTSKTCSNCGFTITSADYDRVLEKLKKTATGWMTTINGKELKVEGQITYYNRYKRQNVVKDLSVELDRLSEESVNNDISSWTKGRSGEALSLLKKRFSHRPVQEKFVCLNCGFETHADEQAALNIARSWLFLRSQEYKKYQTNKTTGNTDKRAFVETWQSFYRKKLKEVWKPAV

SEQ ID NO: 41116 - protein, 978 aa, synthetic construct
  REGION 1..978: note = engineered CasX variant
QEGKRINKIRRRLVKDSNTKKAGKTGPMKTLLVRVMTPDLRERLENLRKKPENIPQPISNTSRANLNKLLTDYTEMKKAILHVYWEEFQKDPVGLMSRVAQPASKKIDQNKLKPEMDEKGNLTTAGFACSQCGQPLFVYKLEQVSEKGKAYTNYFGRCNVAEHEKLILLAQLKPEKDSDEAVTYSLGKFGQRALDFYSIHVTKESTHPVKPLAQIAGNRYASSPVGKALSDACMGTIASFLSKYQDIIIEHQKVVKGNQKRLESLRELAGKENLEYPSVTLPPQPHTKEGVDAYNEVIARVRMWVNLNLWQKLKLSRDDAKPLLRLKGFPSFPLVERQANEVDWWDMVCNVKKLINEKKEDGKVFWQNLAGYKRQEALRPYLSSEEDRKKGKKFARYQLGDLLLHLEKKHGEDWGKVYDEAWERIDKKVEGLSKHIKLEEERRSEDAQSKAALTDWLRAKASFVIEGLKEADKDEFCRCELKLQKWYGDLRGKPFAIEAENSILDISGFSKQYNCAFIWQKDGVKKLNLYLIINYFKGGKLRFKKIKPEAFEANRFYTVINKKSGEIVIMEVNFNFDDPNLIILPLAFGKRQGREFIWNDLLSLETGSLKLANGRVIEKTLYNRRTRQDEPALFVALTFERREVLDSSNIKPMNLIGVDRGENIPAVIALTDPEGCPLSRFKDSLGNPTHILRIGESYKEKQRTIQAKKEVEQRRAGGYSRKYASKAKNLADDMVRNTARDLLYYAVTQDAMLIFENLSRGFGRQGKRTFMAERQYTRMEDWLTAKLAYEGLPSKTYLSKTLAQYTSKTCSNCGFTITSADYDRVLEKLKKTATGWMTTINGKELKVEGQITYYNRYKRQNVVKDLSVELDRLSEESVNNDISSWTKGRSGEALSLLKKRFSHRPVQEKFVCLNCGFETHADEQAALNIARSWLFLRSQEYKKYQTNKTTGNTDKRAFVETWQSFYRKKLKEVWKPAV

SEQ ID NO: 41117 - protein, 978 aa, synthetic construct
  REGION 1..978: note = engineered CasX variant
QEGKRINKIRRRLVKDSNTKKAGKTGPMKTLLVRVMTPDLRERLENLRKKPENIPQPISNTSRANLNKLLTDYTEMKKAILHVYWEEFQKDPVGLMSRVAQPASKKIDQNKLKPEMDEKGNLTTAGFACSQCGQPLFVYKLEQVSEKGKAYTNYFGRCNVAEHEKLILLAQLKPEKDSDEAVTYSLGKFGQRALDFYSIHVTKESTHPVKPLAQIAGNRYASTPVGKALSDACMGTIASFLSKYQDIIIEHQKVVKGNQKRLESLRELAGKENLEYPSVTLPPQPHTKEGVDAYNEVIARVRMWVNLNLWQKLKLSRDDAKPLLRLKGFPSFPLVERQANEVDWWDMVCNVKKLINEKKEDGKVFWQNLAGYKRQEALRPYLSSEEDRKKGKKFARYQLGDLLLHLEKKHGEDWGKVYDEAWERIDKKVEGLSKHIKLEEERRSEDAQSKAALTDWLRAKASFVIEGLKEADKDEFCRCELKLQKWYGDLRGKPFAIEAENSILDISGFSKQYNCAFIWQKDGVKKLNLYLIINYFKGGKLRFKKIKPEAFEANRFYTVINKKSGEIVIMEVNFNFDDPNLIILPLAFGKRQGREFIWNDLLSLETGSLKLANGRVIEKTLYNRRTRQDEPALFVALTFERREVLDSSNIKPMNLIGVDRGENIPAVIALTDPEGCPLSRFKDSLGNPTHILRIGESYKEKQRTIQAKKEVEQRRAGGYSRKYASKAKNLADDMVRNTARDLLYYAVTQDAMLIFENLSRGFGRQGKRTFMAERQYTRMEDWLTAKLAYEGLPSKTYLSKTLAQYTSKTCSNCGFTITSADYDRVLEKLKKTATGWMTTINGKELKVEGQITYYNRYKRQNVVKDLSVELDRLSEESVNNDISSWTKGRSGEALSLLKKRFSHRPVQEKFVCLNCGFETHADEQAALNIARSWLFLRSQEYKKYQTNKTTGNTDKRAFVETWQSFYRKKLKEVWKPAV

SEQ ID NO: 41118 - protein, 978 aa, synthetic construct
  REGION 1..978: note = engineered CasX variant
QEGKRINKIRRRLVKDSNTKKAGKTGPMKTLLVRVMTPDLRERLENLRKKPENIPQPISNTSRANLNKLLTDYTEMKKAILHVYWEEFQKDPVGLMSRVAQPASKKIDQNKLKPEMDEKGNLTTAGFACSQCGQPLFVYKLEQVSEKGKAYTNYFGRCNVAEHEKLILLAQLKPEKDSDEAVTYSLGKFGQRALDFYSIHVTKESTHPVKPLAQIAGNRYASAPVGKALSDACMGTIASFLSKYQDIIIEHQKVVKGNQKRLESLRELAGKENLEYPSVTLPPQPHTKEGVDAYNEVIARVRMWVNLNLWQKLKLSRDDAKPLLRLKGFPSFPLVERQANEVDWWDMVCNVKKLINEKKEDGKVFWQNLAGYKRQEALRPYLSSEEDRKKGKKFARYQLGDLLLHLEKKHGEDWGKVYDEAWERIDKKVEGLSKHIKLEEERRSEDAQSKAALTDWLRAKASFVIEGLKEADKDEFCRCELKLQKWYGDLRGKPFAIEAENSILDISGFSKQYNCAFIWQKDGVKKLNLYLIINYFKGGKLRFKKIKPEAFEANRFYTVINKKSGEIVIMEVNFNFDDPNLIILPLAFGKRQGREFIWNDLLSLETGSLKLANGRVIEKTLYNRRTRQDEPALFVALTFERREVLDSSNIKPMNLIGVDRGENIPAVIALTDPEGCPLSRFKDSLGNPTHILRIGESYKEKQRTIQAKKEVEQRRAGGYSRKYASKAKNLADDMVRNTARDLLYYAVTQDAMLIFENLSRGFGRQGKRTFMAERQYTRMEDWLTAKLAYEGLPSKTYLSKTLAQYTSKTCSNCGFTITSADYDRVLEKLKKTATGWMTTINGKELKVEGQITYYNRYKRQNVVKDLSVELDRLSEESVNNDISSWTKGRSGEALSLLKKRFSHRPVQEKFVCLNCGFETHADEQAALNIARSWLFLRSQEYKKYQTNKTTGNTDKRAFVETWQSFYRKKLKEVWKPAV

SEQ ID NO: 41119 - protein, 978 aa, synthetic construct
  REGION 1..978: note = engineered CasX variant
QEGKRINKIRRRLVKDSNTKKAGKTGPMKTLLVRVMTPDLRERLENLRKKPENIPQPISNTSRANLNKLLTDYTEMKKAILHVYWEEFQKDPVGLMSRVAQPASKKIDQNKLKPEMDEKGNLTTAGFACSQCGQPLFVYKLEQVSEKGKAYTNYFGRCNVAEHEKLILLAQLKPEKDSDEAVTYSLGKFGQRALDFYSIHVTKESTHPVKPLAQIAGNRYASVPVGKALSDACMGTIASFLSKYQDIIIEHQKVVKGNQKRLESLRELAGKENLEYPSVTLPPQPHTKEGVDAYNEVIARVRMWVNLNLWQKLKLSRDDAKPLLRLKGFPSFPLVERQANEVDWWDMVCNVKKLINEKKEDGKVFWQNLAGYKRQEALRPYLSSEEDRKKGKKFARYQLGDLLLHLEKKHGEDWGKVYDEAWERIDKKVEGLSKHIKLEEERRSEDAQSKAALTDWLRAKASFVIEGLKEADKDEFCRCELKLQKWYGDLRGKPFAIEAENSILDISGFSKQYNCAFIWQKDGVKKLNLYLIINYFKGGKLRFKKIKPEAFEANRFYTVINKKSGEIVIMEVNFNFDDPNLIILPLAFGKRQGREFIWNDLLSLETGSLKLANGRVIEKTLYNRRTRQDEPALFVALTFERREVLDSSNIKPMNLIGVDRGENIPAVIALTDPEGCPLSRFKDSLGNPTHILRIGESYKEKQRTIQAKKEVEQRRAGGYSRKYASKAKNLADDMVRNTARDLLYYAVTQDAMLIFENLSRGFGRQGKRTFMAERQYTRMEDWLTAKLAYEGLPSKTYLSKTLAQYTSKTCSNCGFTITSADYDRVLEKLKKTATGWMTTINGKELKVEGQITYYNRYKRQNVVKDLSVELDRLSEESVNNDISSWTKGRSGEALSLLKKRFSHRPVQEKFVCLNCGFETHADEQAALNIARSWLFLRSQEYKKYQTNKTTGNTDKRAFVETWQSFYRKKLKEVWKPAV

SEQ ID NO: 41120 - protein, 978 aa, synthetic construct
  REGION 1..978: note = engineered CasX variant
QEGKRINKIRRRLVKDSNTKKAGKTGPMKTLLVRVMTPDLRERLENLRKKPENIPQPISNTSRANLNKLLTDYTEMKKAILHVYWEEFQKDPVGLMSRVAQPASKKIDQNKLKPEMDEKGNLTTAGFACSQCGQPLFVYKLEQVSEKGKAYTNYFGRCNVAEHEKLIKLAQLKPEKDSDEAVTYSLGKFGQRALDFYSIHVTKESTHPVKPLAQIAGNRYASGPVGKALSDACMGTIASFLSKYQDIIIEHQKVVKGNQKRLESLRELAGKENLEYPSVTLPPQPHTKEGVDAYNEVIARVRMWVNLNLWQKLKLSRDDAKPLLRLKGFPSFPLVERQANEVDWWDMVCNVKKLINEKKEDGKVFWQNLAGYKRQEALRPYLSSEEDRKKGKKFARYQLGDLLLHLEKKHGEDWGKVYDEAWERIDKKVEGLSKHIKLEEERRSEDAQSKAALTDWLRAKASFVIEGLKEADKDEFCRCELKLQKWYGDLRGKPFAIEAENSILDISGFSKQYNCAFIWQKDGVKKLNLYLIINYFKGGKLRFKKIKPEAFEANRFYTVINKKSGEIVIMEVNFNFDDPNLIILPLAFGKRQGREFIWNDLLSLETGSLKLANGRVIEKTLYNRRTRQDEPALFVALTFERREVLDSSNIKPMNLIGVDRGENIPAVIALTDPEGCPLSRFKDSLGNPTHILRIGESYKEKQRTIQAKKEVEQRRAGGYSRKYASKAKNLADDMVRNTARDLLYYAVTQDAMLIFENLSRGFGRQGKRTFMAERQYTRMEDWLTAKLAYEGLPSKTYLSKTLAQYTSKTCSNCGFTITSADYDRVLEKLKKTATGWMTTINGKELKVEGQITYYNRYKRQNVVKDLSVELDRLSEESVNNDISSWTKGRSGEALSLLKKRFSHRPVQEKFVCLNCGFETHADEQAALNIARSWLFLRSQEYKKYQTNKTTGNTDKRAFVETWQSFYRKKLKEVWKPAV

SEQ ID NO: 41121 - protein, 977 aa, synthetic construct
  REGION 1..977: note = engineered CasX variant
QEGKRINKIRRRLVKDSNTKKAGKTGPMKTLLVRVMTPDLRERLENLRKKPENIPQPISNTSRANLNKLLTDYTEMKKAILHVYWEEFQKDPVGLMSRVAQPASKKIDQNKLKPEMDEKGNLTTAGFACSQCGQPLFVYKLEQVSEKGKAYTNYFGRCNVAEHEKLILLAQLKPEKDSDEAVTYSLGKFGQRALDFYSIHVTKESTHPVKPLAQIAGNRYASPVGKALSDACMGTIASFLSKYQDIIIEHQKVVKGNQKRLESLRELAGKENLEYPSVTLPPQPHTKEGVDAYNEVIARVRMWVNLNLWQKLKLSRDDAKPLLRLKGFPSFPLVERQANEVDWWDMVCNVKKLINEKKEDGKVFWQNLAGYKRQEALRPYLSSEEDRKKGKKFARYQLGDLLLHLEKKHGEDWGKVYDEAWERIDKKVEGLSKHIKLEEERRSEDAQSKAALTDWLRAKASFVIEGLKEADKDEFCRCELKLQKWYGDLRGKPFAIEAENSILDISGFSKQYNCAFIWQKDGVKKLNLYLIINYFKGGKLRFKKIKPEAFEANRFYTVINKKSGEIVIMEVNFNFDDPNLIILPLAFGKRQGREFIWNDLLSLETGSLKLANGRVIEKTLYNRRTRQDEPALFVALTFERREVLDSSNIKPMNLIGVDRGENIPAVIALTDPEGCPLSRFKDSLGNPTHILRIGESYKEKQRTIQAKKEVEQRRAGGYSRKYASKAKNLADDMVRNTARDLLYYAVTQDAMLIFENLSRGFGRQGKRTFMAERQYTRMEDWLTAKLAYEGLPSKTYLSKTLAQYTSKTCSNCGFTITSADYDRVLEKLKKTATGWMTTINGKELKVEGQITYYNRYKRQNVVKDLSVELDRLSEESVNNDISSWTKGRSGEALSLLKKRFSHRPVQEKFVCLNCGFETHADEQAALNIARSWLFLRSQEYKKYQTNKTTGNTDKRAFVETWQSFYRKKLKEVWKPAV

SEQ ID NO: 41122 - protein, 979 aa, synthetic construct
  REGION 1..979: note = engineered CasX variant
QEIGKRINKIRRRLVKDSNTKKAGKTGPMKTLLVRVMTPDLRERLENLRKKPENIPQPISNTSRANLNKLLTDYTEMKKAILHVYWEEFQKDPVGLMSRVAQPASKKIDQNKLKPEMDEKGNLTTAGFACSQCGQPLFVYKLEQVSEKGKAYTNYFGRCNVAEHEKLILLAQLKPEKDSDEAVTYSLGKFGQRALDFYSIHVTKESTHPVKPLAQIAGNRYASYPVGKALSGACMGTIASFLSKYQDIIIEHQKVVKGNQKRLESLRELAGKENLEYPSVTLPPQPHTKEGVDAYNEVIARVRMWVNLNLWQKLKLSRDDAKPLLRLKGFPSFPLVERQANEVDWWDMVCNVKKLINEKKEDGKVFWQNLAGYKRQEALRPYLSSEEDRKKGKKFARYQLGDLLLHLEKKHGEDWGKVYDEAWERIDKKVEGLSKHIKLEEERRSEDAQSKAALTDWLRAKASFVIEGLKEADKDEFCRCELKLQKWYGDLRGKPFAIEAENSILDISGFSKQYNCAFIWQKDGVKKLNLYLIINYFKGGKLRFKKIKPEAFEANRFYTVINKKSGEIVPMEVNFNFDDPNLIILPLAFGKRQGREFIWNDLLSLETGSLKLANGRVIEKTLYNRRTRQDEPALFVALTFERREVLDSSNIKPMNLIGVDRGENIPAVIALTDPEGCPLSRFKDSLGNPTHILRIGESYKEKQRTIQAKKEVEQRRAGGYSRKYASKAKNLADDMVRNTARDLLYYAVTQDAMLIFENLSRGFGRQGKRTFMAERQYTRMEDWLTAKLAYEGLPSKTYLSKTLAQYTSKTCSNCGFTITSADYDRVLEKLKKTATGWMTTINGKELKVEGQITYYNRYKRQNVVKDLSVELDRLSEESVNNDISSWTKGRSGEALSLLKKRFSHRPVQEKFVCLNCGFETHADEQAALNIARSWLFLRSQEYKKYQTNKTTGNTDKRAFVETWQSFYRKKLKEVWKPAV

SEQ ID NO: 41123 - protein, 979 aa, synthetic construct
  REGION 1..979: note = engineered CasX variant
QEIGKRINKIRRRLVKDSNTKKAGKTGPMKTLLVRVMTPDLRERLENLRKKPENIPQPISNTSRANLNKLLTDYTEMKKAILHVYWEEFQKDPVGLMSRVAQPASKKIDQNKLKPEMDEKGNLTTAGFACSQCGQPLFVYKLEQVSEKGKAYTNYFGRCNVAEHEKLILLAQLKPEKDSDEAVTYSLGKFGQRALDFYSIHVTKESTHPVKPLAQIAGNRYASHPVGKALSGACMGTIASFLSKYQDIIIEHQKVVKGNQKRLESLRELAGKENLEYPSVTLPPQPHTKEGVDAYNEVIARVRMWVNLNLWQKLKLSRDDAKPLLRLKGFPSFPLVERQANEVDWWDMVCNVKKLINEKKEDGKVFWQNLAGYKRQEALRPYLSSEEDRKKGKKFARYQLGDLLLHLEKKHGEDWGKVYDEAWERIDKKVEGLSKHIKLEEERRSEDAQSKAALTDWLRAKASFVIEGLKEADKDEFCRCELKLQKWYGDLRGKPFAIEAENSILDISGFSKQYNCAFIWQKDGVKKLNLYLIINYFKGGKLRFKKIKPEAFEANRFYTVINKKSGEIVPMEVNFNFDDPNLIILPLAFGKRQGREFIWNDLLSLETGSLKLANGRVIEKTLYNRRTRQDEPALFVALTFERREVLDSSNIKPMNLIGVDRGENIPAVIALTDPEGCPLSRFKDSLGNPTHILRIGESYKEKQRTIQAKKEVEQRRAGGYSRKYASKAKNLADDMVRNTARDLLYYAVTQDAMLIFENLSRGFGRQGKRTFMAERQYTRMEDWLTAKLAYEGLPSKTYLSKTLAQYTSKTCSNCGFTITSADYDRVLEKLKKTATGWMTTINGKELKVEGQITYYNRYKRQNVVKDLSVELDRLSEESVNNDISSWTKGRSGEALSLLKKRFSHRPVQEKFVCLNCGFETHADEQAALNIARSWLFLRSQEYKKYQTNKTTGNTDKRAFVETWQSFYRKKLKEVWKPAV

SEQ ID NO: 41124 - protein, 979 aa, synthetic construct
  REGION 1..979: note = engineered CasX variant
QEIGKRINKIRRRLVKDSNTKKAGKTGPMKTLLVRVMTPDLRERLENLRKKPENIPQPISNTSRANLNKLLTDYTEMKKAILHVYWEEFQKDPVGLMSRVAQPASKKIDQNKLKPEMDEKGNLTTAGFACSQCGQPLFVYKLEQVSEKGKAYTNYFGRCNVAEHEKLILLAQLKPEKDSDEAVTYSLGKFGQRALDFYSIHVTKESTHPVKPLAQIAGNRYASSPVGKALSGACMGTIASFLSKYQDIIIEHQKVVKGNQKRLESLRELAGKENLEYPSVTLPPQPHTKEGVDAYNEVIARVRMWVNLNLWQKLKLSRDDAKPLLRLKGFPSFPLVERQANEVDWWDMVCNVKKLINEKKEDGKVFWQNLAGYKRQEALRPYLSSEEDRKKGKKFARYQLGDLLLHLEKKHGEDWGKVYDEAWERIDKKVEGLSKHIKLEEERRSEDAQSKAALTDWLRAKASFVIEGLKEADKDEFCRCELKLQKWYGDLRGKPFAIEAENSILDISGFSKQYNCAFIWQKDGVKKLNLYLIINYFKGGKLRFKKIKPEAFEANRFYTVINKKSGEIVPMEVNFNFDDPNLIILPLAFGKRQGREFIWNDLLSLETGSLKLANGRVIEKTLYNRRTRQDEPALFVALTFERREVLDSSNIKPMNLIGVDRGENIPAVIALTDPEGCPLSRFKDSLGNPTHILRIGESYKEKQRTIQAKKEVEQRRAGGYSRKYASKAKNLADDMVRNTARDLLYYAVTQDAMLIFENLSRGFGRQGKRTFMAERQYTRMEDWLTAKLAYEGLPSKTYLSKTLAQYTSKTCSNCGFTITSADYDRVLEKLKKTATGWMTTINGKELKVEGQITYYNRYKRQNVVKDLSVELDRLSEESVNNDISSWTKGRSGEALSLLKKRFSHRPVQEKFVCLNCGFETHADEQAALNIARSWLFLRSQEYKKYQTNKTTGNTDKRAFVETWQSFYRKKLKEVWKPAV

SEQ ID NO: 41125 - protein, 979 aa, synthetic construct
  REGION 1..979: note = engineered CasX variant
QEIGKRINKIRRRLVKDSNTKKAGKTGPMKTLLVRVMTPDLRERLENLRKKPENIPQPISNTSRANLNKLLTDYTEMKKAILHVYWEEFQKDPVGLMSRVAQPASKKIDQNKLKPEMDEKGNLTTAGFACSQCGQPLFVYKLEQVSEKGKAYTNYFGRCNVAEHEKLILLAQLKPEKDSDEAVTYSLGKFGQRALDFYSIHVTKESTHPVKPLAQIAGNRYASTPVGKALSGACMGTIASFLSKYQDIIIEHQKVVKGNQKRLESLRELAGKENLEYPSVTLPPQPHTKEGVDAYNEVIARVRMWVNLNLWQKLKLSRDDAKPLLRLKGFPSFPLVERQANEVDWWDMVCNVKKLINEKKEDGKVFWQNLAGYKRQEALRPYLSSEEDRKKGKKFARYQLGDLLLHLEKKHGEDWGKVYDEAWERIDKKVEGLSKHIKLEEERRSEDAQSKAALTDWLRAKASFVIEGLKEADKDEFCRCELKLQKWYGDLRGKPFAIEAENSILDISGFSKQYNCAFIWQKDGVKKLNLYLIINYFKGGKLRFKKIKPEAFEANRFYTVINKKSGEIVPMEVNFNFDDPNLIILPLAFGKRQGREFIWNDLLSLETGSLKLANGRVIEKTLYNRRTRQDEPALFVALTFERREVLDSSNIKPMNLIGVDRGENIPAVIALTDPEGCPLSRFKDSLGNPTHILRIGESYKEKQRTIQAKKEVEQRRAGGYSRKYASKAKNLADDMVRNTARDLLYYAVTQDAMLIFENLSRGFGRQGKRTFMAERQYTRMEDWLTAKLAYEGLPSKTYLSKTLAQYTSKTCSNCGFTITSADYDRVLEKLKKTATGWMTTINGKELKVEGQITYYNRYKRQNVVKDLSVELDRLSEESVNNDISSWTKGRSGEALSLLKKRFSHRPVQEKFVCLNCGFETHADEQAALNIARSWLFLRSQEYKKYQTNKTTGNTDKRAFVETWQSFYRKKLKEVWKPAV

SEQ ID NO: 41126 - protein, 979 aa, synthetic construct
  REGION 1..979: note = engineered CasX variant
QEIGKRINKIRRRLVKDSNTKKAGKTGPMKTLLVRVMTPDLRERLENLRKKPENIPQPISNTSRANLNKLLTDYTEMKKAILHVYWEEFQKDPVGLMSRVAQPASKKIDQNKLKPEMDEKGNLTTAGFACSQCGQPLFVYKLEQVSEKGKAYTNYFGRCNVAEHEKLILLAQLKPEKDSDEAVTYSLGKFGQRALDFYSIHVTKESTHPVKPLAQIAGNRYASAPVGKALSGACMGTIASFLSKYQDIIIEHQKVVKGNQKRLESLRELAGKENLEYPSVTLPPQPHTKEGVDAYNEVIARVRMWVNLNLWQKLKLSRDDAKPLLRLKGFPSFPLVERQANEVDWWDMVCNVKKLINEKKEDGKVFWQNLAGYKRQEALRPYLSSEEDRKKGKKFARYQLGDLLLHLEKKHGEDWGKVYDEAWERIDKKVEGLSKHIKLEEERRSEDAQSKAALTDWLRAKASFVIEGLKEADKDEFCRCELKLQKWYGDLRGKPFAIEAENSILDISGFSKQYNCAFIWQKDGVKKLNLYLIINYFKGGKLRFKKIKPEAFEANRFYTVINKKSGEIVPMEVNFNFDDPNLIILPLAFGKRQGREFIWNDLLSLETGSLKLANGRVIEKTLYNRRTRQDEPALFVALTFERREVLDSSNIKPMNLIGVDRGENIPAVIALTDPEGCPLSRFKDSLGNPTHILRIGESYKEKQRTIQAKKEVEQRRAGGYSRKYASKAKNLADDMVRNTARDLLYYAVTQDAMLIFENLSRGFGRQGKRTFMAERQYTRMEDWLTAKLAYEGLPSKTYLSKTLAQYTSKTCSNCGFTITSADYDRVLEKLKKTATGWMTTINGKELKVEGQITYYNRYKRQNVVKDLSVELDRLSEESVNNDISSWTKGRSGEALSLLKKRFSHRPVQEKFVCLNCGFETHADEQAALNIARSWLFLRSQEYKKYQTNKTTGNTDKRAFVETWQSFYRKKLKEVWKPAV

SEQ ID NO: 41127 - protein, 979 aa, synthetic construct
  REGION 1..979: note = engineered CasX variant
QEIGKRINKIRRRLVKDSNTKKAGKTGPMKTLLVRVMTPDLRERLENLRKKPENIPQPISNTSRANLNKLLTDYTEMKKAILHVYWEEFQKDPVGLMSRVAQPASKKIDQNKLKPEMDEKGNLTTAGFACSQCGQPLFVYKLEQVSEKGKAYTNYFGRCNVAEHEKLILLAQLKPEKDSDEAVTYSLGKFGQRALDFYSIHVTKESTHPVKPLAQIAGNRYASVPVGKALSGACMGTIASFLSKYQDIIIEHQKVVKGNQKRLESLRELAGKENLEYPSVTLPPQPHTKEGVDAYNEVIARVRMWVNLNLWQKLKLSRDDAKPLLRLKGFPSFPLVERQANEVDWWDMVCNVKKLINEKKEDGKVFWQNLAGYKRQEALRPYLSSEEDRKKGKKFARYQLGDLLLHLEKKHGEDWGKVYDEAWERIDKKVEGLSKHIKLEEERRSEDAQSKAALTDWLRAKASFVIEGLKEADKDEFCRCELKLQKWYGDLRGKPFAIEAENSILDISGFSKQYNCAFIWQKDGVKKLNLYLIINYFKGGKLRFKKIKPEAFEANRFYTVINKKSGEIVPMEVNFNFDDPNLIILPLAFGKRQGREFIWNDLLSLETGSLKLANGRVIEKTLYNRRTRQDEPALFVALTFERREVLDSSNIKPMNLIGVDRGENIPAVIALTDPEGCPLSRFKDSLGNPTHILRIGESYKEKQRTIQAKKEVEQRRAGGYSRKYASKAKNLADDMVRNTARDLLYYAVTQDAMLIFENLSRGFGRQGKRTFMAERQYTRMEDWLTAKLAYEGLPSKTYLSKTLAQYTSKTCSNCGFTITSADYDRVLEKLKKTATGWMTTINGKELKVEGQITYYNRYKRQNVVKDLSVELDRLSEESVNNDISSWTKGRSGEALSLLKKRFSHRPVQEKFVCLNCGFETHADEQAALNIARSWLFLRSQEYKKYQTNKTTGNTDKRAFVETWQSFYRKKLKEVWKPAV

SEQ ID NO: 41128 - protein, 979 aa, synthetic construct
  REGION 1..979: note = engineered CasX variant
QEIGKRINKIRRRLVKDSNTKKAGKTGPMKTLLVRVMTPDLRERLENLRKKPENIPQPISNTSRANLNKLLTDYTEMKKAILHVYWEEFQKDPVGLMSRVAQPASKKIDQNKLKPEMDEKGNLTTAGFACSQCGQPLFVYKLEQVSEKGKAYTNYFGRCNVAEHEKLIKLAQLKPEKDSDEAVTYSLGKFGQRALDFYSIHVTKESTHPVKPLAQIAGNRYASGPVGKALSGACMGTIASFLSKYQDIIIEHQKVVKGNQKRLESLRELAGKENLEYPSVTLPPQPHTKEGVDAYNEVIARVRMWVNLNLWQKLKLSRDDAKPLLRLKGFPSFPLVERQANEVDWWDMVCNVKKLINEKKEDGKVFWQNLAGYKRQEALRPYLSSEEDRKKGKKFARYQLGDLLLHLEKKHGEDWGKVYDEAWERIDKKVEGLSKHIKLEEERRSEDAQSKAALTDWLRAKASFVIEGLKEADKDEFCRCELKLQKWYGDLRGKPFAIEAENSILDISGFSKQYNCAFIWQKDGVKKLNLYLIINYFKGGKLRFKKIKPEAFEANRFYTVINKKSGEIVPMEVNFNFDDPNLIILPLAFGKRQGREFIWNDLLSLETGSLKLANGRVIEKTLYNRRTRQDEPALFVALTFERREVLDSSNIKPMNLIGVDRGENIPAVIALTDPEGCPLSRFKDSLGNPTHILRIGESYKEKQRTIQAKKEVEQRRAGGYSRKYASKAKNLADDMVRNTARDLLYYAVTQDAMLIFENLSRGFGRQGKRTFMAERQYTRMEDWLTAKLAYEGLPSKTYLSKTLAQYTSKTCSNCGFTITSADYDRVLEKLKKTATGWMTTINGKELKVEGQITYYNRYKRQNVVKDLSVELDRLSEESVNNDISSWTKGRSGEALSLLKKRFSHRPVQEKFVCLNCGFETHADEQAALNIARSWLFLRSQEYKKYQTNKTTGNTDKRAFVETWQSFYRKKLKEVWKPAV

SEQ ID NO: 41129 - protein, 978 aa, synthetic construct
  REGION 1..978: note = engineered CasX variant
QEIGKRINKIRRRLVKDSNTKKAGKTGPMKTLLVRVMTPDLRERLENLRKKPENIPQPISNTSRANLNKLLTDYTEMKKAILHVYWEEFQKDPVGLMSRVAQPASKKIDQNKLKPEMDEKGNLTTAGFACSQCGQPLFVYKLEQVSEKGKAYTNYFGRCNVAEHEKLILLAQLKPEKDSDEAVTYSLGKFGQRALDFYSIHVTKESTHPVKPLAQIAGNRYASPVGKALSGACMGTIASFLSKYQDIIIEHQKVVKGNQKRLESLRELAGKENLEYPSVTLPPQPHTKEGVDAYNEVIARVRMWVNLNLWQKLKLSRDDAKPLLRLKGFPSFPLVERQANEVDWWDMVCNVKKLINEKKEDGKVFWQNLAGYKRQEALRPYLSSEEDRKKGKKFARYQLGDLLLHLEKKHGEDWGKVYDEAWERIDKKVEGLSKHIKLEEERRSEDAQSKAALTDWLRAKASFVIEGLKEADKDEFCRCELKLQKWYGDLRGKPFAIEAENSILDISGFSKQYNCAFIWQKDGVKKLNLYLIINYFKGGKLRFKKIKPEAFEANRFYTVINKKSGEIVPMEVNFNFDDPNLIILPLAFGKRQGREFIWNDLLSLETGSLKLANGRVIEKTLYNRRTRQDEPALFVALTFERREVLDSSNIKPMNLIGVDRGENIPAVIALTDPEGCPLSRFKDSLGNPTHILRIGESYKEKQRTIQAKKEVEQRRAGGYSRKYASKAKNLADDMVRNTARDLLYYAVTQDAMLIFENLSRGFGRQGKRTFMAERQYTRMEDWLTAKLAYEGLPSKTYLSKTLAQYTSKTCSNCGFTITSADYDRVLEKLKKTATGWMTTINGKELKVEGQITYYNRYKRQNVVKDLSVELDRLSEESVNNDISSWTKGRSGEALSLLKKRFSHRPVQEKFVCLNCGFETHADEQAALNIARSWLFLRSQEYKKYQTNKTTGNTDKRAFVETWQSFYRKKLKEVWKPAV

SEQ ID NO: 41130 - protein, 979 aa, synthetic construct
  REGION 1..979: note = engineered CasX variant
QEIGKRINKIRRRLVKDSNTKKAGKTGPMKTLLVRVMTPDLRERLENLRKKPENIPQPISNTSRANLNKLLTDYTEMKKAILHVYWEEFQKDPVGLMSRVAQPASKKIDQNKLKPEMDEKGNLTTAGFACSQCGQPLFVYKLEQVSEKGKAYTNYFGRCNVAEHEKLILLAQLKPEKDSDEAVTYSLGKFGQRALDFYSIHVTKESTHPVKPLAQIAGNRYASYPVGKALSDACMGTIASFLSKYQDIIIEHQKVVKGNQKRLESLRELAGKENLEYPSVTLPPQPHTKEGVDAYNEVIARVRMWVNLNLWQKLKLSRDDAKPLLRLKNFPSFPLVERQANEVDWWDMVCNVKKLINEKKEDGKVFWQNLAGYKRQEALRPYLSSEEDRKKGKKFARYQLGDLLLHLEKKHGEDWGKVYDEAWERIDKKVEGLSKHIKLEEERRSEDAQSKAALTDWLRAKASFVIEGLKEADKDEFCRCELKLQKWYGDLRGKPFAIEAENSILDISGFSKQYNCAFIWQKDGVKKLNLYLIINYFKGGKLRFKKIKPEAFEANRFYTVINKKSGEIVPMEVNFNFDDPNLIILPLAFGKRQGREFIWNDLLSLETGSLKLANGRVIEKTLYNRRTRQDEPALFVALTFERREVLDSSNIKPMNLIGVDRGENIPAVIALTDPEGCPLSRFKDSLGNPTHILRIGESYKEKQRTIQAKKEVEQRRAGGYSRKYASKAKNLADDMVRNTARDLLYYAVTQDAMLIFENLSRGFGRQGKRTFMAERQYTRMEDWLTAKLAYEGLPSKTYLSKTLAQYTSKTCSNCGFTITSADYDRVLEKLKKTATGWMTTINGKELKVEGQITYYNRYKRQNVVKDLSVELDRLSEESVNNDISSWTKGRSGEALSLLKKRFSHRPVQEKFVCLNCGFETHADEQAALNIARSWLFLRSQEYKKYQTNKTTGNTDKRAFVETWQSFYRKKLKEVWKPAV

SEQ ID NO: 41131 - protein, 979 aa, synthetic construct
  REGION 1..979: note = engineered CasX variant
QEIGKRINKIRRRLVKDSNTKKAGKTGPMKTLLVRVMTPDLRERLENLRKKPENIPQPISNTSRANLNKLLTDYTEMKKAILHVYWEEFQKDPVGLMSRVAQPASKKIDQNKLKPEMDEKGNLTTAGFACSQCGQPLFVYKLEQVSEKGKAYTNYFGRCNVAEHEKLILLAQLKPEKDSDEAVTYSLGKFGQRALDFYSIHVTKESTHPVKPLAQIAGNRYASHPVGKALSDACMGTIASFLSKYQDIIIEHQKVVKGNQKRLESLRELAGKENLEYPSVTLPPQPHTKEGVDAYNEVIARVRMWVNLNLWQKLKLSRDDAKPLLRLKNFPSFPLVERQANEVDWWDMVCNVKKLINEKKEDGKVFWQNLAGYKRQEALRPYLSSEEDRKKGKKFARYQLGDLLLHLEKKHGEDWGKVYDEAWERIDKKVEGLSKHIKLEEERRSEDAQSKAALTDWLRAKASFVIEGLKEADKDEFCRCELKLQKWYGDLRGKPFAIEAENSILDISGFSKQYNCAFIWQKDGVKKLNLYLIINYFKGGKLRFKKIKPEAFEANRFYTVINKKSGEIVPMEVNFNFDDPNLIILPLAFGKRQGREFIWNDLLSLETGSLKLANGRVIEKTLYNRRTRQDEPALFVALTFERREVLDSSNIKPMNLIGVDRGENIPAVIALTDPEGCPLSRFKDSLGNPTHILRIGESYKEKQRTIQAKKEVEQRRAGGYSRKYASKAKNLADDMVRNTARDLLYYAVTQDAMLIFENLSRGFGRQGKRTFMAERQYTRMEDWLTAKLAYEGLPSKTYLSKTLAQYTSKTCSNCGFTITSADYDRVLEKLKKTATGWMTTINGKELKVEGQITYYNRYKRQNVVKDLSVELDRLSEESVNNDISSWTKGRSGEALSLLKKRFSHRPVQEKFVCLNCGFETHADEQAALNIARSWLFLRSQEYKKYQTNKTTGNTDKRAFVETWQSFYRKKLKEVWKPAV

SEQ ID NO: 41132 - protein, 979 aa, synthetic construct
  REGION 1..979: note = engineered CasX variant
QEIGKRINKIRRRLVKDSNTKKAGKTGPMKTLLVRVMTPDLRERLENLRKKPENIPQPISNTSRANLNKLLTDYTEMKKAILHVYWEEFQKDPVGLMSRVAQPASKKIDQNKLKPEMDEKGNLTTAGFACSQCGQPLFVYKLEQVSEKGKAYTNYFGRCNVAEHEKLILLAQLKPEKDSDEAVTYSLGKFGQRALDFYSIHVTKESTHPVKPLAQIAGNRYASSPVGKALSDACMGTIASFLSKYQDIIIEHQKVVKGNQKRLESLRELAGKENLEYPSVTLPPQPHTKEGVDAYNEVIARVRMWVNLNLWQKLKLSRDDAKPLLRLKNFPSFPLVERQANEVDWWDMVCNVKKLINEKKEDGKVFWQNLAGYKRQEALRPYLSSEEDRKKGKKFARYQLGDLLLHLEKKHGEDWGKVYDEAWERIDKKVEGLSKHIKLEEERRSEDAQSKAALTDWLRAKASFVIEGLKEADKDEFCRCELKLQKWYGDLRGKPFAIEAENSILDISGFSKQYNCAFIWQKDGVKKLNLYLIINYFKGGKLRFKKIKPEAFEANRFYTVINKKSGEIVPMEVNFNFDDPNLIILPLAFGKRQGREFIWNDLLSLETGSLKLANGRVIEKTLYNRRTRQDEPALFVALTFERREVLDSSNIKPMNLIGVDRGENIPAVIALTDPEGCPLSRFKDSLGNPTHILRIGESYKEKQRTIQAKKEVEQRRAGGYSRKYASKAKNLADDMVRNTARDLLYYAVTQDAMLIFENLSRGFGRQGKRTFMAERQYTRMEDWLTAKLAYEGLPSKTYLSKTLAQYTSKTCSNCGFTITSADYDRVLEKLKKTATGWMTTINGKELKVEGQITYYNRYKRQNVVKDLSVELDRLSEESVNNDISSWTKGRSGEALSLLKKRFSHRPVQEKFVCLNCGFETHADEQAALNIARSWLFLRSQEYKKYQTNKTTGNTDKRAFVETWQSFYRKKLKEVWKPAV

SEQ ID NO: 41133 - protein, 979 aa, synthetic construct
  REGION 1..979: note = engineered CasX variant
QEIGKRINKIRRRLVKDSNTKKAGKTGPMKTLLVRVMTPDLRERLENLRKKPENIPQPISNTSRANLNKLLTDYTEMKKAILHVYWEEFQKDPVGLMSRVAQPASKKIDQNKLKPEMDEKGNLTTAGFACSQCGQPLFVYKLEQVSEKGKAYTNYFGRCNVAEHEKLILLAQLKPEKDSDEAVTYSLGKFGQRALDFYSIHVTKESTHPVKPLAQIAGNRYASTPVGKALSDACMGTIASFLSKYQDIIIEHQKVVKGNQKRLESLRELAGKENLEYPSVTLPPQPHTKEGVDAYNEVIARVRMWVNLNLWQKLKLSRDDAKPLLRLKNFPSFPLVERQANEVDWWDMVCNVKKLINEKKEDGKVFWQNLAGYKRQEALRPYLSSEEDRKKGKKFARYQLGDLLLHLEKKHGEDWGKVYDEAWERIDKKVEGLSKHIKLEEERRSEDAQSKAALTDWLRAKASFVIEGLKEADKDEFCRCELKLQKWYGDLRGKPFAIEAENSILDISGFSKQYNCAFIWQKDGVKKLNLYLIINYFKGGKLRFKKIKPEAFEANRFYTVINKKSGEIVPMEVNFNFDDPNLIILPLAFGKRQGREFIWNDLLSLETGSLKLANGRVIEKTLYNRRTRQDEPALFVALTFERREVLDSSNIKPMNLIGVDRGENIPAVIALTDPEGCPLSRFKDSLGNPTHILRIGESYKEKQRTIQAKKEVEQRRAGGYSRKYASKAKNLADDMVRNTARDLLYYAVTQDAMLIFENLSRGFGRQGKRTFMAERQYTRMEDWLTAKLAYEGLPSKTYLSKTLAQYTSKTCSNCGFTITSADYDRVLEKLKKTATGWMTTINGKELKVEGQITYYNRYKRQNVVKDLSVELDRLSEESVNNDISSWTKGRSGEALSLLKKRFSHRPVQEKFVCLNCGFETHADEQAALNIARSWLFLRSQEYKKYQTNKTTGNTDKRAFVETWQSFYRKKLKEVWKPAV

SEQ ID NO: 41134 - protein, 979 aa, synthetic construct
  REGION 1..979: note = engineered CasX variant
QEIGKRINKIRRRLVKDSNTKKAGKTGPMKTLLVRVMTPDLRERLENLRKKPENIPQPISNTSRANLNKLLTDYTEMKKAILHVYWEEFQKDPVGLMSRVAQPASKKIDQNKLKPEMDEKGNLTTAGFACSQCGQPLFVYKLEQVSEKGKAYTNYFGRCNVAEHEKLILLAQLKPEKDSDEAVTYSLGKFGQRALDFYSIHVTKESTHPVKPLAQIAGNRYASAPVGKALSDACMGTIASFLSKYQDIIIEHQKVVKGNQKRLESLRELAGKENLEYPSVTLPPQPHTKEGVDAYNEVIARVRMWVNLNLWQKLKLSRDDAKPLLRLKNFPSFPLVERQANEVDWWDMVCNVKKLINEKKEDGKVFWQNLAGYKRQEALRPYLSSEEDRKKGKKFARYQLGDLLLHLEKKHGEDWGKVYDEAWERIDKKVEGLSKHIKLEEERRSEDAQSKAALTDWLRAKASFVIEGLKEADKDEFCRCELKLQKWYGDLRGKPFAIEAENSILDISGFSKQYNCAFIWQKDGVKKLNLYLIINYFKGGKLRFKKIKPEAFEANRFYTVINKKSGEIVPMEVNFNFDDPNLIILPLAFGKRQGREFIWNDLLSLETGSLKLANGRVIEKTLYNRRTRQDEPALFVALTFERREVLDSSNIKPMNLIGVDRGENIPAVIALTDPEGCPLSRFKDSLGNPTHILRIGESYKEKQRTIQAKKEVEQRRAGGYSRKYASKAKNLADDMVRNTARDLLYYAVTQDAMLIFENLSRGFGRQGKRTFMAERQYTRMEDWLTAKLAYEGLPSKTYLSKTLAQYTSKTCSNCGFTITSADYDRVLEKLKKTATGWMTTINGKELKVEGQITYYNRYKRQNVVKDLSVELDRLSEESVNNDISSWTKGRSGEALSLLKKRFSHRPVQEKFVCLNCGFETHADEQAALNIARSWLFLRSQEYKKYQTNKTTGNTDKRAFVETWQSFYRKKLKEVWKPAV

SEQ ID NO: 41135 - protein, 979 aa, synthetic construct
  REGION 1..979: note = engineered CasX variant
QEIGKRINKIRRRLVKDSNTKKAGKTGPMKTLLVRVMTPDLRERLENLRKKPENIPQPISNTSRANLNKLLTDYTEMKKAILHVYWEEFQKDPVGLMSRVAQPASKKIDQNKLKPEMDEKGNLTTAGFACSQCGQPLFVYKLEQVSEKGKAYTNYFGRCNVAEHEKLILLAQLKPEKDSDEAVTYSLGKFGQRALDFYSIHVTKESTHPVKPLAQIAGNRYASVPVGKALSDACMGTIASFLSKYQDIIIEHQKVVKGNQKRLESLRELAGKENLEYPSVTLPPQPHTKEGVDAYNEVIARVRMWVNLNLWQKLKLSRDDAKPLLRLKNFPSFPLVERQANEVDWWDMVCNVKKLINEKKEDGKVFWQNLAGYKRQEALRPYLSSEEDRKKGKKFARYQLGDLLLHLEKKHGEDWGKVYDEAWERIDKKVEGLSKHIKLEEERRSEDAQSKAALTDWLRAKASFVIEGLKEADKDEFCRCELKLQKWYGDLRGKPFAIEAENSILDISGFSKQYNCAFIWQKDGVKKLNLYLIINYFKGGKLRFKKIKPEAFEANRFYTVINKKSGEIVPMEVNFNFDDPNLIILPLAFGKRQGREFIWNDLLSLETGSLKLANGRVIEKTLYNRRTRQDEPALFVALTFERREVLDSSNIKPMNLIGVDRGENIPAVIALTDPEGCPLSRFKDSLGNPTHILRIGESYKEKQRTIQAKKEVEQRRAGGYSRKYASKAKNLADDMVRNTARDLLYYAVTQDAMLIFENLSRGFGRQGKRTFMAERQYTRMEDWLTAKLAYEGLPSKTYLSKTLAQYTSKTCSNCGFTITSADYDRVLEKLKKTATGWMTTINGKELKVEGQITYYNRYKRQNVVKDLSVELDRLSEESVNNDISSWTKGRSGEALSLLKKRFSHRPVQEKFVCLNCGFETHADEQAALNIARSWLFLRSQEYKKYQTNKTTGNTDKRAFVETWQSFYRKKLKEVWKPAV

SEQ ID NO: 41136 - protein, 979 aa, synthetic construct
  REGION 1..979: note = engineered CasX variant
QEIGKRINKIRRRLVKDSNTKKAGKTGPMKTLLVRVMTPDLRERLENLRKKPENIPQPISNTSRANLNKLLTDYTEMKKAILHVYWEEFQKDPVGLMSRVAQPASKKIDQNKLKPEMDEKGNLTTAGFACSQCGQPLFVYKLEQVSEKGKAYTNYFGRCNVAEHEKLIKLAQLKPEKDSDEAVTYSLGKFGQRALDFYSIHVTKESTHPVKPLAQIAGNRYASGPVGKALSDACMGTIASFLSKYQDIIIEHQKVVKGNQKRLESLRELAGKENLEYPSVTLPPQPHTKEGVDAYNEVIARVRMWVNLNLWQKLKLSRDDAKPLLRLKNFPSFPLVERQANEVDWWDMVCNVKKLINEKKEDGKVFWQNLAGYKRQEALRPYLSSEEDRKKGKKFARYQLGDLLLHLEKKHGEDWGKVYDEAWERIDKKVEGLSKHIKLEEERRSEDAQSKAALTDWLRAKASFVIEGLKEADKDEFCRCELKLQKWYGDLRGKPFAIEAENSILDISGFSKQYNCAFIWQKDGVKKLNLYLIINYFKGGKLRFKKIKPEAFEANRFYTVINKKSGEIVPMEVNFNFDDPNLIILPLAFGKRQGREFIWNDLLSLETGSLKLANGRVIEKTLYNRRTRQDEPALFVALTFERREVLDSSNIKPMNLIGVDRGENIPAVIALTDPEGCPLSRFKDSLGNPTHILRIGESYKEKQRTIQAKKEVEQRRAGGYSRKYASKAKNLADDMVRNTARDLLYYAVTQDAMLIFENLSRGFGRQGKRTFMAERQYTRMEDWLTAKLAYEGLPSKTYLSKTLAQYTSKTCSNCGFTITSADYDRVLEKLKKTATGWMTTINGKELKVEGQITYYNRYKRQNVVKDLSVELDRLSEESVNNDISSWTKGRSGEALSLLKKRFSHRPVQEKFVCLNCGFETHADEQAALNIARSWLFLRSQEYKKYQTNKTTGNTDKRAFVETWQSFYRKKLKEVWKPAV

SEQ ID NO: 41137 - protein, 978 aa, synthetic construct
  REGION 1..978: note = engineered CasX variant
QEIGKRINKIRRRLVKDSNTKKAGKTGPMKTLLVRVMTPDLRERLENLRKKPENIPQPISNTSRANLNKLLTDYTEMKKAILHVYWEEFQKDPVGLMSRVAQPASKKIDQNKLKPEMDEKGNLTTAGFACSQCGQPLFVYKLEQVSEKGKAYTNYFGRCNVAEHEKLILLAQLKPEKDSDEAVTYSLGKFGQRALDFYSIHVTKESTHPVKPLAQIAGNRYASPVGKALSDACMGTIASFLSKYQDIIIEHQKVVKGNQKRLESLRELAGKENLEYPSVTLPPQPHTKEGVDAYNEVIARVRMWVNLNLWQKLKLSRDDAKPLLRLKNFPSFPLVERQANEVDWWDMVCNVKKLINEKKEDGKVFWQNLAGYKRQEALRPYLSSEEDRKKGKKFARYQLGDLLLHLEKKHGEDWGKVYDEAWERIDKKVEGLSKHIKLEEERRSEDAQSKAALTDWLRAKASFVIEGLKEADKDEFCRCELKLQKWYGDLRGKPFAIEAENSILDISGFSKQYNCAFIWQKDGVKKLNLYLIINYFKGGKLRFKKIKPEAFEANRFYTVINKKSGEIVPMEVNFNFDDPNLIILPLAFGKRQGREFIWNDLLSLETGSLKLANGRVIEKTLYNRRTRQDEPALFVALTFERREVLDSSNIKPMNLIGVDRGENIPAVIALTDPEGCPLSRFKDSLGNPTHILRIGESYKEKQRTIQAKKEVEQRRAGGYSRKYASKAKNLADDMVRNTARDLLYYAVTQDAMLIFENLSRGFGRQGKRTFMAERQYTRMEDWLTAKLAYEGLPSKTYLSKTLAQYTSKTCSNCGFTITSADYDRVLEKLKKTATGWMTTINGKELKVEGQITYYNRYKRQNVVKDLSVELDRLSEESVNNDISSWTKGRSGEALSLLKKRFSHRPVQEKFVCLNCGFETHADEQAALNIARSWLFLRSQEYKKYQTNKTTGNTDKRAFVETWQSFYRKKLKEVWKPAV

SEQ ID NO: 41138 - protein, 979 aa, synthetic construct
  REGION 1..979: note = engineered CasX variant
QEIGKRINKIRRRLVKDSNTKKAGKTGPMKTLLVRVMTPDLRERLENLRKKPENIPQPISNTSRANLNKLLTDYTEMKKAILHVYWEEFQKDPVGLMSRVAQPASKKIDQNKLKPEMDEKGNLTTAGFACSQCGQPLFVYKLEQVSEKGKAYTNYFGRCNVAEHEKLILLAQLKPEKDSDEAVTYSLGKFGQRALDFYSIHVTKESTHPVKPLAQIAGNRYASYPVGKALSDACMGTIASFLSKYQDIIIEHQKVVKGNQKRLESLRELAGKENLEYPSVTLPPQPHTKEGVDAYNEVIARVRMWVNLNLWQKLKLSRDDAKPLLRLKGFPSFPLVERQANEVDWWDMVCNVKKLINEKKEDGKVFWQNLAGYKRQEALRPYLSSEEDRKKGKKFARYQLGDLLNHLEKKHGEDWGKVYDEAWERIDKKVEGLSKHIKLEEERRSEDAQSKAALTDWLRAKASFVIEGLKEADKDEFCRCELKLQKWYGDLRGKPFAIEAENSILDISGFSKQYNCAFIWQKDGVKKLNLYLIINYFKGGKLRFKKIKPEAFEANRFYTVINKKSGEIVPMEVNFNFDDPNLIILPLAFGKRQGREFIWNDLLSLETGSLKLANGRVIEKTLYNRRTRQDEPALFVALTFERREVLDSSNIKPMNLIGVDRGENIPAVIALTDPEGCPLSRFKDSLGNPTHILRIGESYKEKQRTIQAKKEVEQRRAGGYSRKYASKAKNLADDMVRNTARDLLYYAVTQDAMLIFENLSRGFGRQGKRTFMAERQYTRMEDWLTAKLAYEGLPSKTYLSKTLAQYTSKTCSNCGFTITSADYDRVLEKLKKTATGWMTTINGKELKVEGQITYYNRYKRQNVVKDLSVELDRLSEESVNNDISSWTKGRSGEALSLLKKRFSHRPVQEKFVCLNCGFETHADEQAALNIARSWLFLRSQEYKKYQTNKTTGNTDKRAFVETWQSFYRKKLKEVWKPAV

SEQ ID NO: 41139 - protein, 979 aa, synthetic construct
  REGION 1..979: note = engineered CasX variant
QEIGKRINKIRRRLVKDSNTKKAGKTGPMKTLLVRVMTPDLRERLENLRKKPENIPQPISNTSRANLNKLLTDYTEMKKAILHVYWEEFQKDPVGLMSRVAQPASKKIDQNKLKPEMDEKGNLTTAGFACSQCGQPLFVYKLEQVSEKGKAYTNYFGRCNVAEHEKLILLAQLKPEKDSDEAVTYSLGKFGQRALDFYSIHVTKESTHPVKPLAQIAGNRYASHPVGKALSDACMGTIASFLSKYQDIIIEHQKVVKGNQKRLESLRELAGKENLEYPSVTLPPQPHTKEGVDAYNEVIARVRMWVNLNLWQKLKLSRDDAKPLLRLKGFPSFPLVERQANEVDWWDMVCNVKKLINEKKEDGKVFWQNLAGYKRQEALRPYLSSEEDRKKGKKFARYQLGDLLNHLEKKHGEDWGKVYDEAWERIDKKVEGLSKHIKLEEERRSEDAQSKAALTDWLRAKASFVIEGLKEADKDEFCRCELKLQKWYGDLRGKPFAIEAENSILDISGFSKQYNCAFIWQKDGVKKLNLYLIINYFKGGKLRFKKIKPEAFEANRFYTVINKKSGEIVPMEVNFNFDDPNLIILPLAFGKRQGREFIWNDLLSLETGSLKLANGRVIEKTLYNRRTRQDEPALFVALTFERREVLDSSNIKPMNLIGVDRGENIPAVIALTDPEGCPLSRFKDSLGNPTHILRIGESYKEKQRTIQAKKEVEQRRAGGYSRKYASKAKNLADDMVRNTARDLLYYAVTQDAMLIFENLSRGFGRQGKRTFMAERQYTRMEDWLTAKLAYEGLPSKTYLSKTLAQYTSKTCSNCGFTITSADYDRVLEKLKKTATGWMTTINGKELKVEGQITYYNRYKRQNVVKDLSVELDRLSEESVNNDISSWTKGRSGEALSLLKKRFSHRPVQEKFVCLNCGFETHADEQAALNIARSWLFLRSQEYKKYQTNKTTGNTDKRAFVETWQSFYRKKLKEVWKPAV

SEQ ID NO: 41140 - protein, 979 aa, synthetic construct
  REGION 1..979: note = engineered CasX variant
QEIGKRINKIRRRLVKDSNTKKAGKTGPMKTLLVRVMTPDLRERLENLRKKPENIPQPISNTSRANLNKLLTDYTEMKKAILHVYWEEFQKDPVGLMSRVAQPASKKIDQNKLKPEMDEKGNLTTAGFACSQCGQPLFVYKLEQVSEKGKAYTNYFGRCNVAEHEKLILLAQLKPEKDSDEAVTYSLGKFGQRALDFYSIHVTKESTHPVKPLAQIAGNRYASSPVGKALSDACMGTIASFLSKYQDIIIEHQKVVKGNQKRLESLRELAGKENLEYPSVTLPPQPHTKEGVDAYNEVIARVRMWVNLNLWQKLKLSRDDAKPLLRLKGFPSFPLVERQANEVDWWDMVCNVKKLINEKKEDGKVFWQNLAGYKRQEALRPYLSSEEDRKKGKKFARYQLGDLLNHLEKKHGEDWGKVYDEAWERIDKKVEGLSKHIKLEEERRSEDAQSKAALTDWLRAKASFVIEGLKEADKDEFCRCELKLQKWYGDLRGKPFAIEAENSILDISGFSKQYNCAFIWQKDGVKKLNLYLIINYFKGGKLRFKKIKPEAFEANRFYTVINKKSGEIVPMEVNFNFDDPNLIILPLAFGKRQGREFIWNDLLSLETGSLKLANGRVIEKTLYNRRTRQDEPALFVALTFERREVLDSSNIKPMNLIGVDRGENIPAVIALTDPEGCPLSRFKDSLGNPTHILRIGESYKEKQRTIQAKKEVEQRRAGGYSRKYASKAKNLADDMVRNTARDLLYYAVTQDAMLIFENLSRGFGRQGKRTFMAERQYTRMEDWLTAKLAYEGLPSKTYLSKTLAQYTSKTCSNCGFTITSADYDRVLEKLKKTATGWMTTINGKELKVEGQITYYNRYKRQNVVKDLSVELDRLSEESVNNDISSWTKGRSGEALSLLKKRFSHRPVQEKFVCLNCGFETHADEQAALNIARSWLFLRSQEYKKYQTNKTTGNTDKRAFVETWQSFYRKKLKEVWKPAV

SEQ ID NO: 41141 - protein, 979 aa, synthetic construct
  REGION 1..979: note = engineered CasX variant
QEIGKRINKIRRRLVKDSNTKKAGKTGPMKTLLVRVMTPDLRERLENLRKKPENIPQPISNTSRANLNKLLTDYTEMKKAILHVYWEEFQKDPVGLMSRVAQPASKKIDQNKLKPEMDEKGNLTTAGFACSQCGQPLFVYKLEQVSEKGKAYTNYFGRCNVAEHEKLILLAQLKPEKDSDEAVTYSLGKFGQRALDFYSIHVTKESTHPVKPLAQIAGNRYASTPVGKALSDACMGTIASFLSKYQDIIIEHQKVVKGNQKRLESLRELAGKENLEYPSVTLPPQPHTKEGVDAYNEVIARVRMWVNLNLWQKLKLSRDDAKPLLRLKGFPSFPLVERQANEVDWWDMVCNVKKLINEKKEDGKVFWQNLAGYKRQEALRPYLSSEEDRKKGKKFARYQLGDLLNHLEKKHGEDWGKVYDEAWERIDKKVEGLSKHIKLEEERRSEDAQSKAALTDWLRAKASFVIEGLKEADKDEFCRCELKLQKWYGDLRGKPFAIEAENSILDISGFSKQYNCAFIWQKDGVKKLNLYLIINYFKGGKLRFKKIKPEAFEANRFYTVINKKSGEIVPMEVNFNFDDPNLIILPLAFGKRQGREFIWNDLLSLETGSLKLANGRVIEKTLYNRRTRQDEPALFVALTFERREVLDSSNIKPMNLIGVDRGENIPAVIALTDPEGCPLSRFKDSLGNPTHILRIGESYKEKQRTIQAKKEVEQRRAGGYSRKYASKAKNLADDMVRNTARDLLYYAVTQDAMLIFENLSRGFGRQGKRTFMAERQYTRMEDWLTAKLAYEGLPSKTYLSKTLAQYTSKTCSNCGFTITSADYDRVLEKLKKTATGWMTTINGKELKVEGQITYYNRYKRQNVVKDLSVELDRLSEESVNNDISSWTKGRSGEALSLLKKRFSHRPVQEKFVCLNCGFETHADEQAALNIARSWLFLRSQEYKKYQTNKTTGNTDKRAFVETWQSFYRKKLKEVWKPAV

SEQ ID NO: 41142 - protein, 979 aa, synthetic construct
  REGION 1..979: note = engineered CasX variant
QEIGKRINKIRRRLVKDSNTKKAGKTGPMKTLLVRVMTPDLRERLENLRKKPENIPQPISNTSRANLNKLLTDYTEMKKAILHVYWEEFQKDPVGLMSRVAQPASKKIDQNKLKPEMDEKGNLTTAGFACSQCGQPLFVYKLEQVSEKGKAYTNYFGRCNVAEHEKLILLAQLKPEKDSDEAVTYSLGKFGQRALDFYSIHVTKESTHPVKPLAQIAGNRYASAPVGKALSDACMGTIASFLSKYQDIIIEHQKVVKGNQKRLESLRELAGKENLEYPSVTLPPQPHTKEGVDAYNEVIARVRMWVNLNLWQKLKLSRDDAKPLLRLKGFPSFPLVERQANEVDWWDMVCNVKKLINEKKEDGKVFWQNLAGYKRQEALRPYLSSEEDRKKGKKFARYQLGDLLNHLEKKHGEDWGKVYDEAWERIDKKVEGLSKHIKLEEERRSEDAQSKAALTDWLRAKASFVIEGLKEADKDEFCRCELKLQKWYGDLRGKPFAIEAENSILDISGFSKQYNCAFIWQKDGVKKLNLYLIINYFKGGKLRFKKIKPEAFEANRFYTVINKKSGEIVPMEVNFNFDDPNLIILPLAFGKRQGREFIWNDLLSLETGSLKLANGRVIEKTLYNRRTRQDEPALFVALTFERREVLDSSNIKPMNLIGVDRGENIPAVIALTDPEGCPLSRFKDSLGNPTHILRIGESYKEKQRTIQAKKEVEQRRAGGYSRKYASKAKNLADDMVRNTARDLLYYAVTQDAMLIFENLSRGFGRQGKRTFMAERQYTRMEDWLTAKLAYEGLPSKTYLSKTLAQYTSKTCSNCGFTITSADYDRVLEKLKKTATGWMTTINGKELKVEGQITYYNRYKRQNVVKDLSVELDRLSEESVNNDISSWTKGRSGEALSLLKKRFSHRPVQEKFVCLNCGFETHADEQAALNIARSWLFLRSQEYKKYQTNKTTGNTDKRAFVETWQSFYRKKLKEVWKPAV

SEQ ID NO: 41143 - protein, 979 aa, synthetic construct
  REGION 1..979: note = engineered CasX variant
QEIGKRINKIRRRLVKDSNTKKAGKTGPMKTLLVRVMTPDLRERLENLRKKPENIPQPISNTSRANLNKLLTDYTEMKKAILHVYWEEFQKDPVGLMSRVAQPASKKIDQNKLKPEMDEKGNLTTAGFACSQCGQPLFVYKLEQVSEKGKAYTNYFGRCNVAEHEKLILLAQLKPEKDSDEAVTYSLGKFGQRALDFYSIHVTKESTHPVKPLAQIAGNRYASVPVGKALSDACMGTIASFLSKYQDIIIEHQKVVKGNQKRLESLRELAGKENLEYPSVTLPPQPHTKEGVDAYNEVIARVRMWVNLNLWQKLKLSRDDAKPLLRLKGFPSFPLVERQANEVDWWDMVCNVKKLINEKKEDGKVFWQNLAGYKRQEALRPYLSSEEDRKKGKKFARYQLGDLLNHLEKKHGEDWGKVYDEAWERIDKKVEGLSKHIKLEEERRSEDAQSKAALTDWLRAKASFVIEGLKEADKDEFCRCELKLQKWYGDLRGKPFAIEAENSILDISGFSKQYNCAFIWQKDGVKKLNLYLIINYFKGGKLRFKKIKPEAFEANRFYTVINKKSGEIVPMEVNFNFDDPNLIILPLAFGKRQGREFIWNDLLSLETGSLKLANGRVIEKTLYNRRTRQDEPALFVALTFERREVLDSSNIKPMNLIGVDRGENIPAVIALTDPEGCPLSRFKDSLGNPTHILRIGESYKEKQRTIQAKKEVEQRRAGGYSRKYASKAKNLADDMVRNTARDLLYYAVTQDAMLIFENLSRGFGRQGKRTFMAERQYTRMEDWLTAKLAYEGLPSKTYLSKTLAQYTSKTCSNCGFTITSADYDRVLEKLKKTATGWMTTINGKELKVEGQITYYNRYKRQNVVKDLSVELDRLSEESVNNDISSWTKGRSGEALSLLKKRFSHRPVQEKFVCLNCGFETHADEQAALNIARSWLFLRSQEYKKYQTNKTTGNTDKRAFVETWQSFYRKKLKEVWKPAV

SEQ ID NO: 41144 - protein, 979 aa, synthetic construct
  REGION 1..979: note = engineered CasX variant
QEIGKRINKIRRRLVKDSNTKKAGKTGPMKTLLVRVMTPDLRERLENLRKKPENIPQPISNTSRANLNKLLTDYTEMKKAILHVYWEEFQKDPVGLMSRVAQPASKKIDQNKLKPEMDEKGNLTTAGFACSQCGQPLFVYKLEQVSEKGKAYTNYFGRCNVAEHEKLIKLAQLKPEKDSDEAVTYSLGKFGQRALDFYSIHVTKESTHPVKPLAQIAGNRYASGPVGKALSDACMGTIASFLSKYQDIIIEHQKVVKGNQKRLESLRELAGKENLEYPSVTLPPQPHTKEGVDAYNEVIARVRMWVNLNLWQKLKLSRDDAKPLLRLKGFPSFPLVERQANEVDWWDMVCNVKKLINEKKEDGKVFWQNLAGYKRQEALRPYLSSEEDRKKGKKFARYQLGDLLNHLEKKHGEDWGKVYDEAWERIDKKVEGLSKHIKLEEERRSEDAQSKAALTDWLRAKASFVIEGLKEADKDEFCRCELKLQKWYGDLRGKPFAIEAENSILDISGFSKQYNCAFIWQKDGVKKLNLYLIINYFKGGKLRFKKIKPEAFEANRFYTVINKKSGEIVPMEVNFNFDDPNLIILPLAFGKRQGREFIWNDLLSLETGSLKLANGRVIEKTLYNRRTRQDEPALFVALTFERREVLDSSNIKPMNLIGVDRGENIPAVIALTDPEGCPLSRFKDSLGNPTHILRIGESYKEKQRTIQAKKEVEQRRAGGYSRKYASKAKNLADDMVRNTARDLLYYAVTQDAMLIFENLSRGFGRQGKRTFMAERQYTRMEDWLTAKLAYEGLPSKTYLSKTLAQYTSKTCSNCGFTITSADYDRVLEKLKKTATGWMTTINGKELKVEGQITYYNRYKRQNVVKDLSVELDRLSEESVNNDISSWTKGRSGEALSLLKKRFSHRPVQEKFVCLNCGFETHADEQAALNIARSWLFLRSQEYKKYQTNKTTGNTDKRAFVETWQSFYRKKLKEVWKPAV

SEQ ID NO: 41145 - protein, 978 aa, synthetic construct
  REGION 1..978: note = engineered CasX variant
QEIGKRINKIRRRLVKDSNTKKAGKTGPMKTLLVRVMTPDLRERLENLRKKPENIPQPISNTSRANLNKLLTDYTEMKKAILHVYWEEFQKDPVGLMSRVAQPASKKIDQNKLKPEMDEKGNLTTAGFACSQCGQPLFVYKLEQVSEKGKAYTNYFGRCNVAEHEKLILLAQLKPEKDSDEAVTYSLGKFGQRALDFYSIHVTKESTHPVKPLAQIAGNRYASPVGKALSDACMGTIASFLSKYQDIIIEHQKVVKGNQKRLESLRELAGKENLEYPSVTLPPQPHTKEGVDAYNEVIARVRMWVNLNLWQKLKLSRDDAKPLLRLKGFPSFPLVERQANEVDWWDMVCNVKKLINEKKEDGKVFWQNLAGYKRQEALRPYLSSEEDRKKGKKFARYQLGDLLNHLEKKHGEDWGKVYDEAWERIDKKVEGLSKHIKLEEERRSEDAQSKAALTDWLRAKASFVIEGLKEADKDEFCRCELKLQKWYGDLRGKPFAIEAENSILDISGFSKQYNCAFIWQKDGVKKLNLYLIINYFKGGKLRFKKIKPEAFEANRFYTVINKKSGEIVPMEVNFNFDDPNLIILPLAFGKRQGREFIWNDLLSLETGSLKLANGRVIEKTLYNRRTRQDEPALFVALTFERREVLDSSNIKPMNLIGVDRGENIPAVIALTDPEGCPLSRFKDSLGNPTHILRIGESYKEKQRTIQAKKEVEQRRAGGYSRKYASKAKNLADDMVRNTARDLLYYAVTQDAMLIFENLSRGFGRQGKRTFMAERQYTRMEDWLTAKLAYEGLPSKTYLSKTLAQYTSKTCSNCGFTITSADYDRVLEKLKKTATGWMTTINGKELKVEGQITYYNRYKRQNVVKDLSVELDRLSEESVNNDISSWTKGRSGEALSLLKKRFSHRPVQEKFVCLNCGFETHADEQAALNIARSWLFLRSQEYKKYQTNKTTGNTDKRAFVETWQSFYRKKLKEVWKPAV

SEQ ID NO: 41146 - protein, 979 aa, synthetic construct
  REGION 1..979: note = engineered CasX variant
QEIGKRINKIRRRLVKDSNTKKAGKTGPMKTLLVRVMTPDLRERLENLRKKPENIPQPISNTSRANLNKLLTDYTEMKKAILHVYWEEFQKDPVGLMSRVAQPASKKIDQNKLKPEMDEKGNLTTAGFACSQCGQPLFVYKLEQVSEKGKAYTNYFGRCNVAEHEKLILLAQLKPEKDSDEAVTYSLGKFGQRALDFYSIHVTKESTHPVKPLAQIAGNRYASYPVGKALSDACMGTIASFLSKYQDIIIEHQKVVKGNQKRLESLRELAGKENLEYPSVTLPPQPHTKEGVDAYNEVIARVRMWVNLNLWQKLKLSRDDAKPLLRLKGFPSFPLVERQANEVDWWDMVCNVKKLINEKKEDGKVFWQNLAGYKRQEALRPYLSSEEDRKKGKKFARYQLGDLLWHLEKKHGEDWGKVYDEAWERIDKKVEGLSKHIKLEEERRSEDAQSKAALTDWLRAKASFVIEGLKEADKDEFCRCELKLQKWYGDLRGKPFAIEAENSILDISGFSKQYNCAFIWQKDGVKKLNLYLIINYFKGGKLRFKKIKPEAFEANRFYTVINKKSGEIVPMEVNFNFDDPNLIILPLAFGKRQGREFIWNDLLSLETGSLKLANGRVIEKTLYNRRTRQDEPALFVALTFERREVLDSSNIKPMNLIGVDRGENIPAVIALTDPEGCPLSRFKDSLGNPTHILRIGESYKEKQRTIQAKKEVEQRRAGGYSRKYASKAKNLADDMVRNTARDLLYYAVTQDAMLIFENLSRGFGRQGKRTFMAERQYTRMEDWLTAKLAYEGLPSKTYLSKTLAQYTSKTCSNCGFTITSADYDRVLEKLKKTATGWMTTINGKELKVEGQITYYNRYKRQNVVKDLSVELDRLSEESVNNDISSWTKGRSGEALSLLKKRFSHRPVQEKFVCLNCGFETHADEQAALNIARSWLFLRSQEYKKYQTNKTTGNTDKRAFVETWQSFYRKKLKEVWKPAV

SEQ ID NO: 41147 - protein, 979 aa, synthetic construct
  REGION 1..979: note = engineered CasX variant
QEIGKRINKIRRRLVKDSNTKKAGKTGPMKTLLVRVMTPDLRERLENLRKKPENIPQPISNTSRANLNKLLTDYTEMKKAILHVYWEEFQKDPVGLMSRVAQPASKKIDQNKLKPEMDEKGNLTTAGFACSQCGQPLFVYKLEQVSEKGKAYTNYFGRCNVAEHEKLILLAQLKPEKDSDEAVTYSLGKFGQRALDFYSIHVTKESTHPVKPLAQIAGNRYASHPVGKALSDACMGTIASFLSKYQDIIIEHQKVVKGNQKRLESLRELAGKENLEYPSVTLPPQPHTKEGVDAYNEVIARVRMWVNLNLWQKLKLSRDDAKPLLRLKGFPSFPLVERQANEVDWWDMVCNVKKLINEKKEDGKVFWQNLAGYKRQEALRPYLSSEEDRKKGKKFARYQLGDLLWHLEKKHGEDWGKVYDEAWERIDKKVEGLSKHIKLEEERRSEDAQSKAALTDWLRAKASFVIEGLKEADKDEFCRCELKLQKWYGDLRGKPFAIEAENSILDISGFSKQYNCAFIWQKDGVKKLNLYLIINYFKGGKLRFKKIKPEAFEANRFYTVINKKSGEIVPMEVNFNFDDPNLIILPLAFGKRQGREFIWNDLLSLETGSLKLANGRVIEKTLYNRRTRQDEPALFVALTFERREVLDSSNIKPMNLIGVDRGENIPAVIALTDPEGCPLSRFKDSLGNPTHILRIGESYKEKQRTIQAKKEVEQRRAGGYSRKYASKAKNLADDMVRNTARDLLYYAVTQDAMLIFENLSRGFGRQGKRTFMAERQYTRMEDWLTAKLAYEGLPSKTYLSKTLAQYTSKTCSNCGFTITSADYDRVLEKLKKTATGWMTTINGKELKVEGQITYYNRYKRQNVVKDLSVELDRLSEESVNNDISSWTKGRSGEALSLLKKRFSHRPVQEKFVCLNCGFETHADEQAALNIARSWLFLRSQEYKKYQTNKTTGNTDKRAFVETWQSFYRKKLKEVWKPAV

SEQ ID NO: 41148 - protein, 979 aa, synthetic construct
  REGION 1..979: note = engineered CasX variant
QEIGKRINKIRRRLVKDSNTKKAGKTGPMKTLLVRVMTPDLRERLENLRKKPENIPQPISNTSRANLNKLLTDYTEMKKAILHVYWEEFQKDPVGLMSRVAQPASKKIDQNKLKPEMDEKGNLTTAGFACSQCGQPLFVYKLEQVSEKGKAYTNYFGRCNVAEHEKLILLAQLKPEKDSDEAVTYSLGKFGQRALDFYSIHVTKESTHPVKPLAQIAGNRYASSPVGKALSDACMGTIASFLSKYQDIIIEHQKVVKGNQKRLESLRELAGKENLEYPSVTLPPQPHTKEGVDAYNEVIARVRMWVNLNLWQKLKLSRDDAKPLLRLKGFPSFPLVERQANEVDWWDMVCNVKKLINEKKEDGKVFWQNLAGYKRQEALRPYLSSEEDRKKGKKFARYQLGDLLWHLEKKHGEDWGKVYDEAWERIDKKVEGLSKHIKLEEERRSEDAQSKAALTDWLRAKASFVIEGLKEADKDEFCRCELKLQKWYGDLRGKPFAIEAENSILDISGFSKQYNCAFIWQKDGVKKLNLYLIINYFKGGKLRFKKIKPEAFEANRFYTVINKKSGEIVPMEVNFNFDDPNLIILPLAFGKRQGREFIWNDLLSLETGSLKLANGRVIEKTLYNRRTRQDEPALFVALTFERREVLDSSNIKPMNLIGVDRGENIPAVIALTDPEGCPLSRFKDSLGNPTHILRIGESYKEKQRTIQAKKEVEQRRAGGYSRKYASKAKNLADDMVRNTARDLLYYAVTQDAMLIFENLSRGFGRQGKRTFMAERQYTRMEDWLTAKLAYEGLPSKTYLSKTLAQYTSKTCSNCGFTITSADYDRVLEKLKKTATGWMTTINGKELKVEGQITYYNRYKRQNVVKDLSVELDRLSEESVNNDISSWTKGRSGEALSLLKKRFSHRPVQEKFVCLNCGFETHADEQAALNIARSWLFLRSQEYKKYQTNKTTGNTDKRAFVETWQSFYRKKLKEVWKPAV

SEQ ID NO: 41149 - protein, 979 aa, synthetic construct
  REGION 1..979: note = engineered CasX variant
QEIGKRINKIRRRLVKDSNTKKAGKTGPMKTLLVRVMTPDLRERLENLRKKPENIPQPISNTSRANLNKLLTDYTEMKKAILHVYWEEFQKDPVGLMSRVAQPASKKIDQNKLKPEMDEKGNLTTAGFACSQCGQPLFVYKLEQVSEKGKAYTNYFGRCNVAEHEKLILLAQLKPEKDSDEAVTYSLGKFGQRALDFYSIHVTKESTHPVKPLAQIAGNRYASTPVGKALSDACMGTIASFLSKYQDIIIEHQKVVKGNQKRLESLRELAGKENLEYPSVTLPPQPHTKEGVDAYNEVIARVRMWVNLNLWQKLKLSRDDAKPLLRLKGFPSFPLVERQANEVDWWDMVCNVKKLINEKKEDGKVFWQNLAGYKRQEALRPYLSSEEDRKKGKKFARYQLGDLLWHLEKKHGEDWGKVYDEAWERIDKKVEGLSKHIKLEEERRSEDAQSKAALTDWLRAKASFVIEGLKEADKDEFCRCELKLQKWYGDLRGKPFAIEAENSILDISGFSKQYNCAFIWQKDGVKKLNLYLIINYFKGGKLRFKKIKPEAFEANRFYTVINKKSGEIVPMEVNFNFDDPNLIILPLAFGKRQGREFIWNDLLSLETGSLKLANGRVIEKTLYNRRTRQDEPALFVALTFERREVLDSSNIKPMNLIGVDRGENIPAVIALTDPEGCPLSRFKDSLGNPTHILRIGESYKEKQRTIQAKKEVEQRRAGGYSRKYASKAKNLADDMVRNTARDLLYYAVTQDAMLIFENLSRGFGRQGKRTFMAERQYTRMEDWLTAKLAYEGLPSKTYLSKTLAQYTSKTCSNCGFTITSADYDRVLEKLKKTATGWMTTINGKELKVEGQITYYNRYKRQNVVKDLSVELDRLSEESVNNDISSWTKGRSGEALSLLKKRFSHRPVQEKFVCLNCGFETHADEQAALNIARSWLFLRSQEYKKYQTNKTTGNTDKRAFVETWQSFYRKKLKEVWKPAV

SEQ ID NO: 41150 - protein, 979 aa, synthetic construct
  REGION 1..979: note = engineered CasX variant
QEIGKRINKIRRRLVKDSNTKKAGKTGPMKTLLVRVMTPDLRERLENLRKKPENIPQPISNTSRANLNKLLTDYTEMKKAILHVYWEEFQKDPVGLMSRVAQPASKKIDQNKLKPEMDEKGNLTTAGFACSQCGQPLFVYKLEQVSEKGKAYTNYFGRCNVAEHEKLILLAQLKPEKDSDEAVTYSLGKFGQRALDFYSIHVTKESTHPVKPLAQIAGNRYASAPVGKALSDACMGTIASFLSKYQDIIIEHQKVVKGNQKRLESLRELAGKENLEYPSVTLPPQPHTKEGVDAYNEVIARVRMWVNLNLWQKLKLSRDDAKPLLRLKGFPSFPLVERQANEVDWWDMVCNVKKLINEKKEDGKVFWQNLAGYKRQEALRPYLSSEEDRKKGKKFARYQLGDLLWHLEKKHGEDWGKVYDEAWERIDKKVEGLSKHIKLEEERRSEDAQSKAALTDWLRAKASFVIEGLKEADKDEFCRCELKLQKWYGDLRGKPFAIEAENSILDISGFSKQYNCAFIWQKDGVKKLNLYLIINYFKGGKLRFKKIKPEAFEANRFYTVINKKSGEIVPMEVNFNFDDPNLIILPLAFGKRQGREFIWNDLLSLETGSLKLANGRVIEKTLYNRRTRQDEPALFVALTFERREVLDSSNIKPMNLIGVDRGENIPAVIALTDPEGCPLSRFKDSLGNPTHILRIGESYKEKQRTIQAKKEVEQRRAGGYSRKYASKAKNLADDMVRNTARDLLYYAVTQDAMLIFENLSRGFGRQGKRTFMAERQYTRMEDWLTAKLAYEGLPSKTYLSKTLAQYTSKTCSNCGFTITSADYDRVLEKLKKTATGWMTTINGKELKVEGQITYYNRYKRQNVVKDLSVELDRLSEESVNNDISSWTKGRSGEALSLLKKRFSHRPVQEKFVCLNCGFETHADEQAALNIARSWLFLRSQEYKKYQTNKTTGNTDKRAFVETWQSFYRKKLKEVWKPAV

SEQ ID NO: 41151 - protein, 979 aa, synthetic construct
  REGION 1..979: note = engineered CasX variant
QEIGKRINKIRRRLVKDSNTKKAGKTGPMKTLLVRVMTPDLRERLENLRKKPENIPQPISNTSRANLNKLLTDYTEMKKAILHVYWEEFQKDPVGLMSRVAQPASKKIDQNKLKPEMDEKGNLTTAGFACSQCGQPLFVYKLEQVSEKGKAYTNYFGRCNVAEHEKLILLAQLKPEKDSDEAVTYSLGKFGQRALDFYSIHVTKESTHPVKPLAQIAGNRYASVPVGKALSDACMGTIASFLSKYQDIIIEHQKVVKGNQKRLESLRELAGKENLEYPSVTLPPQPHTKEGVDAYNEVIARVRMWVNLNLWQKLKLSRDDAKPLLRLKGFPSFPLVERQANEVDWWDMVCNVKKLINEKKEDGKVFWQNLAGYKRQEALRPYLSSEEDRKKGKKFARYQLGDLLWHLEKKHGEDWGKVYDEAWERIDKKVEGLSKHIKLEEERRSEDAQSKAALTDWLRAKASFVIEGLKEADKDEFCRCELKLQKWYGDLRGKPFAIEAENSILDISGFSKQYNCAFIWQKDGVKKLNLYLIINYFKGGKLRFKKIKPEAFEANRFYTVINKKSGEIVPMEVNFNFDDPNLIILPLAFGKRQGREFIWNDLLSLETGSLKLANGRVIEKTLYNRRTRQDEPALFVALTFERREVLDSSNIKPMNLIGVDRGENIPAVIALTDPEGCPLSRFKDSLGNPTHILRIGESYKEKQRTIQAKKEVEQRRAGGYSRKYASKAKNLADDMVRNTARDLLYYAVTQDAMLIFENLSRGFGRQGKRTFMAERQYTRMEDWLTAKLAYEGLPSKTYLSKTLAQYTSKTCSNCGFTITSADYDRVLEKLKKTATGWMTTINGKELKVEGQITYYNRYKRQNVVKDLSVELDRLSEESVNNDISSWTKGRSGEALSLLKKRFSHRPVQEKFVCLNCGFETHADEQAALNIARSWLFLRSQEYKKYQTNKTTGNTDKRAFVETWQSFYRKKLKEVWKPAV

SEQ ID NO: 41152 - protein, 979 aa, synthetic construct
  REGION 1..979: note = engineered CasX variant
QEIGKRINKIRRRLVKDSNTKKAGKTGPMKTLLVRVMTPDLRERLENLRKKPENIPQPISNTSRANLNKLLTDYTEMKKAILHVYWEEFQKDPVGLMSRVAQPASKKIDQNKLKPEMDEKGNLTTAGFACSQCGQPLFVYKLEQVSEKGKAYTNYFGRCNVAEHEKLIKLAQLKPEKDSDEAVTYSLGKFGQRALDFYSIHVTKESTHPVKPLAQIAGNRYASGPVGKALSDACMGTIASFLSKYQDIIIEHQKVVKGNQKRLESLRELAGKENLEYPSVTLPPQPHTKEGVDAYNEVIARVRMWVNLNLWQKLKLSRDDAKPLLRLKGFPSFPLVERQANEVDWWDMVCNVKKLINEKKEDGKVFWQNLAGYKRQEALRPYLSSEEDRKKGKKFARYQLGDLLWHLEKKHGEDWGKVYDEAWERIDKKVEGLSKHIKLEEERRSEDAQSKAALTDWLRAKASFVIEGLKEADKDEFCRCELKLQKWYGDLRGKPFAIEAENSILDISGFSKQYNCAFIWQKDGVKKLNLYLIINYFKGGKLRFKKIKPEAFEANRFYTVINKKSGEIVPMEVNFNFDDPNLIILPLAFGKRQGREFIWNDLLSLETGSLKLANGRVIEKTLYNRRTRQDEPALFVALTFERREVLDSSNIKPMNLIGVDRGENIPAVIALTDPEGCPLSRFKDSLGNPTHILRIGESYKEKQRTIQAKKEVEQRRAGGYSRKYASKAKNLADDMVRNTARDLLYYAVTQDAMLIFENLSRGFGRQGKRTFMAERQYTRMEDWLTAKLAYEGLPSKTYLSKTLAQYTSKTCSNCGFTITSADYDRVLEKLKKTATGWMTTINGKELKVEGQITYYNRYKRQNVVKDLSVELDRLSEESVNNDISSWTKGRSGEALSLLKKRFSHRPVQEKFVCLNCGFETHADEQAALNIARSWLFLRSQEYKKYQTNKTTGNTDKRAFVETWQSFYRKKLKEVWKPAV

SEQ ID NO: 41153 - protein, 978 aa, synthetic construct
  REGION 1..978: note = engineered CasX variant
QEIGKRINKIRRRLVKDSNTKKAGKTGPMKTLLVRVMTPDLRERLENLRKKPENIPQPISNTSRANLNKLLTDYTEMKKAILHVYWEEFQKDPVGLMSRVAQPASKKIDQNKLKPEMDEKGNLTTAGFACSQCGQPLFVYKLEQVSEKGKAYTNYFGRCNVAEHEKLILLAQLKPEKDSDEAVTYSLGKFGQRALDFYSIHVTKESTHPVKPLAQIAGNRYASPVGKALSDACMGTIASFLSKYQDIIIEHQKVVKGNQKRLESLRELAGKENLEYPSVTLPPQPHTKEGVDAYNEVIARVRMWVNLNLWQKLKLSRDDAKPLLRLKGFPSFPLVERQANEVDWWDMVCNVKKLINEKKEDGKVFWQNLAGYKRQEALRPYLSSEEDRKKGKKFARYQLGDLLWHLEKKHGEDWGKVYDEAWERIDKKVEGLSKHIKLEEERRSEDAQSKAALTDWLRAKASFVIEGLKEADKDEFCRCELKLQKWYGDLRGKPFAIEAENSILDISGFSKQYNCAFIWQKDGVKKLNLYLIINYFKGGKLRFKKIKPEAFEANRFYTVINKKSGEIVPMEVNFNFDDPNLIILPLAFGKRQGREFIWNDLLSLETGSLKLANGRVIEKTLYNRRTRQDEPALFVALTFERREVLDSSNIKPMNLIGVDRGENIPAVIALTDPEGCPLSRFKDSLGNPTHILRIGESYKEKQRTIQAKKEVEQRRAGGYSRKYASKAKNLADDMVRNTARDLLYYAVTQDAMLIFENLSRGFGRQGKRTFMAERQYTRMEDWLTAKLAYEGLPSKTYLSKTLAQYTSKTCSNCGFTITSADYDRVLEKLKKTATGWMTTINGKELKVEGQITYYNRYKRQNVVKDLSVELDRLSEESVNNDISSWTKGRSGEALSLLKKRFSHRPVQEKFVCLNCGFETHADEQAALNIARSWLFLRSQEYKKYQTNKTTGNTDKRAFVETWQSFYRKKLKEVWKPAV

SEQ ID NO: 41154 - protein, 979 aa, synthetic construct
  REGION 1..979: note = engineered CasX variant
QEIGKRINKIRRRLVKDSNTKKAGKTGPMKTLLVRVMTPDLRERLENLRKKPENIPQPISNTSRANLNKLLTDYTEMKKAILHVYWEEFQKDPVGLMSRVAQPASKKIDQNKLKPEMDEKGNLTTAGFACSQCGQPLFVYKLEQVSEKGKAYTNYFGRCNVAEHEKLILLAQLKPEKDSDEAVTYSLGKFGQRALDFYSIHVTKESTHPVKPLAQIAGNRYASYPVGKALSDACMGTIASFLSKYQDIIIEHQKVVKGNQKRLESLRELAGKENLEYPSVTLPPQPHTKEGVDAYNEVIARVRMWVNLNLWQKLKLSRDDAKPLLRLKGFPSFPLVERQANEVDWWDMVCNVKKLINEKKEDGKVFWQNLAGYKRQEALRPYLSSEEDRKKGKKFARYQLGDLLLHLYKKHGEDWGKVYDEAWERIDKKVEGLSKHIKLEEERRSEDAQSKAALTDWLRAKASFVIEGLKEADKDEFCRCELKLQKWYGDLRGKPFAIEAENSILDISGFSKQYNCAFIWQKDGVKKLNLYLIINYFKGGKLRFKKIKPEAFEANRFYTVINKKSGEIVPMEVNFNFDDPNLIILPLAFGKRQGREFIWNDLLSLETGSLKLANGRVIEKTLYNRRTRQDEPALFVALTFERREVLDSSNIKPMNLIGVDRGENIPAVIALTDPEGCPLSRFKDSLGNPTHILRIGESYKEKQRTIQAKKEVEQRRAGGYSRKYASKAKNLADDMVRNTARDLLYYAVTQDAMLIFENLSRGFGRQGKRTFMAERQYTRMEDWLTAKLAYEGLPSKTYLSKTLAQYTSKTCSNCGFTITSADYDRVLEKLKKTATGWMTTINGKELKVEGQITYYNRYKRQNVVKDLSVELDRLSEESVNNDISSWTKGRSGEALSLLKKRFSHRPVQEKFVCLNCGFETHADEQAALNIARSWLFLRSQEYKKYQTNKTTGNTDKRAFVETWQSFYRKKLKEVWKPAV

SEQ ID NO: 41155 - protein, 979 aa, synthetic construct
  REGION 1..979: note = engineered CasX variant
QEIGKRINKIRRRLVKDSNTKKAGKTGPMKTLLVRVMTPDLRERLENLRKKPENIPQPISNTSRANLNKLLTDYTEMKKAILHVYWEEFQKDPVGLMSRVAQPASKKIDQNKLKPEMDEKGNLTTAGFACSQCGQPLFVYKLEQVSEKGKAYTNYFGRCNVAEHEKLILLAQLKPEKDSDEAVTYSLGKFGQRALDFYSIHVTKESTHPVKPLAQIAGNRYASHPVGKALSDACMGTIASFLSKYQDIIIEHQKVVKGNQKRLESLRELAGKENLEYPSVTLPPQPHTKEGVDAYNEVIARVRMWVNLNLWQKLKLSRDDAKPLLRLKGFPSFPLVERQANEVDWWDMVCNVKKLINEKKEDGKVFWQNLAGYKRQEALRPYLSSEEDRKKGKKFARYQLGDLLLHLYKKHGEDWGKVYDEAWERIDKKVEGLSKHIKLEEERRSEDAQSKAALTDWLRAKASFVIEGLKEADKDEFCRCELKLQKWYGDLRGKPFAIEAENSILDISGFSKQYNCAFIWQKDGVKKLNLYLIINYFKGGKLRFKKIKPEAFEANRFYTVINKKSGEIVPMEVNFNFDDPNLIILPLAFGKRQGREFIWNDLLSLETGSLKLANGRVIEKTLYNRRTRQDEPALFVALTFERREVLDSSNIKPMNLIGVDRGENIPAVIALTDPEGCPLSRFKDSLGNPTHILRIGESYKEKQRTIQAKKEVEQRRAGGYSRKYASKAKNLADDMVRNTARDLLYYAVTQDAMLIFENLSRGFGRQGKRTFMAERQYTRMEDWLTAKLAYEGLPSKTYLSKTLAQYTSKTCSNCGFTITSADYDRVLEKLKKTATGWMTTINGKELKVEGQITYYNRYKRQNVVKDLSVELDRLSEESVNNDISSWTKGRSGEALSLLKKRFSHRPVQEKFVCLNCGFETHADEQAALNIARSWLFLRSQEYKKYQTNKTTGNTDKRAFVETWQSFYRKKLKEVWKPAV

SEQ ID NO: 41156 - protein, 979 aa, synthetic construct
  REGION 1..979: note = engineered CasX variant
QEIGKRINKIRRRLVKDSNTKKAGKTGPMKTLLVRVMTPDLRERLENLRKKPENIPQPISNTSRANLNKLLTDYTEMKKAILHVYWEEFQKDPVGLMSRVAQPASKKIDQNKLKPEMDEKGNLTTAGFACSQCGQPLFVYKLEQVSEKGKAYTNYFGRCNVAEHEKLILLAQLKPEKDSDEAVTYSLGKFGQRALDFYSIHVTKESTHPVKPLAQIAGNRYASSPVGKALSDACMGTIASFLSKYQDIIIEHQKVVKGNQKRLESLRELAGKENLEYPSVTLPPQPHTKEGVDAYNEVIARVRMWVNLNLWQKLKLSRDDAKPLLRLKGFPSFPLVERQANEVDWWDMVCNVKKLINEKKEDGKVFWQNLAGYKRQEALRPYLSSEEDRKKGKKFARYQLGDLLLHLYKKHGEDWGKVYDEAWERIDKKVEGLSKHIKLEEERRSEDAQSKAALTDWLRAKASFVIEGLKEADKDEFCRCELKLQKWYGDLRGKPFAIEAENSILDISGFSKQYNCAFIWQKDGVKKLNLYLIINYFKGGKLRFKKIKPEAFEANRFYTVINKKSGEIVPMEVNFNFDDPNLIILPLAFGKRQGREFIWNDLLSLETGSLKLANGRVIEKTLYNRRTRQDEPALFVALTFERREVLDSSNIKPMNLIGVDRGENIPAVIALTDPEGCPLSRFKDSLGNPTHILRIGESYKEKQRTIQAKKEVEQRRAGGYSRKYASKAKNLADDMVRNTARDLLYYAVTQDAMLIFENLSRGFGRQGKRTFMAERQYTRMEDWLTAKLAYEGLPSKTYLSKTLAQYTSKTCSNCGFTITSADYDRVLEKLKKTATGWMTTINGKELKVEGQITYYNRYKRQNVVKDLSVELDRLSEESVNNDISSWTKGRSGEALSLLKKRFSHRPVQEKFVCLNCGFETHADEQAALNIARSWLFLRSQEYKKYQTNKTTGNTDKRAFVETWQSFYRKKLKEVWKPAV

SEQ ID NO: 41157 - protein, 979 aa, synthetic construct
  REGION 1..979: note = engineered CasX variant
QEIGKRINKIRRRLVKDSNTKKAGKTGPMKTLLVRVMTPDLRERLENLRKKPENIPQPISNTSRANLNKLLTDYTEMKKAILHVYWEEFQKDPVGLMSRVAQPASKKIDQNKLKPEMDEKGNLTTAGFACSQCGQPLFVYKLEQVSEKGKAYTNYFGRCNVAEHEKLILLAQLKPEKDSDEAVTYSLGKFGQRALDFYSIHVTKESTHPVKPLAQIAGNRYASTPVGKALSDACMGTIASFLSKYQDIIIEHQKVVKGNQKRLESLRELAGKENLEYPSVTLPPQPHTKEGVDAYNEVIARVRMWVNLNLWQKLKLSRDDAKPLLRLKGFPSFPLVERQANEVDWWDMVCNVKKLINEKKEDGKVFWQNLAGYKRQEALRPYLSSEEDRKKGKKFARYQLGDLLLHLYKKHGEDWGKVYDEAWERIDKKVEGLSKHIKLEEERRSEDAQSKAALTDWLRAKASFVIEGLKEADKDEFCRCELKLQKWYGDLRGKPFAIEAENSILDISGFSKQYNCAFIWQKDGVKKLNLYLIINYFKGGKLRFKKIKPEAFEANRFYTVINKKSGEIVPMEVNFNFDDPNLIILPLAFGKRQGREFIWNDLLSLETGSLKLANGRVIEKTLYNRRTRQDEPALFVALTFERREVLDSSNIKPMNLIGVDRGENIPAVIALTDPEGCPLSRFKDSLGNPTHILRIGESYKEKQRTIQAKKEVEQRRAGGYSRKYASKAKNLADDMVRNTARDLLYYAVTQDAMLIFENLSRGFGRQGKRTFMAERQYTRMEDWLTAKLAYEGLPSKTYLSKTLAQYTSKTCSNCGFTITSADYDRVLEKLKKTATGWMTTINGKELKVEGQITYYNRYKRQNVVKDLSVELDRLSEESVNNDISSWTKGRSGEALSLLKKRFSHRPVQEKFVCLNCGFETHADEQAALNIARSWLFLRSQEYKKYQTNKTTGNTDKRAFVETWQSFYRKKLKEVWKPAV

SEQ ID NO: 41158 - protein, 979 aa, synthetic construct
  REGION 1..979: note = engineered CasX variant
QEIGKRINKIRRRLVKDSNTKKAGKTGPMKTLLVRVMTPDLRERLENLRKKPENIPQPISNTSRANLNKLLTDYTEMKKAILHVYWEEFQKDPVGLMSRVAQPASKKIDQNKLKPEMDEKGNLTTAGFACSQCGQPLFVYKLEQVSEKGKAYTNYFGRCNVAEHEKLILLAQLKPEKDSDEAVTYSLGKFGQRALDFYSIHVTKESTHPVKPLAQIAGNRYASAPVGKALSDACMGTIASFLSKYQDIIIEHQKVVKGNQKRLESLRELAGKENLEYPSVTLPPQPHTKEGVDAYNEVIARVRMWVNLNLWQKLKLSRDDAKPLLRLKGFPSFPLVERQANEVDWWDMVCNVKKLINEKKEDGKVFWQNLAGYKRQEALRPYLSSEEDRKKGKKFARYQLGDLLLHLYKKHGEDWGKVYDEAWERIDKKVEGLSKHIKLEEERRSEDAQSKAALTDWLRAKASFVIEGLKEADKDEFCRCELKLQKWYGDLRGKPFAIEAENSILDISGFSKQYNCAFIWQKDGVKKLNLYLIINYFKGGKLRFKKIKPEAFEANRFYTVINKKSGEIVPMEVNFNFDDPNLIILPLAFGKRQGREFIWNDLLSLETGSLKLANGRVIEKTLYNRRTRQDEPALFVALTFERREVLDSSNIKPMNLIGVDRGENIPAVIALTDPEGCPLSRFKDSLGNPTHILRIGESYKEKQRTIQAKKEVEQRRAGGYSRKYASKAKNLADDMVRNTARDLLYYAVTQDAMLIFENLSRGFGRQGKRTFMAERQYTRMEDWLTAKLAYEGLPSKTYLSKTLAQYTSKTCSNCGFTITSADYDRVLEKLKKTATGWMTTINGKELKVEGQITYYNRYKRQNVVKDLSVELDRLSEESVNNDISSWTKGRSGEALSLLKKRFSHRPVQEKFVCLNCGFETHADEQAALNIARSWLFLRSQEYKKYQTNKTTGNTDKRAFVETWQSFYRKKLKEVWKPAV

SEQ ID NO: 41159 - protein, 979 aa, synthetic construct
  REGION 1..979: note = engineered CasX variant
QEIGKRINKIRRRLVKDSNTKKAGKTGPMKTLLVRVMTPDLRERLENLRKKPENIPQPISNTSRANLNKLLTDYTEMKKAILHVYWEEFQKDPVGLMSRVAQPASKKIDQNKLKPEMDEKGNLTTAGFACSQCGQPLFVYKLEQVSEKGKAYTNYFGRCNVAEHEKLILLAQLKPEKDSDEAVTYSLGKFGQRALDFYSIHVTKESTHPVKPLAQIAGNRYASVPVGKALSDACMGTIASFLSKYQDIIIEHQKVVKGNQKRLESLRELAGKENLEYPSVTLPPQPHTKEGVDAYNEVIARVRMWVNLNLWQKLKLSRDDAKPLLRLKGFPSFPLVERQANEVDWWDMVCNVKKLINEKKEDGKVFWQNLAGYKRQEALRPYLSSEEDRKKGKKFARYQLGDLLLHLYKKHGEDWGKVYDEAWERIDKKVEGLSKHIKLEEERRSEDAQSKAALTDWLRAKASFVIEGLKEADKDEFCRCELKLQKWYGDLRGKPFAIEAENSILDISGFSKQYNCAFIWQKDGVKKLNLYLIINYFKGGKLRFKKIKPEAFEANRFYTVINKKSGEIVPMEVNFNFDDPNLIILPLAFGKRQGREFIWNDLLSLETGSLKLANGRVIEKTLYNRRTRQDEPALFVALTFERREVLDSSNIKPMNLIGVDRGENIPAVIALTDPEGCPLSRFKDSLGNPTHILRIGESYKEKQRTIQAKKEVEQRRAGGYSRKYASKAKNLADDMVRNTARDLLYYAVTQDAMLIFENLSRGFGRQGKRTFMAERQYTRMEDWLTAKLAYEGLPSKTYLSKTLAQYTSKTCSNCGFTITSADYDRVLEKLKKTATGWMTTINGKELKVEGQITYYNRYKRQNVVKDLSVELDRLSEESVNNDISSWTKGRSGEALSLLKKRFSHRPVQEKFVCLNCGFETHADEQAALNIARSWLFLRSQEYKKYQTNKTTGNTDKRAFVETWQSFYRKKLKEVWKPAV

SEQ ID NO: 41160 - protein, 979 aa, synthetic construct
  REGION 1..979: note = engineered CasX variant
QEIGKRINKIRRRLVKDSNTKKAGKTGPMKTLLVRVMTPDLRERLENLRKKPENIPQPISNTSRANLNKLLTDYTEMKKAILHVYWEEFQKDPVGLMSRVAQPASKKIDQNKLKPEMDEKGNLTTAGFACSQCGQPLFVYKLEQVSEKGKAYTNYFGRCNVAEHEKLIKLAQLKPEKDSDEAVTYSLGKFGQRALDFYSIHVTKESTHPVKPLAQIAGNRYASGPVGKALSDACMGTIASFLSKYQDIIIEHQKVVKGNQKRLESLRELAGKENLEYPSVTLPPQPHTKEGVDAYNEVIARVRMWVNLNLWQKLKLSRDDAKPLLRLKGFPSFPLVERQANEVDWWDMVCNVKKLINEKKEDGKVFWQNLAGYKRQEALRPYLSSEEDRKKGKKFARYQLGDLLLHLYKKHGEDWGKVYDEAWERIDKKVEGLSKHIKLEEERRSEDAQSKAALTDWLRAKASFVIEGLKEADKDEFCRCELKLQKWYGDLRGKPFAIEAENSILDISGFSKQYNCAFIWQKDGVKKLNLYLIINYFKGGKLRFKKIKPEAFEANRFYTVINKKSGEIVPMEVNFNFDDPNLIILPLAFGKRQGREFIWNDLLSLETGSLKLANGRVIEKTLYNRRTRQDEPALFVALTFERREVLDSSNIKPMNLIGVDRGENIPAVIALTDPEGCPLSRFKDSLGNPTHILRIGESYKEKQRTIQAKKEVEQRRAGGYSRKYASKAKNLADDMVRNTARDLLYYAVTQDAMLIFENLSRGFGRQGKRTFMAERQYTRMEDWLTAKLAYEGLPSKTYLSKTLAQYTSKTCSNCGFTITSADYDRVLEKLKKTATGWMTTINGKELKVEGQITYYNRYKRQNVVKDLSVELDRLSEESVNNDISSWTKGRSGEALSLLKKRFSHRPVQEKFVCLNCGFETHADEQAALNIARSWLFLRSQEYKKYQTNKTTGNTDKRAFVETWQSFYRKKLKEVWKPAV

SEQ ID NO: 41161 - protein, 978 aa, synthetic construct
  REGION 1..978: note = engineered CasX variant
QEIGKRINKIRRRLVKDSNTKKAGKTGPMKTLLVRVMTPDLRERLENLRKKPENIPQPISNTSRANLNKLLTDYTEMKKAILHVYWEEFQKDPVGLMSRVAQPASKKIDQNKLKPEMDEKGNLTTAGFACSQCGQPLFVYKLEQVSEKGKAYTNYFGRCNVAEHEKLILLAQLKPEKDSDEAVTYSLGKFGQRALDFYSIHVTKESTHPVKPLAQIAGNRYASPVGKALSDACMGTIASFLSKYQDIIIEHQKVVKGNQKRLESLRELAGKENLEYPSVTLPPQPHTKEGVDAYNEVIARVRMWVNLNLWQKLKLSRDDAKPLLRLKGFPSFPLVERQANEVDWWDMVCNVKKLINEKKEDGKVFWQNLAGYKRQEALRPYLSSEEDRKKGKKFARYQLGDLLLHLYKKHGEDWGKVYDEAWERIDKKVEGLSKHIKLEEERRSEDAQSKAALTDWLRAKASFVIEGLKEADKDEFCRCELKLQKWYGDLRGKPFAIEAENSILDISGFSKQYNCAFIWQKDGVKKLNLYLIINYFKGGKLRFKKIKPEAFEANRFYTVINKKSGEIVPMEVNFNFDDPNLIILPLAFGKRQGREFIWNDLLSLETGSLKLANGRVIEKTLYNRRTRQDEPALFVALTFERREVLDSSNIKPMNLIGVDRGENIPAVIALTDPEGCPLSRFKDSLGNPTHILRIGESYKEKQRTIQAKKEVEQRRAGGYSRKYASKAKNLADDMVRNTARDLLYYAVTQDAMLIFENLSRGFGRQGKRTFMAERQYTRMEDWLTAKLAYEGLPSKTYLSKTLAQYTSKTCSNCGFTITSADYDRVLEKLKKTATGWMTTINGKELKVEGQITYYNRYKRQNVVKDLSVELDRLSEESVNNDISSWTKGRSGEALSLLKKRFSHRPVQEKFVCLNCGFETHADEQAALNIARSWLFLRSQEYKKYQTNKTTGNTDKRAFVETWQSFYRKKLKEVWKPAV

SEQ ID NO: 41162 - protein, 979 aa, synthetic construct
  REGION 1..979: note = engineered CasX variant
QEIGKRINKIRRRLVKDSNTKKAGKTGPMKTLLVRVMTPDLRERLENLRKKPENIPQPISNTSRANLNKLLTDYTEMKKAILHVYWEEFQKDPVGLMSRVAQPASKKIDQNKLKPEMDEKGNLTTAGFACSQCGQPLFVYKLEQVSEKGKAYTNYFGRCNVAEHEKLILLAQLKPEKDSDEAVTYSLGKFGQRALDFYSIHVTKESTHPVKPLAQIAGNRYASYPVGKALSDACMGTIASFLSKYQDIIIEHQKVVKGNQKRLESLRELAGKENLEYPSVTLPPQPHTKEGVDAYNEVIARVRMWVNLNLWQKLKLSRDDAKPLLRLKGFPSFPLVERQANEVDWWDMVCNVKKLINEKKEDGKVFWQNLAGYKRQEALRPYLSSEEDRKKGKKFARYQLGDLLLHLEKKHPEDWGKVYDEAWERIDKKVEGLSKHIKLEEERRSEDAQSKAALTDWLRAKASFVIEGLKEADKDEFCRCELKLQKWYGDLRGKPFAIEAENSILDISGFSKQYNCAFIWQKDGVKKLNLYLIINYFKGGKLRFKKIKPEAFEANRFYTVINKKSGEIVPMEVNFNFDDPNLIILPLAFGKRQGREFIWNDLLSLETGSLKLANGRVIEKTLYNRRTRQDEPALFVALTFERREVLDSSNIKPMNLIGVDRGENIPAVIALTDPEGCPLSRFKDSLGNPTHILRIGESYKEKQRTIQAKKEVEQRRAGGYSRKYASKAKNLADDMVRNTARDLLYYAVTQDAMLIFENLSRGFGRQGKRTFMAERQYTRMEDWLTAKLAYEGLPSKTYLSKTLAQYTSKTCSNCGFTITSADYDRVLEKLKKTATGWMTTINGKELKVEGQITYYNRYKRQNVVKDLSVELDRLSEESVNNDISSWTKGRSGEALSLLKKRFSHRPVQEKFVCLNCGFETHADEQAALNIARSWLFLRSQEYKKYQTNKTTGNTDKRAFVETWQSFYRKKLKEVWKPAV

SEQ ID NO: 41163 - protein, 979 aa, synthetic construct
  REGION 1..979: note = engineered CasX variant
QEIGKRINKIRRRLVKDSNTKKAGKTGPMKTLLVRVMTPDLRERLENLRKKPENIPQPISNTSRANLNKLLTDYTEMKKAILHVYWEEFQKDPVGLMSRVAQPASKKIDQNKLKPEMDEKGNLTTAGFACSQCGQPLFVYKLEQVSEKGKAYTNYFGRCNVAEHEKLILLAQLKPEKDSDEAVTYSLGKFGQRALDFYSIHVTKESTHPVKPLAQIAGNRYASHPVGKALSDACMGTIASFLSKYQDIIIEHQKVVKGNQKRLESLRELAGKENLEYPSVTLPPQPHTKEGVDAYNEVIARVRMWVNLNLWQKLKLSRDDAKPLLRLKGFPSFPLVERQANEVDWWDMVCNVKKLINEKKEDGKVFWQNLAGYKRQEALRPYLSSEEDRKKGKKFARYQLGDLLLHLEKKHPEDWGKVYDEAWERIDKKVEGLSKHIKLEEERRSEDAQSKAALTDWLRAKASFVIEGLKEADKDEFCRCELKLQKWYGDLRGKPFAIEAENSILDISGFSKQYNCAFIWQKDGVKKLNLYLIINYFKGGKLRFKKIKPEAFEANRFYTVINKKSGEIVPMEVNFNFDDPNLIILPLAFGKRQGREFIWNDLLSLETGSLKLANGRVIEKTLYNRRTRQDEPALFVALTFERREVLDSSNIKPMNLIGVDRGENIPAVIALTDPEGCPLSRFKDSLGNPTHILRIGESYKEKQRTIQAKKEVEQRRAGGYSRKYASKAKNLADDMVRNTARDLLYYAVTQDAMLIFENLSRGFGRQGKRTFMAERQYTRMEDWLTAKLAYEGLPSKTYLSKTLAQYTSKTCSNCGFTITSADYDRVLEKLKKTATGWMTTINGKELKVEGQITYYNRYKRQNVVKDLSVELDRLSEESVNNDISSWTKGRSGEALSLLKKRFSHRPVQEKFVCLNCGFETHADEQAALNIARSWLFLRSQEYKKYQTNKTTGNTDKRAFVETWQSFYRKKLKEVWKPAV

SEQ ID NO: 41164 - protein, 979 aa, synthetic construct
  REGION 1..979: note = engineered CasX variant
QEIGKRINKIRRRLVKDSNTKKAGKTGPMKTLLVRVMTPDLRERLENLRKKPENIPQPISNTSRANLNKLLTDYTEMKKAILHVYWEEFQKDPVGLMSRVAQPASKKIDQNKLKPEMDEKGNLTTAGFACSQCGQPLFVYKLEQVSEKGKAYTNYFGRCNVAEHEKLILLAQLKPEKDSDEAVTYSLGKFGQRALDFYSIHVTKESTHPVKPLAQIAGNRYASSPVGKALSDACMGTIASFLSKYQDIIIEHQKVVKGNQKRLESLRELAGKENLEYPSVTLPPQPHTKEGVDAYNEVIARVRMWVNLNLWQKLKLSRDDAKPLLRLKGFPSFPLVERQANEVDWWDMVCNVKKLINEKKEDGKVFWQNLAGYKRQEALRPYLSSEEDRKKGKKFARYQLGDLLLHLEKKHPEDWGKVYDEAWERIDKKVEGLSKHIKLEEERRSEDAQSKAALTDWLRAKASFVIEGLKEADKDEFCRCELKLQKWYGDLRGKPFAIEAENSILDISGFSKQYNCAFIWQKDGVKKLNLYLIINYFKGGKLRFKKIKPEAFEANRFYTVINKKSGEIVPMEVNFNFDDPNLIILPLAFGKRQGREFIWNDLLSLETGSLKLANGRVIEKTLYNRRTRQDEPALFVALTFERREVLDSSNIKPMNLIGVDRGENIPAVIALTDPEGCPLSRFKDSLGNPTHILRIGESYKEKQRTIQAKKEVEQRRAGGYSRKYASKAKNLADDMVRNTARDLLYYAVTQDAMLIFENLSRGFGRQGKRTFMAERQYTRMEDWLTAKLAYEGLPSKTYLSKTLAQYTSKTCSNCGFTITSADYDRVLEKLKKTATGWMTTINGKELKVEGQITYYNRYKRQNVVKDLSVELDRLSEESVNNDISSWTKGRSGEALSLLKKRFSHRPVQEKFVCLNCGFETHADEQAALNIARSWLFLRSQEYKKYQTNKTTGNTDKRAFVETWQSFYRKKLKEVWKPAV

SEQ ID NO: 41165 - protein, 979 aa, synthetic construct
  REGION 1..979: note = engineered CasX variant
QEIGKRINKIRRRLVKDSNTKKAGKTGPMKTLLVRVMTPDLRERLENLRKKPENIPQPISNTSRANLNKLLTDYTEMKKAILHVYWEEFQKDPVGLMSRVAQPASKKIDQNKLKPEMDEKGNLTTAGFACSQCGQPLFVYKLEQVSEKGKAYTNYFGRCNVAEHEKLILLAQLKPEKDSDEAVTYSLGKFGQRALDFYSIHVTKESTHPVKPLAQIAGNRYASTPVGKALSDACMGTIASFLSKYQDIIIEHQKVVKGNQKRLESLRELAGKENLEYPSVTLPPQPHTKEGVDAYNEVIARVRMWVNLNLWQKLKLSRDDAKPLLRLKGFPSFPLVERQANEVDWWDMVCNVKKLINEKKEDGKVFWQNLAGYKRQEALRPYLSSEEDRKKGKKFARYQLGDLLLHLEKKHPEDWGKVYDEAWERIDKKVEGLSKHIKLEEERRSEDAQSKAALTDWLRAKASFVIEGLKEADKDEFCRCELKLQKWYGDLRGKPFAIEAENSILDISGFSKQYNCAFIWQKDGVKKLNLYLIINYFKGGKLRFKKIKPEAFEANRFYTVINKKSGEIVPMEVNFNFDDPNLIILPLAFGKRQGREFIWNDLLSLETGSLKLANGRVIEKTLYNRRTRQDEPALFVALTFERREVLDSSNIKPMNLIGVDRGENIPAVIALTDPEGCPLSRFKDSLGNPTHILRIGESYKEKQRTIQAKKEVEQRRAGGYSRKYASKAKNLADDMVRNTARDLLYYAVTQDAMLIFENLSRGFGRQGKRTFMAERQYTRMEDWLTAKLAYEGLPSKTYLSKTLAQYTSKTCSNCGFTITSADYDRVLEKLKKTATGWMTTINGKELKVEGQITYYNRYKRQNVVKDLSVELDRLSEESVNNDISSWTKGRSGEALSLLKKRFSHRPVQEKFVCLNCGFETHADEQAALNIARSWLFLRSQEYKKYQTNKTTGNTDKRAFVETWQSFYRKKLKEVWKPAV

SEQ ID NO: 41166 - protein, 979 aa, synthetic construct
  REGION 1..979: note = engineered CasX variant
QEIGKRINKIRRRLVKDSNTKKAGKTGPMKTLLVRVMTPDLRERLENLRKKPENIPQPISNTSRANLNKLLTDYTEMKKAILHVYWEEFQKDPVGLMSRVAQPASKKIDQNKLKPEMDEKGNLTTAGFACSQCGQPLFVYKLEQVSEKGKAYTNYFGRCNVAEHEKLILLAQLKPEKDSDEAVTYSLGKFGQRALDFYSIHVTKESTHPVKPLAQIAGNRYASAPVGKALSDACMGTIASFLSKYQDIIIEHQKVVKGNQKRLESLRELAGKENLEYPSVTLPPQPHTKEGVDAYNEVIARVRMWVNLNLWQKLKLSRDDAKPLLRLKGFPSFPLVERQANEVDWWDMVCNVKKLINEKKEDGKVFWQNLAGYKRQEALRPYLSSEEDRKKGKKFARYQLGDLLLHLEKKHPEDWGKVYDEAWERIDKKVEGLSKHIKLEEERRSEDAQSKAALTDWLRAKASFVIEGLKEADKDEFCRCELKLQKWYGDLRGKPFAIEAENSILDISGFSKQYNCAFIWQKDGVKKLNLYLIINYFKGGKLRFKKIKPEAFEANRFYTVINKKSGEIVPMEVNFNFDDPNLIILPLAFGKRQGREFIWNDLLSLETGSLKLANGRVIEKTLYNRRTRQDEPALFVALTFERREVLDSSNIKPMNLIGVDRGENIPAVIALTDPEGCPLSRFKDSLGNPTHILRIGESYKEKQRTIQAKKEVEQRRAGGYSRKYASKAKNLADDMVRNTARDLLYYAVTQDAMLIFENLSRGFGRQGKRTFMAERQYTRMEDWLTAKLAYEGLPSKTYLSKTLAQYTSKTCSNCGFTITSADYDRVLEKLKKTATGWMTTINGKELKVEGQITYYNRYKRQNVVKDLSVELDRLSEESVNNDISSWTKGRSGEALSLLKKRFSHRPVQEKFVCLNCGFETHADEQAALNIARSWLFLRSQEYKKYQTNKTTGNTDKRAFVETWQSFYRKKLKEVWKPAV

SEQ ID NO: 41167 - protein, 979 aa, synthetic construct
  REGION 1..979: note = engineered CasX variant
QEIGKRINKIRRRLVKDSNTKKAGKTGPMKTLLVRVMTPDLRERLENLRKKPENIPQPISNTSRANLNKLLTDYTEMKKAILHVYWEEFQKDPVGLMSRVAQPASKKIDQNKLKPEMDEKGNLTTAGFACSQCGQPLFVYKLEQVSEKGKAYTNYFGRCNVAEHEKLILLAQLKPEKDSDEAVTYSLGKFGQRALDFYSIHVTKESTHPVKPLAQIAGNRYASVPVGKALSDACMGTIASFLSKYQDIIIEHQKVVKGNQKRLESLRELAGKENLEYPSVTLPPQPHTKEGVDAYNEVIARVRMWVNLNLWQKLKLSRDDAKPLLRLKGFPSFPLVERQANEVDWWDMVCNVKKLINEKKEDGKVFWQNLAGYKRQEALRPYLSSEEDRKKGKKFARYQLGDLLLHLEKKHPEDWGKVYDEAWERIDKKVEGLSKHIKLEEERRSEDAQSKAALTDWLRAKASFVIEGLKEADKDEFCRCELKLQKWYGDLRGKPFAIEAENSILDISGFSKQYNCAFIWQKDGVKKLNLYLIINYFKGGKLRFKKIKPEAFEANRFYTVINKKSGEIVPMEVNFNFDDPNLIILPLAFGKRQGREFIWNDLLSLETGSLKLANGRVIEKTLYNRRTRQDEPALFVALTFERREVLDSSNIKPMNLIGVDRGENIPAVIALTDPEGCPLSRFKDSLGNPTHILRIGESYKEKQRTIQAKKEVEQRRAGGYSRKYASKAKNLADDMVRNTARDLLYYAVTQDAMLIFENLSRGFGRQGKRTFMAERQYTRMEDWLTAKLAYEGLPSKTYLSKTLAQYTSKTCSNCGFTITSADYDRVLEKLKKTATGWMTTINGKELKVEGQITYYNRYKRQNVVKDLSVELDRLSEESVNNDISSWTKGRSGEALSLLKKRFSHRPVQEKFVCLNCGFETHADEQAALNIARSWLFLRSQEYKKYQTNKTTGNTDKRAFVETWQSFYRKKLKEVWKPAV

SEQ ID NO: 41168 - protein, 979 aa, synthetic construct
  REGION 1..979: note = engineered CasX variant
QEIGKRINKIRRRLVKDSNTKKAGKTGPMKTLLVRVMTPDLRERLENLRKKPENIPQPISNTSRANLNKLLTDYTEMKKAILHVYWEEFQKDPVGLMSRVAQPASKKIDQNKLKPEMDEKGNLTTAGFACSQCGQPLFVYKLEQVSEKGKAYTNYFGRCNVAEHEKLIKLAQLKPEKDSDEAVTYSLGKFGQRALDFYSIHVTKESTHPVKPLAQIAGNRYASGPVGKALSDACMGTIASFLSKYQDIIIEHQKVVKGNQKRLESLRELAGKENLEYPSVTLPPQPHTKEGVDAYNEVIARVRMWVNLNLWQKLKLSRDDAKPLLRLKGFPSFPLVERQANEVDWWDMVCNVKKLINEKKEDGKVFWQNLAGYKRQEALRPYLSSEEDRKKGKKFARYQLGDLLLHLEKKHPEDWGKVYDEAWERIDKKVEGLSKHIKLEEERRSEDAQSKAALTDWLRAKASFVIEGLKEADKDEFCRCELKLQKWYGDLRGKPFAIEAENSILDISGFSKQYNCAFIWQKDGVKKLNLYLIINYFKGGKLRFKKIKPEAFEANRFYTVINKKSGEIVPMEVNFNFDDPNLIILPLAFGKRQGREFIWNDLLSLETGSLKLANGRVIEKTLYNRRTRQDEPALFVALTFERREVLDSSNIKPMNLIGVDRGENIPAVIALTDPEGCPLSRFKDSLGNPTHILRIGESYKEKQRTIQAKKEVEQRRAGGYSRKYASKAKNLADDMVRNTARDLLYYAVTQDAMLIFENLSRGFGRQGKRTFMAERQYTRMEDWLTAKLAYEGLPSKTYLSKTLAQYTSKTCSNCGFTITSADYDRVLEKLKKTATGWMTTINGKELKVEGQITYYNRYKRQNVVKDLSVELDRLSEESVNNDISSWTKGRSGEALSLLKKRFSHRPVQEKFVCLNCGFETHADEQAALNIARSWLFLRSQEYKKYQTNKTTGNTDKRAFVETWQSFYRKKLKEVWKPAV

SEQ ID NO: 41169 - protein, 978 aa, synthetic construct
  REGION 1..978: note = engineered CasX variant
QEIGKRINKIRRRLVKDSNTKKAGKTGPMKTLLVRVMTPDLRERLENLRKKPENIPQPISNTSRANLNKLLTDYTEMKKAILHVYWEEFQKDPVGLMSRVAQPASKKIDQNKLKPEMDEKGNLTTAGFACSQCGQPLFVYKLEQVSEKGKAYTNYFGRCNVAEHEKLILLAQLKPEKDSDEAVTYSLGKFGQRALDFYSIHVTKESTHPVKPLAQIAGNRYASPVGKALSDACMGTIASFLSKYQDIIIEHQKVVKGNQKRLESLRELAGKENLEYPSVTLPPQPHTKEGVDAYNEVIARVRMWVNLNLWQKLKLSRDDAKPLLRLKGFPSFPLVERQANEVDWWDMVCNVKKLINEKKEDGKVFWQNLAGYKRQEALRPYLSSEEDRKKGKKFARYQLGDLLLHLEKKHPEDWGKVYDEAWERIDKKVEGLSKHIKLEEERRSEDAQSKAALTDWLRAKASFVIEGLKEADKDEFCRCELKLQKWYGDLRGKPFAIEAENSILDISGFSKQYNCAFIWQKDGVKKLNLYLIINYFKGGKLRFKKIKPEAFEANRFYTVINKKSGEIVPMEVNFNFDDPNLIILPLAFGKRQGREFIWNDLLSLETGSLKLANGRVIEKTLYNRRTRQDEPALFVALTFERREVLDSSNIKPMNLIGVDRGENIPAVIALTDPEGCPLSRFKDSLGNPTHILRIGESYKEKQRTIQAKKEVEQRRAGGYSRKYASKAKNLADDMVRNTARDLLYYAVTQDAMLIFENLSRGFGRQGKRTFMAERQYTRMEDWLTAKLAYEGLPSKTYLSKTLAQYTSKTCSNCGFTITSADYDRVLEKLKKTATGWMTTINGKELKVEGQITYYNRYKRQNVVKDLSVELDRLSEESVNNDISSWTKGRSGEALSLLKKRFSHRPVQEKFVCLNCGFETHADEQAALNIARSWLFLRSQEYKKYQTNKTTGNTDKRAFVETWQSFYRKKLKEVWKPAV

SEQ ID NO: 41170 - protein, 980 aa, synthetic construct
  REGION 1..980: note = engineered CasX variant
QEIGKRINKIRRRLVKDSNTKKAGKTGPMKTLLVRVMTPDLRERLENLRKKPENIPQPISNTSRANLNKLLTDYTEMKKAILHVYWEEFQKDPVGLMSRVAQPASKKIDQNKLKPEMDEKGNLTTAGFACSQCGQPLFVYKLEQVSEKGKAYTNYFGRCNVAEHEKLILLAQLKPEKDSDEAVTYSLGKFGQRALDFYSIHVTKESTHPVKPLAQIAGNRYASYPVGKALSDACMGTIASFLSKYQDIIIEHQKVVKGNQKRLESLRELAGKENLEYPSVTLPPQPHTKEGVDAYNEVIARVRMWVNLNLWQKLKLSRDDAKPLLRLKGFPSFPLVERQANEVDWWDMVCNVKKLINEKKEDGKVFWQNLAGYKRQEALRPYLSSEEDRKKGKKFARYQLGDLLLHLEKKHGERDWGKVYDEAWERIDKKVEGLSKHIKLEEERRSEDAQSKAALTDWLRAKASFVIEGLKEADKDEFCRCELKLQKWYGDLRGKPFAIEAENSILDISGFSKQYNCAFIWQKDGVKKLNLYLIINYFKGGKLRFKKIKPEAFEANRFYTVINKKSGEIVPMEVNFNFDDPNLIILPLAFGKRQGREFIWNDLLSLETGSLKLANGRVIEKTLYNRRTRQDEPALFVALTFERREVLDSSNIKPMNLIGVDRGENIPAVIALTDPEGCPLSRFKDSLGNPTHILRIGESYKEKQRTIQAKKEVEQRRAGGYSRKYASKAKNLADDMVRNTARDLLYYAVTQDAMLIFENLSRGFGRQGKRTFMAERQYTRMEDWLTAKLAYEGLPSKTYLSKTLAQYTSKTCSNCGFTITSADYDRVLEKLKKTATGWMTTINGKELKVEGQITYYNRYKRQNVVKDLSVELDRLSEESVNNDISSWTKGRSGEALSLLKKRFSHRPVQEKFVCLNCGFETHADEQAALNIARSWLFLRSQEYKKYQTNKTTGNTDKRAFVETWQSFYRKKLKEVWKPAV

SEQ ID NO: 41171 - protein, 980 aa, synthetic construct
  REGION 1..980: note = engineered CasX variant
QEIGKRINKIRRRLVKDSNTKKAGKTGPMKTLLVRVMTPDLRERLENLRKKPENIPQPISNTSRANLNKLLTDYTEMKKAILHVYWEEFQKDPVGLMSRVAQPASKKIDQNKLKPEMDEKGNLTTAGFACSQCGQPLFVYKLEQVSEKGKAYTNYFGRCNVAEHEKLILLAQLKPEKDSDEAVTYSLGKFGQRALDFYSIHVTKESTHPVKPLAQIAGNRYASHPVGKALSDACMGTIASFLSKYQDIIIEHQKVVKGNQKRLESLRELAGKENLEYPSVTLPPQPHTKEGVDAYNEVIARVRMWVNLNLWQKLKLSRDDAKPLLRLKGFPSFPLVERQANEVDWWDMVCNVKKLINEKKEDGKVFWQNLAGYKRQEALRPYLSSEEDRKKGKKFARYQLGDLLLHLEKKHGERDWGKVYDEAWERIDKKVEGLSKHIKLEEERRSEDAQSKAALTDWLRAKASFVIEGLKEADKDEFCRCELKLQKWYGDLRGKPFAIEAENSILDISGFSKQYNCAFIWQKDGVKKLNLYLIINYFKGGKLRFKKIKPEAFEANRFYTVINKKSGEIVPMEVNFNFDDPNLIILPLAFGKRQGREFIWNDLLSLETGSLKLANGRVIEKTLYNRRTRQDEPALFVALTFERREVLDSSNIKPMNLIGVDRGENIPAVIALTDPEGCPLSRFKDSLGNPTHILRIGESYKEKQRTIQAKKEVEQRRAGGYSRKYASKAKNLADDMVRNTARDLLYYAVTQDAMLIFENLSRGFGRQGKRTFMAERQYTRMEDWLTAKLAYEGLPSKTYLSKTLAQYTSKTCSNCGFTITSADYDRVLEKLKKTATGWMTTINGKELKVEGQITYYNRYKRQNVVKDLSVELDRLSEESVNNDISSWTKGRSGEALSLLKKRFSHRPVQEKFVCLNCGFETHADEQAALNIARSWLFLRSQEYKKYQTNKTTGNTDKRAFVETWQSFYRKKLKEVWKPAV

SEQ ID NO: 41172 - protein, 980 aa, synthetic construct
  REGION 1..980: note = engineered CasX variant
QEIGKRINKIRRRLVKDSNTKKAGKTGPMKTLLVRVMTPDLRERLENLRKKPENIPQPISNTSRANLNKLLTDYTEMKKAILHVYWEEFQKDPVGLMSRVAQPASKKIDQNKLKPEMDEKGNLTTAGFACSQCGQPLFVYKLEQVSEKGKAYTNYFGRCNVAEHEKLILLAQLKPEKDSDEAVTYSLGKFGQRALDFYSIHVTKESTHPVKPLAQIAGNRYASSPVGKALSDACMGTIASFLSKYQDIIIEHQKVVKGNQKRLESLRELAGKENLEYPSVTLPPQPHTKEGVDAYNEVIARVRMWVNLNLWQKLKLSRDDAKPLLRLKGFPSFPLVERQANEVDWWDMVCNVKKLINEKKEDGKVFWQNLAGYKRQEALRPYLSSEEDRKKGKKFARYQLGDLLLHLEKKHGERDWGKVYDEAWERIDKKVEGLSKHIKLEEERRSEDAQSKAALTDWLRAKASFVIEGLKEADKDEFCRCELKLQKWYGDLRGKPFAIEAENSILDISGFSKQYNCAFIWQKDGVKKLNLYLIINYFKGGKLRFKKIKPEAFEANRFYTVINKKSGEIVPMEVNFNFDDPNLIILPLAFGKRQGREFIWNDLLSLETGSLKLANGRVIEKTLYNRRTRQDEPALFVALTFERREVLDSSNIKPMNLIGVDRGENIPAVIALTDPEGCPLSRFKDSLGNPTHILRIGESYKEKQRTIQAKKEVEQRRAGGYSRKYASKAKNLADDMVRNTARDLLYYAVTQDAMLIFENLSRGFGRQGKRTFMAERQYTRMEDWLTAKLAYEGLPSKTYLSKTLAQYTSKTCSNCGFTITSADYDRVLEKLKKTATGWMTTINGKELKVEGQITYYNRYKRQNVVKDLSVELDRLSEESVNNDISSWTKGRSGEALSLLKKRFSHRPVQEKFVCLNCGFETHADEQAALNIARSWLFLRSQEYKKYQTNKTTGNTDKRAFVETWQSFYRKKLKEVWKPAV

SEQ ID NO: 41173 - protein, 980 aa, synthetic construct
  REGION 1..980: note = engineered CasX variant
QEIGKRINKIRRRLVKDSNTKKAGKTGPMKTLLVRVMTPDLRERLENLRKKPENIPQPISNTSRANLNKLLTDYTEMKKAILHVYWEEFQKDPVGLMSRVAQPASKKIDQNKLKPEMDEKGNLTTAGFACSQCGQPLFVYKLEQVSEKGKAYTNYFGRCNVAEHEKLILLAQLKPEKDSDEAVTYSLGKFGQRALDFYSIHVTKESTHPVKPLAQIAGNRYASTPVGKALSDACMGTIASFLSKYQDIIIEHQKVVKGNQKRLESLRELAGKENLEYPSVTLPPQPHTKEGVDAYNEVIARVRMWVNLNLWQKLKLSRDDAKPLLRLKGFPSFPLVERQANEVDWWDMVCNVKKLINEKKEDGKVFWQNLAGYKRQEALRPYLSSEEDRKKGKKFARYQLGDLLLHLEKKHGERDWGKVYDEAWERIDKKVEGLSKHIKLEEERRSEDAQSKAALTDWLRAKASFVIEGLKEADKDEFCRCELKLQKWYGDLRGKPFAIEAENSILDISGFSKQYNCAFIWQKDGVKKLNLYLIINYFKGGKLRFKKIKPEAFEANRFYTVINKKSGEIVPMEVNFNFDDPNLIILPLAFGKRQGREFIWNDLLSLETGSLKLANGRVIEKTLYNRRTRQDEPALFVALTFERREVLDSSNIKPMNLIGVDRGENIPAVIALTDPEGCPLSRFKDSLGNPTHILRIGESYKEKQRTIQAKKEVEQRRAGGYSRKYASKAKNLADDMVRNTARDLLYYAVTQDAMLIFENLSRGFGRQGKRTFMAERQYTRMEDWLTAKLAYEGLPSKTYLSKTLAQYTSKTCSNCGFTITSADYDRVLEKLKKTATGWMTTINGKELKVEGQITYYNRYKRQNVVKDLSVELDRLSEESVNNDISSWTKGRSGEALSLLKKRFSHRPVQEKFVCLNCGFETHADEQAALNIARSWLFLRSQEYKKYQTNKTTGNTDKRAFVETWQSFYRKKLKEVWKPAV

SEQ ID NO: 41174 - protein, 980 aa, synthetic construct
  REGION 1..980: note = engineered CasX variant
QEIGKRINKIRRRLVKDSNTKKAGKTGPMKTLLVRVMTPDLRERLENLRKKPENIPQPISNTSRANLNKLLTDYTEMKKAILHVYWEEFQKDPVGLMSRVAQPASKKIDQNKLKPEMDEKGNLTTAGFACSQCGQPLFVYKLEQVSEKGKAYTNYFGRCNVAEHEKLILLAQLKPEKDSDEAVTYSLGKFGQRALDFYSIHVTKESTHPVKPLAQIAGNRYASAPVGKALSDACMGTIASFLSKYQDIIIEHQKVVKGNQKRLESLRELAGKENLEYPSVTLPPQPHTKEGVDAYNEVIARVRMWVNLNLWQKLKLSRDDAKPLLRLKGFPSFPLVERQANEVDWWDMVCNVKKLINEKKEDGKVFWQNLAGYKRQEALRPYLSSEEDRKKGKKFARYQLGDLLLHLEKKHGERDWGKVYDEAWERIDKKVEGLSKHIKLEEERRSEDAQSKAALTDWLRAKASFVIEGLKEADKDEFCRCELKLQKWYGDLRGKPFAIEAENSILDISGFSKQYNCAFIWQKDGVKKLNLYLIINYFKGGKLRFKKIKPEAFEANRFYTVINKKSGEIVPMEVNFNFDDPNLIILPLAFGKRQGREFIWNDLLSLETGSLKLANGRVIEKTLYNRRTRQDEPALFVALTFERREVLDSSNIKPMNLIGVDRGENIPAVIALTDPEGCPLSRFKDSLGNPTHILRIGESYKEKQRTIQAKKEVEQRRAGGYSRKYASKAKNLADDMVRNTARDLLYYAVTQDAMLIFENLSRGFGRQGKRTFMAERQYTRMEDWLTAKLAYEGLPSKTYLSKTLAQYTSKTCSNCGFTITSADYDRVLEKLKKTATGWMTTINGKELKVEGQITYYNRYKRQNVVKDLSVELDRLSEESVNNDISSWTKGRSGEALSLLKKRFSHRPVQEKFVCLNCGFETHADEQAALNIARSWLFLRSQEYKKYQTNKTTGNTDKRAFVETWQSFYRKKLKEVWKPAV

SEQ ID NO: 41175 - protein, 980 aa, synthetic construct
  REGION 1..980: note = engineered CasX variant
QEIGKRINKIRRRLVKDSNTKKAGKTGPMKTLLVRVMTPDLRERLENLRKKPENIPQPISNTSRANLNKLLTDYTEMKKAILHVYWEEFQKDPVGLMSRVAQPASKKIDQNKLKPEMDEKGNLTTAGFACSQCGQPLFVYKLEQVSEKGKAYTNYFGRCNVAEHEKLILLAQLKPEKDSDEAVTYSLGKFGQRALDFYSIHVTKESTHPVKPLAQIAGNRYASVPVGKALSDACMGTIASFLSKYQDIIIEHQKVVKGNQKRLESLRELAGKENLEYPSVTLPPQPHTKEGVDAYNEVIARVRMWVNLNLWQKLKLSRDDAKPLLRLKGFPSFPLVERQANEVDWWDMVCNVKKLINEKKEDGKVFWQNLAGYKRQEALRPYLSSEEDRKKGKKFARYQLGDLLLHLEKKHGERDWGKVYDEAWERIDKKVEGLSKHIKLEEERRSEDAQSKAALTDWLRAKASFVIEGLKEADKDEFCRCELKLQKWYGDLRGKPFAIEAENSILDISGFSKQYNCAFIWQKDGVKKLNLYLIINYFKGGKLRFKKIKPEAFEANRFYTVINKKSGEIVPMEVNFNFDDPNLIILPLAFGKRQGREFIWNDLLSLETGSLKLANGRVIEKTLYNRRTRQDEPALFVALTFERREVLDSSNIKPMNLIGVDRGENIPAVIALTDPEGCPLSRFKDSLGNPTHILRIGESYKEKQRTIQAKKEVEQRRAGGYSRKYASKAKNLADDMVRNTARDLLYYAVTQDAMLIFENLSRGFGRQGKRTFMAERQYTRMEDWLTAKLAYEGLPSKTYLSKTLAQYTSKTCSNCGFTITSADYDRVLEKLKKTATGWMTTINGKELKVEGQITYYNRYKRQNVVKDLSVELDRLSEESVNNDISSWTKGRSGEALSLLKKRFSHRPVQEKFVCLNCGFETHADEQAALNIARSWLFLRSQEYKKYQTNKTTGNTDKRAFVETWQSFYRKKLKEVWKPAV

SEQ ID NO: 41176 - protein, 980 aa, synthetic construct
  REGION 1..980: note = engineered CasX variant
QEIGKRINKIRRRLVKDSNTKKAGKTGPMKTLLVRVMTPDLRERLENLRKKPENIPQPISNTSRANLNKLLTDYTEMKKAILHVYWEEFQKDPVGLMSRVAQPASKKIDQNKLKPEMDEKGNLTTAGFACSQCGQPLFVYKLEQVSEKGKAYTNYFGRCNVAEHEKLIKLAQLKPEKDSDEAVTYSLGKFGQRALDFYSIHVTKESTHPVKPLAQIAGNRYASGPVGKALSDACMGTIASFLSKYQDIIIEHQKVVKGNQKRLESLRELAGKENLEYPSVTLPPQPHTKEGVDAYNEVIARVRMWVNLNLWQKLKLSRDDAKPLLRLKGFPSFPLVERQANEVDWWDMVCNVKKLINEKKEDGKVFWQNLAGYKRQEALRPYLSSEEDRKKGKKFARYQLGDLLLHLEKKHGERDWGKVYDEAWERIDKKVEGLSKHIKLEEERRSEDAQSKAALTDWLRAKASFVIEGLKEADKDEFCRCELKLQKWYGDLRGKPFAIEAENSILDISGFSKQYNCAFIWQKDGVKKLNLYLIINYFKGGKLRFKKIKPEAFEANRFYTVINKKSGEIVPMEVNFNFDDPNLIILPLAFGKRQGREFIWNDLLSLETGSLKLANGRVIEKTLYNRRTRQDEPALFVALTFERREVLDSSNIKPMNLIGVDRGENIPAVIALTDPEGCPLSRFKDSLGNPTHILRIGESYKEKQRTIQAKKEVEQRRAGGYSRKYASKAKNLADDMVRNTARDLLYYAVTQDAMLIFENLSRGFGRQGKRTFMAERQYTRMEDWLTAKLAYEGLPSKTYLSKTLAQYTSKTCSNCGFTITSADYDRVLEKLKKTATGWMTTINGKELKVEGQITYYNRYKRQNVVKDLSVELDRLSEESVNNDISSWTKGRSGEALSLLKKRFSHRPVQEKFVCLNCGFETHADEQAALNIARSWLFLRSQEYKKYQTNKTTGNTDKRAFVETWQSFYRKKLKEVWKPAV

SEQ ID NO: 41177 - protein, 979 aa, synthetic construct
  REGION 1..979: note = engineered CasX variant
QEIGKRINKIRRRLVKDSNTKKAGKTGPMKTLLVRVMTPDLRERLENLRKKPENIPQPISNTSRANLNKLLTDYTEMKKAILHVYWEEFQKDPVGLMSRVAQPASKKIDQNKLKPEMDEKGNLTTAGFACSQCGQPLFVYKLEQVSEKGKAYTNYFGRCNVAEHEKLILLAQLKPEKDSDEAVTYSLGKFGQRALDFYSIHVTKESTHPVKPLAQIAGNRYASPVGKALSDACMGTIASFLSKYQDIIIEHQKVVKGNQKRLESLRELAGKENLEYPSVTLPPQPHTKEGVDAYNEVIARVRMWVNLNLWQKLKLSRDDAKPLLRLKGFPSFPLVERQANEVDWWDMVCNVKKLINEKKEDGKVFWQNLAGYKRQEALRPYLSSEEDRKKGKKFARYQLGDLLLHLEKKHGERDWGKVYDEAWERIDKKVEGLSKHIKLEEERRSEDAQSKAALTDWLRAKASFVIEGLKEADKDEFCRCELKLQKWYGDLRGKPFAIEAENSILDISGFSKQYNCAFIWQKDGVKKLNLYLIINYFKGGKLRFKKIKPEAFEANRFYTVINKKSGEIVPMEVNFNFDDPNLIILPLAFGKRQGREFIWNDLLSLETGSLKLANGRVIEKTLYNRRTRQDEPALFVALTFERREVLDSSNIKPMNLIGVDRGENIPAVIALTDPEGCPLSRFKDSLGNPTHILRIGESYKEKQRTIQAKKEVEQRRAGGYSRKYASKAKNLADDMVRNTARDLLYYAVTQDAMLIFENLSRGFGRQGKRTFMAERQYTRMEDWLTAKLAYEGLPSKTYLSKTLAQYTSKTCSNCGFTITSADYDRVLEKLKKTATGWMTTINGKELKVEGQITYYNRYKRQNVVKDLSVELDRLSEESVNNDISSWTKGRSGEALSLLKKRFSHRPVQEKFVCLNCGFETHADEQAALNIARSWLFLRSQEYKKYQTNKTTGNTDKRAFVETWQSFYRKKLKEVWKPAV

SEQ ID NO: 41178 - protein, 980 aa, synthetic construct
  REGION 1..980: note = engineered CasX variant
QEIGKRINKIRRRLVKDSNTKKAGKTGPMKTLLVRVMTPDLRERLENLRKKPENIPQPISNTSRANLNKLLTDYTEMKKAILHVYWEEFQKDPVGLMSRVAQPASKKIDQNKLKPEMDEKGNLTTAGFACSQCGQPLFVYKLEQVSEKGKAYTNYFGRCNVAEHEKLILLAQLKPEKDSDEAVTYSLGKFGQRALDFYSIHVTKESTHPVKPLAQIAGNRYASYPVGKALSDACMGTIASFLSKYQDIIIEHQKVVKGNQKRLESLRELAGKENLEYPSVTLPPQPHTKEGVDAYNEVIARVRMWVNLNLWQKLKLSRDDAKPLLRLKGFPSFPLVERQANEVDWWDMVCNVKKLINEKKEDGKVFWQNLAGYKRQEALRPYLSSEEDRKKGKKFARYQLGDLLLHLEKKHGEYDWGKVYDEAWERIDKKVEGLSKHIKLEEERRSEDAQSKAALTDWLRAKASFVIEGLKEADKDEFCRCELKLQKWYGDLRGKPFAIEAENSILDISGFSKQYNCAFIWQKDGVKKLNLYLIINYFKGGKLRFKKIKPEAFEANRFYTVINKKSGEIVPMEVNFNFDDPNLIILPLAFGKRQGREFIWNDLLSLETGSLKLANGRVIEKTLYNRRTRQDEPALFVALTFERREVLDSSNIKPMNLIGVDRGENIPAVIALTDPEGCPLSRFKDSLGNPTHILRIGESYKEKQRTIQAKKEVEQRRAGGYSRKYASKAKNLADDMVRNTARDLLYYAVTQDAMLIFENLSRGFGRQGKRTFMAERQYTRMEDWLTAKLAYEGLPSKTYLSKTLAQYTSKTCSNCGFTITSADYDRVLEKLKKTATGWMTTINGKELKVEGQITYYNRYKRQNVVKDLSVELDRLSEESVNNDISSWTKGRSGEALSLLKKRFSHRPVQEKFVCLNCGFETHADEQAALNIARSWLFLRSQEYKKYQTNKTTGNTDKRAFVETWQSFYRKKLKEVWKPAV

SEQ ID NO: 41179 - protein, 980 aa, synthetic construct
  REGION 1..980: note = engineered CasX variant
QEIGKRINKIRRRLVKDSNTKKAGKTGPMKTLLVRVMTPDLRERLENLRKKPENIPQPISNTSRANLNKLLTDYTEMKKAILHVYWEEFQKDPVGLMSRVAQPASKKIDQNKLKPEMDEKGNLTTAGFACSQCGQPLFVYKLEQVSEKGKAYTNYFGRCNVAEHEKLILLAQLKPEKDSDEAVTYSLGKFGQRALDFYSIHVTKESTHPVKPLAQIAGNRYASHPVGKALSDACMGTIASFLSKYQDIIIEHQKVVKGNQKRLESLRELAGKENLEYPSVTLPPQPHTKEGVDAYNEVIARVRMWVNLNLWQKLKLSRDDAKPLLRLKGFPSFPLVERQANEVDWWDMVCNVKKLINEKKEDGKVFWQNLAGYKRQEALRPYLSSEEDRKKGKKFARYQLGDLLLHLEKKHGEYDWGKVYDEAWERIDKKVEGLSKHIKLEEERRSEDAQSKAALTDWLRAKASFVIEGLKEADKDEFCRCELKLQKWYGDLRGKPFAIEAENSILDISGFSKQYNCAFIWQKDGVKKLNLYLIINYFKGGKLRFKKIKPEAFEANRFYTVINKKSGEIVPMEVNFNFDDPNLIILPLAFGKRQGREFIWNDLLSLETGSLKLANGRVIEKTLYNRRTRQDEPALFVALTFERREVLDSSNIKPMNLIGVDRGENIPAVIALTDPEGCPLSRFKDSLGNPTHILRIGESYKEKQRTIQAKKEVEQRRAGGYSRKYASKAKNLADDMVRNTARDLLYYAVTQDAMLIFENLSRGFGRQGKRTFMAERQYTRMEDWLTAKLAYEGLPSKTYLSKTLAQYTSKTCSNCGFTITSADYDRVLEKLKKTATGWMTTINGKELKVEGQITYYNRYKRQNVVKDLSVELDRLSEESVNNDISSWTKGRSGEALSLLKKRFSHRPVQEKFVCLNCGFETHADEQAALNIARSWLFLRSQEYKKYQTNKTTGNTDKRAFVETWQSFYRKKLKEVWKPAV

SEQ ID NO: 41180 - protein, 980 aa, synthetic construct
  REGION 1..980: note = engineered CasX variant
QEIGKRINKIRRRLVKDSNTKKAGKTGPMKTLLVRVMTPDLRERLENLRKKPENIPQPISNTSRANLNKLLTDYTEMKKAILHVYWEEFQKDPVGLMSRVAQPASKKIDQNKLKPEMDEKGNLTTAGFACSQCGQPLFVYKLEQVSEKGKAYTNYFGRCNVAEHEKLILLAQLKPEKDSDEAVTYSLGKFGQRALDFYSIHVTKESTHPVKPLAQIAGNRYASSPVGKALSDACMGTIASFLSKYQDIIIEHQKVVKGNQKRLESLRELAGKENLEYPSVTLPPQPHTKEGVDAYNEVIARVRMWVNLNLWQKLKLSRDDAKPLLRLKGFPSFPLVERQANEVDWWDMVCNVKKLINEKKEDGKVFWQNLAGYKRQEALRPYLSSEEDRKKGKKFARYQLGDLLLHLEKKHGEYDWGKVYDEAWERIDKKVEGLSKHIKLEEERRSEDAQSKAALTDWLRAKASFVIEGLKEADKDEFCRCELKLQKWYGDLRGKPFAIEAENSILDISGFSKQYNCAFIWQKDGVKKLNLYLIINYFKGGKLRFKKIKPEAFEANRFYTVINKKSGEIVPMEVNFNFDDPNLIILPLAFGKRQGREFIWNDLLSLETGSLKLANGRVIEKTLYNRRTRQDEPALFVALTFERREVLDSSNIKPMNLIGVDRGENIPAVIALTDPEGCPLSRFKDSLGNPTHILRIGESYKEKQRTIQAKKEVEQRRAGGYSRKYASKAKNLADDMVRNTARDLLYYAVTQDAMLIFENLSRGFGRQGKRTFMAERQYTRMEDWLTAKLAYEGLPSKTYLSKTLAQYTSKTCSNCGFTITSADYDRVLEKLKKTATGWMTTINGKELKVEGQITYYNRYKRQNVVKDLSVELDRLSEESVNNDISSWTKGRSGEALSLLKKRFSHRPVQEKFVCLNCGFETHADEQAALNIARSWLFLRSQEYKKYQTNKTTGNTDKRAFVETWQSFYRKKLKEVWKPAV

SEQ ID NO: 41181 - protein, 980 aa, synthetic construct
  REGION 1..980: note = engineered CasX variant
QEIGKRINKIRRRLVKDSNTKKAGKTGPMKTLLVRVMTPDLRERLENLRKKPENIPQPISNTSRANLNKLLTDYTEMKKAILHVYWEEFQKDPVGLMSRVAQPASKKIDQNKLKPEMDEKGNLTTAGFACSQCGQPLFVYKLEQVSEKGKAYTNYFGRCNVAEHEKLILLAQLKPEKDSDEAVTYSLGKFGQRALDFYSIHVTKESTHPVKPLAQIAGNRYASTPVGKALSDACMGTIASFLSKYQDIIIEHQKVVKGNQKRLESLRELAGKENLEYPSVTLPPQPHTKEGVDAYNEVIARVRMWVNLNLWQKLKLSRDDAKPLLRLKGFPSFPLVERQANEVDWWDMVCNVKKLINEKKEDGKVFWQNLAGYKRQEALRPYLSSEEDRKKGKKFARYQLGDLLLHLEKKHGEYDWGKVYDEAWERIDKKVEGLSKHIKLEEERRSEDAQSKAALTDWLRAKASFVIEGLKEADKDEFCRCELKLQKWYGDLRGKPFAIEAENSILDISGFSKQYNCAFIWQKDGVKKLNLYLIINYFKGGKLRFKKIKPEAFEANRFYTVINKKSGEIVPMEVNFNFDDPNLIILPLAFGKRQGREFIWNDLLSLETGSLKLANGRVIEKTLYNRRTRQDEPALFVALTFERREVLDSSNIKPMNLIGVDRGENIPAVIALTDPEGCPLSRFKDSLGNPTHILRIGESYKEKQRTIQAKKEVEQRRAGGYSRKYASKAKNLADDMVRNTARDLLYYAVTQDAMLIFENLSRGFGRQGKRTFMAERQYTRMEDWLTAKLAYEGLPSKTYLSKTLAQYTSKTCSNCGFTITSADYDRVLEKLKKTATGWMTTINGKELKVEGQITYYNRYKRQNVVKDLSVELDRLSEESVNNDISSWTKGRSGEALSLLKKRFSHRPVQEKFVCLNCGFETHADEQAALNIARSWLFLRSQEYKKYQTNKTTGNTDKRAFVETWQSFYRKKLKEVWKPAV

SEQ ID NO: 41182 - protein, 980 aa, synthetic construct
  REGION 1..980: note = engineered CasX variant
QEIGKRINKIRRRLVKDSNTKKAGKTGPMKTLLVRVMTPDLRERLENLRKKPENIPQPISNTSRANLNKLLTDYTEMKKAILHVYWEEFQKDPVGLMSRVAQPASKKIDQNKLKPEMDEKGNLTTAGFACSQCGQPLFVYKLEQVSEKGKAYTNYFGRCNVAEHEKLILLAQLKPEKDSDEAVTYSLGKFGQRALDFYSIHVTKESTHPVKPLAQIAGNRYASAPVGKALSDACMGTIASFLSKYQDIIIEHQKVVKGNQKRLESLRELAGKENLEYPSVTLPPQPHTKEGVDAYNEVIARVRMWVNLNLWQKLKLSRDDAKPLLRLKGFPSFPLVERQANEVDWWDMVCNVKKLINEKKEDGKVFWQNLAGYKRQEALRPYLSSEEDRKKGKKFARYQLGDLLLHLEKKHGEYDWGKVYDEAWERIDKKVEGLSKHIKLEEERRSEDAQSKAALTDWLRAKASFVIEGLKEADKDEFCRCELKLQKWYGDLRGKPFAIEAENSILDISGFSKQYNCAFIWQKDGVKKLNLYLIINYFKGGKLRFKKIKPEAFEANRFYTVINKKSGEIVPMEVNFNFDDPNLIILPLAFGKRQGREFIWNDLLSLETGSLKLANGRVIEKTLYNRRTRQDEPALFVALTFERREVLDSSNIKPMNLIGVDRGENIPAVIALTDPEGCPLSRFKDSLGNPTHILRIGESYKEKQRTIQAKKEVEQRRAGGYSRKYASKAKNLADDMVRNTARDLLYYAVTQDAMLIFENLSRGFGRQGKRTFMAERQYTRMEDWLTAKLAYEGLPSKTYLSKTLAQYTSKTCSNCGFTITSADYDRVLEKLKKTATGWMTTINGKELKVEGQITYYNRYKRQNVVKDLSVELDRLSEESVNNDISSWTKGRSGEALSLLKKRFSHRPVQEKFVCLNCGFETHADEQAALNIARSWLFLRSQEYKKYQTNKTTGNTDKRAFVETWQSFYRKKLKEVWKPAV

SEQ ID NO: 41183 - protein, 980 aa, synthetic construct
  REGION 1..980: note = engineered CasX variant
QEIGKRINKIRRRLVKDSNTKKAGKTGPMKTLLVRVMTPDLRERLENLRKKPENIPQPISNTSRANLNKLLTDYTEMKKAILHVYWEEFQKDPVGLMSRVAQPASKKIDQNKLKPEMDEKGNLTTAGFACSQCGQPLFVYKLEQVSEKGKAYTNYFGRCNVAEHEKLILLAQLKPEKDSDEAVTYSLGKFGQRALDFYSIHVTKESTHPVKPLAQIAGNRYASVPVGKALSDACMGTIASFLSKYQDIIIEHQKVVKGNQKRLESLRELAGKENLEYPSVTLPPQPHTKEGVDAYNEVIARVRMWVNLNLWQKLKLSRDDAKPLLRLKGFPSFPLVERQANEVDWWDMVCNVKKLINEKKEDGKVFWQNLAGYKRQEALRPYLSSEEDRKKGKKFARYQLGDLLLHLEKKHGEYDWGKVYDEAWERIDKKVEGLSKHIKLEEERRSEDAQSKAALTDWLRAKASFVIEGLKEADKDEFCRCELKLQKWYGDLRGKPFAIEAENSILDISGFSKQYNCAFIWQKDGVKKLNLYLIINYFKGGKLRFKKIKPEAFEANRFYTVINKKSGEIVPMEVNFNFDDPNLIILPLAFGKRQGREFIWNDLLSLETGSLKLANGRVIEKTLYNRRTRQDEPALFVALTFERREVLDSSNIKPMNLIGVDRGENIPAVIALTDPEGCPLSRFKDSLGNPTHILRIGESYKEKQRTIQAKKEVEQRRAGGYSRKYASKAKNLADDMVRNTARDLLYYAVTQDAMLIFENLSRGFGRQGKRTFMAERQYTRMEDWLTAKLAYEGLPSKTYLSKTLAQYTSKTCSNCGFTITSADYDRVLEKLKKTATGWMTTINGKELKVEGQITYYNRYKRQNVVKDLSVELDRLSEESVNNDISSWTKGRSGEALSLLKKRFSHRPVQEKFVCLNCGFETHADEQAALNIARSWLFLRSQEYKKYQTNKTTGNTDKRAFVETWQSFYRKKLKEVWKPAV

SEQ ID NO: 41184 - protein, 980 aa, synthetic construct
  REGION 1..980: note = engineered CasX variant
QEIGKRINKIRRRLVKDSNTKKAGKTGPMKTLLVRVMTPDLRERLENLRKKPENIPQPISNTSRANLNKLLTDYTEMKKAILHVYWEEFQKDPVGLMSRVAQPASKKIDQNKLKPEMDEKGNLTTAGFACSQCGQPLFVYKLEQVSEKGKAYTNYFGRCNVAEHEKLIKLAQLKPEKDSDEAVTYSLGKFGQRALDFYSIHVTKESTHPVKPLAQIAGNRYASGPVGKALSDACMGTIASFLSKYQDIIIEHQKVVKGNQKRLESLRELAGKENLEYPSVTLPPQPHTKEGVDAYNEVIARVRMWVNLNLWQKLKLSRDDAKPLLRLKGFPSFPLVERQANEVDWWDMVCNVKKLINEKKEDGKVFWQNLAGYKRQEALRPYLSSEEDRKKGKKFARYQLGDLLLHLEKKHGEYDWGKVYDEAWERIDKKVEGLSKHIKLEEERRSEDAQSKAALTDWLRAKASFVIEGLKEADKDEFCRCELKLQKWYGDLRGKPFAIEAENSILDISGFSKQYNCAFIWQKDGVKKLNLYLIINYFKGGKLRFKKIKPEAFEANRFYTVINKKSGEIVPMEVNFNFDDPNLIILPLAFGKRQGREFIWNDLLSLETGSLKLANGRVIEKTLYNRRTRQDEPALFVALTFERREVLDSSNIKPMNLIGVDRGENIPAVIALTDPEGCPLSRFKDSLGNPTHILRIGESYKEKQRTIQAKKEVEQRRAGGYSRKYASKAKNLADDMVRNTARDLLYYAVTQDAMLIFENLSRGFGRQGKRTFMAERQYTRMEDWLTAKLAYEGLPSKTYLSKTLAQYTSKTCSNCGFTITSADYDRVLEKLKKTATGWMTTINGKELKVEGQITYYNRYKRQNVVKDLSVELDRLSEESVNNDISSWTKGRSGEALSLLKKRFSHRPVQEKFVCLNCGFETHADEQAALNIARSWLFLRSQEYKKYQTNKTTGNTDKRAFVETWQSFYRKKLKEVWKPAV

SEQ ID NO: 41185 - protein, 979 aa, synthetic construct
  REGION 1..979: note = engineered CasX variant
QEIGKRINKIRRRLVKDSNTKKAGKTGPMKTLLVRVMTPDLRERLENLRKKPENIPQPISNTSRANLNKLLTDYTEMKKAILHVYWEEFQKDPVGLMSRVAQPASKKIDQNKLKPEMDEKGNLTTAGFACSQCGQPLFVYKLEQVSEKGKAYTNYFGRCNVAEHEKLILLAQLKPEKDSDEAVTYSLGKFGQRALDFYSIHVTKESTHPVKPLAQIAGNRYASPVGKALSDACMGTIASFLSKYQDIIIEHQKVVKGNQKRLESLRELAGKENLEYPSVTLPPQPHTKEGVDAYNEVIARVRMWVNLNLWQKLKLSRDDAKPLLRLKGFPSFPLVERQANEVDWWDMVCNVKKLINEKKEDGKVFWQNLAGYKRQEALRPYLSSEEDRKKGKKFARYQLGDLLLHLEKKHGEYDWGKVYDEAWERIDKKVEGLSKHIKLEEERRSEDAQSKAALTDWLRAKASFVIEGLKEADKDEFCRCELKLQKWYGDLRGKPFAIEAENSILDISGFSKQYNCAFIWQKDGVKKLNLYLIINYFKGGKLRFKKIKPEAFEANRFYTVINKKSGEIVPMEVNFNFDDPNLIILPLAFGKRQGREFIWNDLLSLETGSLKLANGRVIEKTLYNRRTRQDEPALFVALTFERREVLDSSNIKPMNLIGVDRGENIPAVIALTDPEGCPLSRFKDSLGNPTHILRIGESYKEKQRTIQAKKEVEQRRAGGYSRKYASKAKNLADDMVRNTARDLLYYAVTQDAMLIFENLSRGFGRQGKRTFMAERQYTRMEDWLTAKLAYEGLPSKTYLSKTLAQYTSKTCSNCGFTITSADYDRVLEKLKKTATGWMTTINGKELKVEGQITYYNRYKRQNVVKDLSVELDRLSEESVNNDISSWTKGRSGEALSLLKKRFSHRPVQEKFVCLNCGFETHADEQAALNIARSWLFLRSQEYKKYQTNKTTGNTDKRAFVETWQSFYRKKLKEVWKPAV

SEQ ID NO: 41186 - protein, 979 aa, synthetic construct
  REGION 1..979: note = engineered CasX variant
QEIGKRINKIRRRLVKDSNTKKAGKTGPMKTLLVRVMTPDLRERLENLRKKPENIPQPISNTSRANLNKLLTDYTEMKKAILHVYWEEFQKDPVGLMSRVAQPASKKIDQNKLKPEMDEKGNLTTAGFACSQCGQPLFVYKLEQVSEKGKAYTNYFGRCNVAEHEKLILLAQLKPEKDSDEAVTYSLGKFGQRALDFYSIHVTKESTHPVKPLAQIAGNRYASYPVGKALSDACMGTIASFLSKYQDIIIEHQKVVKGNQKRLESLRELAGKENLEYPSVTLPPQPHTKEGVDAYNEVIARVRMWVNLNLWQKLKLSRDDAKPLLRLKGFPSFPLVERQANEVDWWDMVCNVKKLINEKKEDGKVFWQNLAGYKRQEALRPYLSSEEDRKKGKKFARYQLGDLLLHLEKKHGEDWGDVYDEAWERIDKKVEGLSKHIKLEEERRSEDAQSKAALTDWLRAKASFVIEGLKEADKDEFCRCELKLQKWYGDLRGKPFAIEAENSILDISGFSKQYNCAFIWQKDGVKKLNLYLIINYFKGGKLRFKKIKPEAFEANRFYTVINKKSGEIVPMEVNFNFDDPNLIILPLAFGKRQGREFIWNDLLSLETGSLKLANGRVIEKTLYNRRTRQDEPALFVALTFERREVLDSSNIKPMNLIGVDRGENIPAVIALTDPEGCPLSRFKDSLGNPTHILRIGESYKEKQRTIQAKKEVEQRRAGGYSRKYASKAKNLADDMVRNTARDLLYYAVTQDAMLIFENLSRGFGRQGKRTFMAERQYTRMEDWLTAKLAYEGLPSKTYLSKTLAQYTSKTCSNCGFTITSADYDRVLEKLKKTATGWMTTINGKELKVEGQITYYNRYKRQNVVKDLSVELDRLSEESVNNDISSWTKGRSGEALSLLKKRFSHRPVQEKFVCLNCGFETHADEQAALNIARSWLFLRSQEYKKYQTNKTTGNTDKRAFVETWQSFYRKKLKEVWKPAV

SEQ ID NO: 41187 - protein, 979 aa, synthetic construct
  REGION 1..979: note = engineered CasX variant
QEIGKRINKIRRRLVKDSNTKKAGKTGPMKTLLVRVMTPDLRERLENLRKKPENIPQPISNTSRANLNKLLTDYTEMKKAILHVYWEEFQKDPVGLMSRVAQPASKKIDQNKLKPEMDEKGNLTTAGFACSQCGQPLFVYKLEQVSEKGKAYTNYFGRCNVAEHEKLILLAQLKPEKDSDEAVTYSLGKFGQRALDFYSIHVTKESTHPVKPLAQIAGNRYASHPVGKALSDACMGTIASFLSKYQDIIIEHQKVVKGNQKRLESLRELAGKENLEYPSVTLPPQPHTKEGVDAYNEVIARVRMWVNLNLWQKLKLSRDDAKPLLRLKGFPSFPLVERQANEVDWWDMVCNVKKLINEKKEDGKVFWQNLAGYKRQEALRPYLSSEEDRKKGKKFARYQLGDLLLHLEKKHGEDWGDVYDEAWERIDKKVEGLSKHIKLEEERRSEDAQSKAALTDWLRAKASFVIEGLKEADKDEFCRCELKLQKWYGDLRGKPFAIEAENSILDISGFSKQYNCAFIWQKDGVKKLNLYLIINYFKGGKLRFKKIKPEAFEANRFYTVINKKSGEIVPMEVNFNFDDPNLIILPLAFGKRQGREFIWNDLLSLETGSLKLANGRVIEKTLYNRRTRQDEPALFVALTFERREVLDSSNIKPMNLIGVDRGENIPAVIALTDPEGCPLSRFKDSLGNPTHILRIGESYKEKQRTIQAKKEVEQRRAGGYSRKYASKAKNLADDMVRNTARDLLYYAVTQDAMLIFENLSRGFGRQGKRTFMAERQYTRMEDWLTAKLAYEGLPSKTYLSKTLAQYTSKTCSNCGFTITSADYDRVLEKLKKTATGWMTTINGKELKVEGQITYYNRYKRQNVVKDLSVELDRLSEESVNNDISSWTKGRSGEALSLLKKRFSHRPVQEKFVCLNCGFETHADEQAALNIARSWLFLRSQEYKKYQTNKTTGNTDKRAFVETWQSFYRKKLKEVWKPAV

SEQ ID NO: 41188 - protein, 979 aa, synthetic construct
  REGION 1..979: note = engineered CasX variant
QEIGKRINKIRRRLVKDSNTKKAGKTGPMKTLLVRVMTPDLRERLENLRKKPENIPQPISNTSRANLNKLLTDYTEMKKAILHVYWEEFQKDPVGLMSRVAQPASKKIDQNKLKPEMDEKGNLTTAGFACSQCGQPLFVYKLEQVSEKGKAYTNYFGRCNVAEHEKLILLAQLKPEKDSDEAVTYSLGKFGQRALDFYSIHVTKESTHPVKPLAQIAGNRYASSPVGKALSDACMGTIASFLSKYQDIIIEHQKVVKGNQKRLESLRELAGKENLEYPSVTLPPQPHTKEGVDAYNEVIARVRMWVNLNLWQKLKLSRDDAKPLLRLKGFPSFPLVERQANEVDWWDMVCNVKKLINEKKEDGKVFWQNLAGYKRQEALRPYLSSEEDRKKGKKFARYQLGDLLLHLEKKHGEDWGDVYDEAWERIDKKVEGLSKHIKLEEERRSEDAQSKAALTDWLRAKASFVIEGLKEADKDEFCRCELKLQKWYGDLRGKPFAIEAENSILDISGFSKQYNCAFIWQKDGVKKLNLYLIINYFKGGKLRFKKIKPEAFEANRFYTVINKKSGEIVPMEVNFNFDDPNLIILPLAFGKRQGREFIWNDLLSLETGSLKLANGRVIEKTLYNRRTRQDEPALFVALTFERREVLDSSNIKPMNLIGVDRGENIPAVIALTDPEGCPLSRFKDSLGNPTHILRIGESYKEKQRTIQAKKEVEQRRAGGYSRKYASKAKNLADDMVRNTARDLLYYAVTQDAMLIFENLSRGFGRQGKRTFMAERQYTRMEDWLTAKLAYEGLPSKTYLSKTLAQYTSKTCSNCGFTITSADYDRVLEKLKKTATGWMTTINGKELKVEGQITYYNRYKRQNVVKDLSVELDRLSEESVNNDISSWTKGRSGEALSLLKKRFSHRPVQEKFVCLNCGFETHADEQAALNIARSWLFLRSQEYKKYQTNKTTGNTDKRAFVETWQSFYRKKLKEVWKPAV

SEQ ID NO: 41189 - protein, 979 aa, synthetic construct
  REGION 1..979: note = engineered CasX variant
QEIGKRINKIRRRLVKDSNTKKAGKTGPMKTLLVRVMTPDLRERLENLRKKPENIPQPISNTSRANLNKLLTDYTEMKKAILHVYWEEFQKDPVGLMSRVAQPASKKIDQNKLKPEMDEKGNLTTAGFACSQCGQPLFVYKLEQVSEKGKAYTNYFGRCNVAEHEKLILLAQLKPEKDSDEAVTYSLGKFGQRALDFYSIHVTKESTHPVKPLAQIAGNRYASTPVGKALSDACMGTIASFLSKYQDIIIEHQKVVKGNQKRLESLRELAGKENLEYPSVTLPPQPHTKEGVDAYNEVIARVRMWVNLNLWQKLKLSRDDAKPLLRLKGFPSFPLVERQANEVDWWDMVCNVKKLINEKKEDGKVFWQNLAGYKRQEALRPYLSSEEDRKKGKKFARYQLGDLLLHLEKKHGEDWGDVYDEAWERIDKKVEGLSKHIKLEEERRSEDAQSKAALTDWLRAKASFVIEGLKEADKDEFCRCELKLQKWYGDLRGKPFAIEAENSILDISGFSKQYNCAFIWQKDGVKKLNLYLIINYFKGGKLRFKKIKPEAFEANRFYTVINKKSGEIVPMEVNFNFDDPNLIILPLAFGKRQGREFIWNDLLSLETGSLKLANGRVIEKTLYNRRTRQDEPALFVALTFERREVLDSSNIKPMNLIGVDRGENIPAVIALTDPEGCPLSRFKDSLGNPTHILRIGESYKEKQRTIQAKKEVEQRRAGGYSRKYASKAKNLADDMVRNTARDLLYYAVTQDAMLIFENLSRGFGRQGKRTFMAERQYTRMEDWLTAKLAYEGLPSKTYLSKTLAQYTSKTCSNCGFTITSADYDRVLEKLKKTATGWMTTINGKELKVEGQITYYNRYKRQNVVKDLSVELDRLSEESVNNDISSWTKGRSGEALSLLKKRFSHRPVQEKFVCLNCGFETHADEQAALNIARSWLFLRSQEYKKYQTNKTTGNTDKRAFVETWQSFYRKKLKEVWKPAV

SEQ ID NO: 41190 - protein, 979 aa, synthetic construct
  REGION 1..979: note = engineered CasX variant
QEIGKRINKIRRRLVKDSNTKKAGKTGPMKTLLVRVMTPDLRERLENLRKKPENIPQPISNTSRANLNKLLTDYTEMKKAILHVYWEEFQKDPVGLMSRVAQPASKKIDQNKLKPEMDEKGNLTTAGFACSQCGQPLFVYKLEQVSEKGKAYTNYFGRCNVAEHEKLILLAQLKPEKDSDEAVTYSLGKFGQRALDFYSIHVTKESTHPVKPLAQIAGNRYASAPVGKALSDACMGTIASFLSKYQDIIIEHQKVVKGNQKRLESLRELAGKENLEYPSVTLPPQPHTKEGVDAYNEVIARVRMWVNLNLWQKLKLSRDDAKPLLRLKGFPSFPLVERQANEVDWWDMVCNVKKLINEKKEDGKVFWQNLAGYKRQEALRPYLSSEEDRKKGKKFARYQLGDLLLHLEKKHGEDWGDVYDEAWERIDKKVEGLSKHIKLEEERRSEDAQSKAALTDWLRAKASFVIEGLKEADKDEFCRCELKLQKWYGDLRGKPFAIEAENSILDISGFSKQYNCAFIWQKDGVKKLNLYLIINYFKGGKLRFKKIKPEAFEANRFYTVINKKSGEIVPMEVNFNFDDPNLIILPLAFGKRQGREFIWNDLLSLETGSLKLANGRVIEKTLYNRRTRQDEPALFVALTFERREVLDSSNIKPMNLIGVDRGENIPAVIALTDPEGCPLSRFKDSLGNPTHILRIGESYKEKQRTIQAKKEVEQRRAGGYSRKYASKAKNLADDMVRNTARDLLYYAVTQDAMLIFENLSRGFGRQGKRTFMAERQYTRMEDWLTAKLAYEGLPSKTYLSKTLAQYTSKTCSNCGFTITSADYDRVLEKLKKTATGWMTTINGKELKVEGQITYYNRYKRQNVVKDLSVELDRLSEESVNNDISSWTKGRSGEALSLLKKRFSHRPVQEKFVCLNCGFETHADEQAALNIARSWLFLRSQEYKKYQTNKTTGNTDKRAFVETWQSFYRKKLKEVWKPAV

SEQ ID NO: 41191 - protein, 979 aa, synthetic construct
  REGION 1..979: note = engineered CasX variant
QEIGKRINKIRRRLVKDSNTKKAGKTGPMKTLLVRVMTPDLRERLENLRKKPENIPQPISNTSRANLNKLLTDYTEMKKAILHVYWEEFQKDPVGLMSRVAQPASKKIDQNKLKPEMDEKGNLTTAGFACSQCGQPLFVYKLEQVSEKGKAYTNYFGRCNVAEHEKLILLAQLKPEKDSDEAVTYSLGKFGQRALDFYSIHVTKESTHPVKPLAQIAGNRYASVPVGKALSDACMGTIASFLSKYQDIIIEHQKVVKGNQKRLESLRELAGKENLEYPSVTLPPQPHTKEGVDAYNEVIARVRMWVNLNLWQKLKLSRDDAKPLLRLKGFPSFPLVERQANEVDWWDMVCNVKKLINEKKEDGKVFWQNLAGYKRQEALRPYLSSEEDRKKGKKFARYQLGDLLLHLEKKHGEDWGDVYDEAWERIDKKVEGLSKHIKLEEERRSEDAQSKAALTDWLRAKASFVIEGLKEADKDEFCRCELKLQKWYGDLRGKPFAIEAENSILDISGFSKQYNCAFIWQKDGVKKLNLYLIINYFKGGKLRFKKIKPEAFEANRFYTVINKKSGEIVPMEVNFNFDDPNLIILPLAFGKRQGREFIWNDLLSLETGSLKLANGRVIEKTLYNRRTRQDEPALFVALTFERREVLDSSNIKPMNLIGVDRGENIPAVIALTDPEGCPLSRFKDSLGNPTHILRIGESYKEKQRTIQAKKEVEQRRAGGYSRKYASKAKNLADDMVRNTARDLLYYAVTQDAMLIFENLSRGFGRQGKRTFMAERQYTRMEDWLTAKLAYEGLPSKTYLSKTLAQYTSKTCSNCGFTITSADYDRVLEKLKKTATGWMTTINGKELKVEGQITYYNRYKRQNVVKDLSVELDRLSEESVNNDISSWTKGRSGEALSLLKKRFSHRPVQEKFVCLNCGFETHADEQAALNIARSWLFLRSQEYKKYQTNKTTGNTDKRAFVETWQSFYRKKLKEVWKPAV

SEQ ID NO: 41192 - protein, 979 aa, synthetic construct
  REGION 1..979: note = engineered CasX variant
QEIGKRINKIRRRLVKDSNTKKAGKTGPMKTLLVRVMTPDLRERLENLRKKPENIPQPISNTSRANLNKLLTDYTEMKKAILHVYWEEFQKDPVGLMSRVAQPASKKIDQNKLKPEMDEKGNLTTAGFACSQCGQPLFVYKLEQVSEKGKAYTNYFGRCNVAEHEKLIKLAQLKPEKDSDEAVTYSLGKFGQRALDFYSIHVTKESTHPVKPLAQIAGNRYASGPVGKALSDACMGTIASFLSKYQDIIIEHQKVVKGNQKRLESLRELAGKENLEYPSVTLPPQPHTKEGVDAYNEVIARVRMWVNLNLWQKLKLSRDDAKPLLRLKGFPSFPLVERQANEVDWWDMVCNVKKLINEKKEDGKVFWQNLAGYKRQEALRPYLSSEEDRKKGKKFARYQLGDLLLHLEKKHGEDWGDVYDEAWERIDKKVEGLSKHIKLEEERRSEDAQSKAALTDWLRAKASFVIEGLKEADKDEFCRCELKLQKWYGDLRGKPFAIEAENSILDISGFSKQYNCAFIWQKDGVKKLNLYLIINYFKGGKLRFKKIKPEAFEANRFYTVINKKSGEIVPMEVNFNFDDPNLIILPLAFGKRQGREFIWNDLLSLETGSLKLANGRVIEKTLYNRRTRQDEPALFVALTFERREVLDSSNIKPMNLIGVDRGENIPAVIALTDPEGCPLSRFKDSLGNPTHILRIGESYKEKQRTIQAKKEVEQRRAGGYSRKYASKAKNLADDMVRNTARDLLYYAVTQDAMLIFENLSRGFGRQGKRTFMAERQYTRMEDWLTAKLAYEGLPSKTYLSKTLAQYTSKTCSNCGFTITSADYDRVLEKLKKTATGWMTTINGKELKVEGQITYYNRYKRQNVVKDLSVELDRLSEESVNNDISSWTKGRSGEALSLLKKRFSHRPVQEKFVCLNCGFETHADEQAALNIARSWLFLRSQEYKKYQTNKTTGNTDKRAFVETWQSFYRKKLKEVWKPAV

SEQ ID NO: 41193 - protein, 978 aa, synthetic construct
  REGION 1..978: note = engineered CasX variant
QEIGKRINKIRRRLVKDSNTKKAGKTGPMKTLLVRVMTPDLRERLENLRKKPENIPQPISNTSRANLNKLLTDYTEMKKAILHVYWEEFQKDPVGLMSRVAQPASKKIDQNKLKPEMDEKGNLTTAGFACSQCGQPLFVYKLEQVSEKGKAYTNYFGRCNVAEHEKLILLAQLKPEKDSDEAVTYSLGKFGQRALDFYSIHVTKESTHPVKPLAQIAGNRYASPVGKALSDACMGTIASFLSKYQDIIIEHQKVVKGNQKRLESLRELAGKENLEYPSVTLPPQPHTKEGVDAYNEVIARVRMWVNLNLWQKLKLSRDDAKPLLRLKGFPSFPLVERQANEVDWWDMVCNVKKLINEKKEDGKVFWQNLAGYKRQEALRPYLSSEEDRKKGKKFARYQLGDLLLHLEKKHGEDWGDVYDEAWERIDKKVEGLSKHIKLEEERRSEDAQSKAALTDWLRAKASFVIEGLKEADKDEFCRCELKLQKWYGDLRGKPFAIEAENSILDISGFSKQYNCAFIWQKDGVKKLNLYLIINYFKGGKLRFKKIKPEAFEANRFYTVINKKSGEIVPMEVNFNFDDPNLIILPLAFGKRQGREFIWNDLLSLETGSLKLANGRVIEKTLYNRRTRQDEPALFVALTFERREVLDSSNIKPMNLIGVDRGENIPAVIALTDPEGCPLSRFKDSLGNPTHILRIGESYKEKQRTIQAKKEVEQRRAGGYSRKYASKAKNLADDMVRNTARDLLYYAVTQDAMLIFENLSRGFGRQGKRTFMAERQYTRMEDWLTAKLAYEGLPSKTYLSKTLAQYTSKTCSNCGFTITSADYDRVLEKLKKTATGWMTTINGKELKVEGQITYYNRYKRQNVVKDLSVELDRLSEESVNNDISSWTKGRSGEALSLLKKRFSHRPVQEKFVCLNCGFETHADEQAALNIARSWLFLRSQEYKKYQTNKTTGNTDKRAFVETWQSFYRKKLKEVWKPAV

SEQ ID NO: 41194 - protein, 979 aa, synthetic construct
  REGION 1..979: note = engineered CasX variant
QEIGKRINKIRRRLVKDSNTKKAGKTGPMKTLLVRVMTPDLRERLENLRKKPENIPQPISNTSRANLNKLLTDYTEMKKAILHVYWEEFQKDPVGLMSRVAQPASKKIDQNKLKPEMDEKGNLTTAGFACSQCGQPLFVYKLEQVSEKGKAYTNYFGRCNVAEHEKLILLAQLKPEKDSDEAVTYSLGKFGQRALDFYSIHVTKESTHPVKPLAQIAGNRYASYPVGKALSDACMGTIASFLSKYQDIIIEHQKVVKGNQKRLESLRELAGKENLEYPSVTLPPQPHTKEGVDAYNEVIARVRMWVNLNLWQKLKLSRDDAKPLLRLKGFPSFPLVERQANEVDWWDMVCNVKKLINEKKEDGKVFWQNLAGYKRQEALRPYLSSEEDRKKGKKFARYQLGDLLLHLEKKHGEDWGKVYGEAWERIDKKVEGLSKHIKLEEERRSEDAQSKAALTDWLRAKASFVIEGLKEADKDEFCRCELKLQKWYGDLRGKPFAIEAENSILDISGFSKQYNCAFIWQKDGVKKLNLYLIINYFKGGKLRFKKIKPEAFEANRFYTVINKKSGEIVPMEVNFNFDDPNLIILPLAFGKRQGREFIWNDLLSLETGSLKLANGRVIEKTLYNRRTRQDEPALFVALTFERREVLDSSNIKPMNLIGVDRGENIPAVIALTDPEGCPLSRFKDSLGNPTHILRIGESYKEKQRTIQAKKEVEQRRAGGYSRKYASKAKNLADDMVRNTARDLLYYAVTQDAMLIFENLSRGFGRQGKRTFMAERQYTRMEDWLTAKLAYEGLPSKTYLSKTLAQYTSKTCSNCGFTITSADYDRVLEKLKKTATGWMTTINGKELKVEGQITYYNRYKRQNVVKDLSVELDRLSEESVNNDISSWTKGRSGEALSLLKKRFSHRPVQEKFVCLNCGFETHADEQAALNIARSWLFLRSQEYKKYQTNKTTGNTDKRAFVETWQSFYRKKLKEVWKPAV

SEQ ID NO: 41195 - protein, 979 aa, synthetic construct
  REGION 1..979: note = engineered CasX variant
QEIGKRINKIRRRLVKDSNTKKAGKTGPMKTLLVRVMTPDLRERLENLRKKPENIPQPISNTSRANLNKLLTDYTEMKKAILHVYWEEFQKDPVGLMSRVAQPASKKIDQNKLKPEMDEKGNLTTAGFACSQCGQPLFVYKLEQVSEKGKAYTNYFGRCNVAEHEKLILLAQLKPEKDSDEAVTYSLGKFGQRALDFYSIHVTKESTHPVKPLAQIAGNRYASHPVGKALSDACMGTIASFLSKYQDIIIEHQKVVKGNQKRLESLRELAGKENLEYPSVTLPPQPHTKEGVDAYNEVIARVRMWVNLNLWQKLKLSRDDAKPLLRLKGFPSFPLVERQANEVDWWDMVCNVKKLINEKKEDGKVFWQNLAGYKRQEALRPYLSSEEDRKKGKKFARYQLGDLLLHLEKKHGEDWGKVYGEAWERIDKKVEGLSKHIKLEEERRSEDAQSKAALTDWLRAKASFVIEGLKEADKDEFCRCELKLQKWYGDLRGKPFAIEAENSILDISGFSKQYNCAFIWQKDGVKKLNLYLIINYFKGGKLRFKKIKPEAFEANRFYTVINKKSGEIVPMEVNFNFDDPNLIILPLAFGKRQGREFIWNDLLSLETGSLKLANGRVIEKTLYNRRTRQDEPALFVALTFERREVLDSSNIKPMNLIGVDRGENIPAVIALTDPEGCPLSRFKDSLGNPTHILRIGESYKEKQRTIQAKKEVEQRRAGGYSRKYASKAKNLADDMVRNTARDLLYYAVTQDAMLIFENLSRGFGRQGKRTFMAERQYTRMEDWLTAKLAYEGLPSKTYLSKTLAQYTSKTCSNCGFTITSADYDRVLEKLKKTATGWMTTINGKELKVEGQITYYNRYKRQNVVKDLSVELDRLSEESVNNDISSWTKGRSGEALSLLKKRFSHRPVQEKFVCLNCGFETHADEQAALNIARSWLFLRSQEYKKYQTNKTTGNTDKRAFVETWQSFYRKKLKEVWKPAV

SEQ ID NO: 41196 - protein, 979 aa, synthetic construct
  REGION 1..979: note = engineered CasX variant
QEIGKRINKIRRRLVKDSNTKKAGKTGPMKTLLVRVMTPDLRERLENLRKKPENIPQPISNTSRANLNKLLTDYTEMKKAILHVYWEEFQKDPVGLMSRVAQPASKKIDQNKLKPEMDEKGNLTTAGFACSQCGQPLFVYKLEQVSEKGKAYTNYFGRCNVAEHEKLILLAQLKPEKDSDEAVTYSLGKFGQRALDFYSIHVTKESTHPVKPLAQIAGNRYASSPVGKALSDACMGTIASFLSKYQDIIIEHQKVVKGNQKRLESLRELAGKENLEYPSVTLPPQPHTKEGVDAYNEVIARVRMWVNLNLWQKLKLSRDDAKPLLRLKGFPSFPLVERQANEVDWWDMVCNVKKLINEKKEDGKVFWQNLAGYKRQEALRPYLSSEEDRKKGKKFARYQLGDLLLHLEKKHGEDWGKVYGEAWERIDKKVEGLSKHIKLEEERRSEDAQSKAALTDWLRAKASFVIEGLKEADKDEFCRCELKLQKWYGDLRGKPFAIEAENSILDISGFSKQYNCAFIWQKDGVKKLNLYLIINYFKGGKLRFKKIKPEAFEANRFYTVINKKSGEIVPMEVNFNFDDPNLIILPLAFGKRQGREFIWNDLLSLETGSLKLANGRVIEKTLYNRRTRQDEPALFVALTFERREVLDSSNIKPMNLIGVDRGENIPAVIALTDPEGCPLSRFKDSLGNPTHILRIGESYKEKQRTIQAKKEVEQRRAGGYSRKYASKAKNLADDMVRNTARDLLYYAVTQDAMLIFENLSRGFGRQGKRTFMAERQYTRMEDWLTAKLAYEGLPSKTYLSKTLAQYTSKTCSNCGFTITSADYDRVLEKLKKTATGWMTTINGKELKVEGQITYYNRYKRQNVVKDLSVELDRLSEESVNNDISSWTKGRSGEALSLLKKRFSHRPVQEKFVCLNCGFETHADEQAALNIARSWLFLRSQEYKKYQTNKTTGNTDKRAFVETWQSFYRKKLKEVWKPAV

SEQ ID NO: 41197 - protein, 979 aa, synthetic construct
  REGION 1..979: note = engineered CasX variant
QEIGKRINKIRRRLVKDSNTKKAGKTGPMKTLLVRVMTPDLRERLENLRKKPENIPQPISNTSRANLNKLLTDYTEMKKAILHVYWEEFQKDPVGLMSRVAQPASKKIDQNKLKPEMDEKGNLTTAGFACSQCGQPLFVYKLEQVSEKGKAYTNYFGRCNVAEHEKLILLAQLKPEKDSDEAVTYSLGKFGQRALDFYSIHVTKESTHPVKPLAQIAGNRYASTPVGKALSDACMGTIASFLSKYQDIIIEHQKVVKGNQKRLESLRELAGKENLEYPSVTLPPQPHTKEGVDAYNEVIARVRMWVNLNLWQKLKLSRDDAKPLLRLKGFPSFPLVERQANEVDWWDMVCNVKKLINEKKEDGKVFWQNLAGYKRQEALRPYLSSEEDRKKGKKFARYQLGDLLLHLEKKHGEDWGKVYGEAWERIDKKVEGLSKHIKLEEERRSEDAQSKAALTDWLRAKASFVIEGLKEADKDEFCRCELKLQKWYGDLRGKPFAIEAENSILDISGFSKQYNCAFIWQKDGVKKLNLYLIINYFKGGKLRFKKIKPEAFEANRFYTVINKKSGEIVPMEVNFNFDDPNLIILPLAFGKRQGREFIWNDLLSLETGSLKLANGRVIEKTLYNRRTRQDEPALFVALTFERREVLDSSNIKPMNLIGVDRGENIPAVIALTDPEGCPLSRFKDSLGNPTHILRIGESYKEKQRTIQAKKEVEQRRAGGYSRKYASKAKNLADDMVRNTARDLLYYAVTQDAMLIFENLSRGFGRQGKRTFMAERQYTRMEDWLTAKLAYEGLPSKTYLSKTLAQYTSKTCSNCGFTITSADYDRVLEKLKKTATGWMTTINGKELKVEGQITYYNRYKRQNVVKDLSVELDRLSEESVNNDISSWTKGRSGEALSLLKKRFSHRPVQEKFVCLNCGFETHADEQAALNIARSWLFLRSQEYKKYQTNKTTGNTDKRAFVETWQSFYRKKLKEVWKPAV

SEQ ID NO: 41198 - protein, 979 aa, synthetic construct
  REGION 1..979: note = engineered CasX variant
QEIGKRINKIRRRLVKDSNTKKAGKTGPMKTLLVRVMTPDLRERLENLRKKPENIPQPISNTSRANLNKLLTDYTEMKKAILHVYWEEFQKDPVGLMSRVAQPASKKIDQNKLKPEMDEKGNLTTAGFACSQCGQPLFVYKLEQVSEKGKAYTNYFGRCNVAEHEKLILLAQLKPEKDSDEAVTYSLGKFGQRALDFYSIHVTKESTHPVKPLAQIAGNRYASAPVGKALSDACMGTIASFLSKYQDIIIEHQKVVKGNQKRLESLRELAGKENLEYPSVTLPPQPHTKEGVDAYNEVIARVRMWVNLNLWQKLKLSRDDAKPLLRLKGFPSFPLVERQANEVDWWDMVCNVKKLINEKKEDGKVFWQNLAGYKRQEALRPYLSSEEDRKKGKKFARYQLGDLLLHLEKKHGEDWGKVYGEAWERIDKKVEGLSKHIKLEEERRSEDAQSKAALTDWLRAKASFVIEGLKEADKDEFCRCELKLQKWYGDLRGKPFAIEAENSILDISGFSKQYNCAFIWQKDGVKKLNLYLIINYFKGGKLRFKKIKPEAFEANRFYTVINKKSGEIVPMEVNFNFDDPNLIILPLAFGKRQGREFIWNDLLSLETGSLKLANGRVIEKTLYNRRTRQDEPALFVALTFERREVLDSSNIKPMNLIGVDRGENIPAVIALTDPEGCPLSRFKDSLGNPTHILRIGESYKEKQRTIQAKKEVEQRRAGGYSRKYASKAKNLADDMVRNTARDLLYYAVTQDAMLIFENLSRGFGRQGKRTFMAERQYTRMEDWLTAKLAYEGLPSKTYLSKTLAQYTSKTCSNCGFTITSADYDRVLEKLKKTATGWMTTINGKELKVEGQITYYNRYKRQNVVKDLSVELDRLSEESVNNDISSWTKGRSGEALSLLKKRFSHRPVQEKFVCLNCGFETHADEQAALNIARSWLFLRSQEYKKYQTNKTTGNTDKRAFVETWQSFYRKKLKEVWKPAV

SEQ ID NO: 41199 - protein, 979 aa, synthetic construct
  REGION 1..979: note = engineered CasX variant
QEIGKRINKIRRRLVKDSNTKKAGKTGPMKTLLVRVMTPDLRERLENLRKKPENIPQPISNTSRANLNKLLTDYTEMKKAILHVYWEEFQKDPVGLMSRVAQPASKKIDQNKLKPEMDEKGNLTTAGFACSQCGQPLFVYKLEQVSEKGKAYTNYFGRCNVAEHEKLILLAQLKPEKDSDEAVTYSLGKFGQRALDFYSIHVTKESTHPVKPLAQIAGNRYASVPVGKALSDACMGTIASFLSKYQDIIIEHQKVVKGNQKRLESLRELAGKENLEYPSVTLPPQPHTKEGVDAYNEVIARVRMWVNLNLWQKLKLSRDDAKPLLRLKGFPSFPLVERQANEVDWWDMVCNVKKLINEKKEDGKVFWQNLAGYKRQEALRPYLSSEEDRKKGKKFARYQLGDLLLHLEKKHGEDWGKVYGEAWERIDKKVEGLSKHIKLEEERRSEDAQSKAALTDWLRAKASFVIEGLKEADKDEFCRCELKLQKWYGDLRGKPFAIEAENSILDISGFSKQYNCAFIWQKDGVKKLNLYLIINYFKGGKLRFKKIKPEAFEANRFYTVINKKSGEIVPMEVNFNFDDPNLIILPLAFGKRQGREFIWNDLLSLETGSLKLANGRVIEKTLYNRRTRQDEPALFVALTFERREVLDSSNIKPMNLIGVDRGENIPAVIALTDPEGCPLSRFKDSLGNPTHILRIGESYKEKQRTIQAKKEVEQRRAGGYSRKYASKAKNLADDMVRNTARDLLYYAVTQDAMLIFENLSRGFGRQGKRTFMAERQYTRMEDWLTAKLAYEGLPSKTYLSKTLAQYTSKTCSNCGFTITSADYDRVLEKLKKTATGWMTTINGKELKVEGQITYYNRYKRQNVVKDLSVELDRLSEESVNNDISSWTKGRSGEALSLLKKRFSHRPVQEKFVCLNCGFETHADEQAALNIARSWLFLRSQEYKKYQTNKTTGNTDKRAFVETWQSFYRKKLKEVWKPAV

SEQ ID NO: 41200 - protein, 979 aa, synthetic construct
  REGION 1..979: note = engineered CasX variant
QEIGKRINKIRRRLVKDSNTKKAGKTGPMKTLLVRVMTPDLRERLENLRKKPENIPQPISNTSRANLNKLLTDYTEMKKAILHVYWEEFQKDPVGLMSRVAQPASKKIDQNKLKPEMDEKGNLTTAGFACSQCGQPLFVYKLEQVSEKGKAYTNYFGRCNVAEHEKLIKLAQLKPEKDSDEAVTYSLGKFGQRALDFYSIHVTKESTHPVKPLAQIAGNRYASGPVGKALSDACMGTIASFLSKYQDIIIEHQKVVKGNQKRLESLRELAGKENLEYPSVTLPPQPHTKEGVDAYNEVIARVRMWVNLNLWQKLKLSRDDAKPLLRLKGFPSFPLVERQANEVDWWDMVCNVKKLINEKKEDGKVFWQNLAGYKRQEALRPYLSSEEDRKKGKKFARYQLGDLLLHLEKKHGEDWGKVYGEAWERIDKKVEGLSKHIKLEEERRSEDAQSKAALTDWLRAKASFVIEGLKEADKDEFCRCELKLQKWYGDLRGKPFAIEAENSILDISGFSKQYNCAFIWQKDGVKKLNLYLIINYFKGGKLRFKKIKPEAFEANRFYTVINKKSGEIVPMEVNFNFDDPNLIILPLAFGKRQGREFIWNDLLSLETGSLKLANGRVIEKTLYNRRTRQDEPALFVALTFERREVLDSSNIKPMNLIGVDRGENIPAVIALTDPEGCPLSRFKDSLGNPTHILRIGESYKEKQRTIQAKKEVEQRRAGGYSRKYASKAKNLADDMVRNTARDLLYYAVTQDAMLIFENLSRGFGRQGKRTFMAERQYTRMEDWLTAKLAYEGLPSKTYLSKTLAQYTSKTCSNCGFTITSADYDRVLEKLKKTATGWMTTINGKELKVEGQITYYNRYKRQNVVKDLSVELDRLSEESVNNDISSWTKGRSGEALSLLKKRFSHRPVQEKFVCLNCGFETHADEQAALNIARSWLFLRSQEYKKYQTNKTTGNTDKRAFVETWQSFYRKKLKEVWKPAV

SEQ ID NO: 41201 - protein, 978 aa, synthetic construct
  REGION 1..978: note = engineered CasX variant
QEIGKRINKIRRRLVKDSNTKKAGKTGPMKTLLVRVMTPDLRERLENLRKKPENIPQPISNTSRANLNKLLTDYTEMKKAILHVYWEEFQKDPVGLMSRVAQPASKKIDQNKLKPEMDEKGNLTTAGFACSQCGQPLFVYKLEQVSEKGKAYTNYFGRCNVAEHEKLILLAQLKPEKDSDEAVTYSLGKFGQRALDFYSIHVTKESTHPVKPLAQIAGNRYASPVGKALSDACMGTIASFLSKYQDIIIEHQKVVKGNQKRLESLRELAGKENLEYPSVTLPPQPHTKEGVDAYNEVIARVRMWVNLNLWQKLKLSRDDAKPLLRLKGFPSFPLVERQANEVDWWDMVCNVKKLINEKKEDGKVFWQNLAGYKRQEALRPYLSSEEDRKKGKKFARYQLGDLLLHLEKKHGEDWGKVYGEAWERIDKKVEGLSKHIKLEEERRSEDAQSKAALTDWLRAKASFVIEGLKEADKDEFCRCELKLQKWYGDLRGKPFAIEAENSILDISGFSKQYNCAFIWQKDGVKKLNLYLIINYFKGGKLRFKKIKPEAFEANRFYTVINKKSGEIVPMEVNFNFDDPNLIILPLAFGKRQGREFIWNDLLSLETGSLKLANGRVIEKTLYNRRTRQDEPALFVALTFERREVLDSSNIKPMNLIGVDRGENIPAVIALTDPEGCPLSRFKDSLGNPTHILRIGESYKEKQRTIQAKKEVEQRRAGGYSRKYASKAKNLADDMVRNTARDLLYYAVTQDAMLIFENLSRGFGRQGKRTFMAERQYTRMEDWLTAKLAYEGLPSKTYLSKTLAQYTSKTCSNCGFTITSADYDRVLEKLKKTATGWMTTINGKELKVEGQITYYNRYKRQNVVKDLSVELDRLSEESVNNDISSWTKGRSGEALSLLKKRFSHRPVQEKFVCLNCGFETHADEQAALNIARSWLFLRSQEYKKYQTNKTTGNTDKRAFVETWQSFYRKKLKEVWKPAV

SEQ ID NO: 41202 - protein, 979 aa, synthetic construct
  REGION 1..979: note = engineered CasX variant
QEIGKRINKIRRRLVKDSNTKKAGKTGPMKTLLVRVMTPDLRERLENLRKKPENIPQPISNTSRANLNKLLTDYTEMKKAILHVYWEEFQKDPVGLMSRVAQPASKKIDQNKLKPEMDEKGNLTTAGFACSQCGQPLFVYKLEQVSEKGKAYTNYFGRCNVAEHEKLILLAQLKPEKDSDEAVTYSLGKFGQRALDFYSIHVTKESTHPVKPLAQIAGNRYASYPVGKALSDACMGTIASFLSKYQDIIIEHQKVVKGNQKRLESLRELAGKENLEYPSVTLPPQPHTKEGVDAYNEVIARVRMWVNLNLWQKLKLSRDDAKPLLRLKGFPSFPLVERQANEVDWWDMVCNVKKLINEKKEDGKVFWQNLAGYKRQEALRPYLSSEEDRKKGKKFARYQLGDLLLHLEKKHGEDWGKVYDEAWERIDKKVEGLSKHIKLEEERRSEDAQSKAALTDWLRAKASFVIEGKKEADKDEFCRCELKLQKWYGDLRGKPFAIEAENSILDISGFSKQYNCAFIWQKDGVKKLNLYLIINYFKGGKLRFKKIKPEAFEANRFYTVINKKSGEIVPMEVNFNFDDPNLIILPLAFGKRQGREFIWNDLLSLETGSLKLANGRVIEKTLYNRRTRQDEPALFVALTFERREVLDSSNIKPMNLIGVDRGENIPAVIALTDPEGCPLSRFKDSLGNPTHILRIGESYKEKQRTIQAKKEVEQRRAGGYSRKYASKAKNLADDMVRNTARDLLYYAVTQDAMLIFENLSRGFGRQGKRTFMAERQYTRMEDWLTAKLAYEGLPSKTYLSKTLAQYTSKTCSNCGFTITSADYDRVLEKLKKTATGWMTTINGKELKVEGQITYYNRYKRQNVVKDLSVELDRLSEESVNNDISSWTKGRSGEALSLLKKRFSHRPVQEKFVCLNCGFETHADEQAALNIARSWLFLRSQEYKKYQTNKTTGNTDKRAFVETWQSFYRKKLKEVWKPAV

SEQ ID NO: 41203 - protein, 979 aa, synthetic construct
  REGION 1..979: note = engineered CasX variant
QEIGKRINKIRRRLVKDSNTKKAGKTGPMKTLLVRVMTPDLRERLENLRKKPENIPQPISNTSRANLNKLLTDYTEMKKAILHVYWEEFQKDPVGLMSRVAQPASKKIDQNKLKPEMDEKGNLTTAGFACSQCGQPLFVYKLEQVSEKGKAYTNYFGRCNVAEHEKLILLAQLKPEKDSDEAVTYSLGKFGQRALDFYSIHVTKESTHPVKPLAQIAGNRYASHPVGKALSDACMGTIASFLSKYQDIIIEHQKVVKGNQKRLESLRELAGKENLEYPSVTLPPQPHTKEGVDAYNEVIARVRMWVNLNLWQKLKLSRDDAKPLLRLKGFPSFPLVERQANEVDWWDMVCNVKKLINEKKEDGKVFWQNLAGYKRQEALRPYLSSEEDRKKGKKFARYQLGDLLLHLEKKHGEDWGKVYDEAWERIDKKVEGLSKHIKLEEERRSEDAQSKAALTDWLRAKASFVIEGKKEADKDEFCRCELKLQKWYGDLRGKPFAIEAENSILDISGFSKQYNCAFIWQKDGVKKLNLYLIINYFKGGKLRFKKIKPEAFEANRFYTVINKKSGEIVPMEVNFNFDDPNLIILPLAFGKRQGREFIWNDLLSLETGSLKLANGRVIEKTLYNRRTRQDEPALFVALTFERREVLDSSNIKPMNLIGVDRGENIPAVIALTDPEGCPLSRFKDSLGNPTHILRIGESYKEKQRTIQAKKEVEQRRAGGYSRKYASKAKNLADDMVRNTARDLLYYAVTQDAMLIFENLSRGFGRQGKRTFMAERQYTRMEDWLTAKLAYEGLPSKTYLSKTLAQYTSKTCSNCGFTITSADYDRVLEKLKKTATGWMTTINGKELKVEGQITYYNRYKRQNVVKDLSVELDRLSEESVNNDISSWTKGRSGEALSLLKKRFSHRPVQEKFVCLNCGFETHADEQAALNIARSWLFLRSQEYKKYQTNKTTGNTDKRAFVETWQSFYRKKLKEVWKPAV

SEQ ID NO: 41204 - protein, 979 aa, synthetic construct
  REGION 1..979: note = engineered CasX variant
QEIGKRINKIRRRLVKDSNTKKAGKTGPMKTLLVRVMTPDLRERLENLRKKPENIPQPISNTSRANLNKLLTDYTEMKKAILHVYWEEFQKDPVGLMSRVAQPASKKIDQNKLKPEMDEKGNLTTAGFACSQCGQPLFVYKLEQVSEKGKAYTNYFGRCNVAEHEKLILLAQLKPEKDSDEAVTYSLGKFGQRALDFYSIHVTKESTHPVKPLAQIAGNRYASSPVGKALSDACMGTIASFLSKYQDIIIEHQKVVKGNQKRLESLRELAGKENLEYPSVTLPPQPHTKEGVDAYNEVIARVRMWVNLNLWQKLKLSRDDAKPLLRLKGFPSFPLVERQANEVDWWDMVCNVKKLINEKKEDGKVFWQNLAGYKRQEALRPYLSSEEDRKKGKKFARYQLGDLLLHLEKKHGEDWGKVYDEAWERIDKKVEGLSKHIKLEEERRSEDAQSKAALTDWLRAKASFVIEGKKEADKDEFCRCELKLQKWYGDLRGKPFAIEAENSILDISGFSKQYNCAFIWQKDGVKKLNLYLIINYFKGGKLRFKKIKPEAFEANRFYTVINKKSGEIVPMEVNFNFDDPNLIILPLAFGKRQGREFIWNDLLSLETGSLKLANGRVIEKTLYNRRTRQDEPALFVALTFERREVLDSSNIKPMNLIGVDRGENIPAVIALTDPEGCPLSRFKDSLGNPTHILRIGESYKEKQRTIQAKKEVEQRRAGGYSRKYASKAKNLADDMVRNTARDLLYYAVTQDAMLIFENLSRGFGRQGKRTFMAERQYTRMEDWLTAKLAYEGLPSKTYLSKTLAQYTSKTCSNCGFTITSADYDRVLEKLKKTATGWMTTINGKELKVEGQITYYNRYKRQNVVKDLSVELDRLSEESVNNDISSWTKGRSGEALSLLKKRFSHRPVQEKFVCLNCGFETHADEQAALNIARSWLFLRSQEYKKYQTNKTTGNTDKRAFVETWQSFYRKKLKEVWKPAV

SEQ ID NO: 41205 - protein, 979 aa, synthetic construct
  REGION 1..979: note = engineered CasX variant
QEIGKRINKIRRRLVKDSNTKKAGKTGPMKTLLVRVMTPDLRERLENLRKKPENIPQPISNTSRANLNKLLTDYTEMKKAILHVYWEEFQKDPVGLMSRVAQPASKKIDQNKLKPEMDEKGNLTTAGFACSQCGQPLFVYKLEQVSEKGKAYTNYFGRCNVAEHEKLILLAQLKPEKDSDEAVTYSLGKFGQRALDFYSIHVTKESTHPVKPLAQIAGNRYASTPVGKALSDACMGTIASFLSKYQDIIIEHQKVVKGNQKRLESLRELAGKENLEYPSVTLPPQPHTKEGVDAYNEVIARVRMWVNLNLWQKLKLSRDDAKPLLRLKGFPSFPLVERQANEVDWWDMVCNVKKLINEKKEDGKVFWQNLAGYKRQEALRPYLSSEEDRKKGKKFARYQLGDLLLHLEKKHGEDWGKVYDEAWERIDKKVEGLSKHIKLEEERRSEDAQSKAALTDWLRAKASFVIEGKKEADKDEFCRCELKLQKWYGDLRGKPFAIEAENSILDISGFSKQYNCAFIWQKDGVKKLNLYLIINYFKGGKLRFKKIKPEAFEANRFYTVINKKSGEIVPMEVNFNFDDPNLIILPLAFGKRQGREFIWNDLLSLETGSLKLANGRVIEKTLYNRRTRQDEPALFVALTFERREVLDSSNIKPMNLIGVDRGENIPAVIALTDPEGCPLSRFKDSLGNPTHILRIGESYKEKQRTIQAKKEVEQRRAGGYSRKYASKAKNLADDMVRNTARDLLYYAVTQDAMLIFENLSRGFGRQGKRTFMAERQYTRMEDWLTAKLAYEGLPSKTYLSKTLAQYTSKTCSNCGFTITSADYDRVLEKLKKTATGWMTTINGKELKVEGQITYYNRYKRQNVVKDLSVELDRLSEESVNNDISSWTKGRSGEALSLLKKRFSHRPVQEKFVCLNCGFETHADEQAALNIARSWLFLRSQEYKKYQTNKTTGNTDKRAFVETWQSFYRKKLKEVWKPAV

SEQ ID NO: 41206 - protein, 979 aa, synthetic construct
  REGION 1..979: note = engineered CasX variant
QEIGKRINKIRRRLVKDSNTKKAGKTGPMKTLLVRVMTPDLRERLENLRKKPENIPQPISNTSRANLNKLLTDYTEMKKAILHVYWEEFQKDPVGLMSRVAQPASKKIDQNKLKPEMDEKGNLTTAGFACSQCGQPLFVYKLEQVSEKGKAYTNYFGRCNVAEHEKLILLAQLKPEKDSDEAVTYSLGKFGQRALDFYSIHVTKESTHPVKPLAQIAGNRYASAPVGKALSDACMGTIASFLSKYQDIIIEHQKVVKGNQKRLESLRELAGKENLEYPSVTLPPQPHTKEGVDAYNEVIARVRMWVNLNLWQKLKLSRDDAKPLLRLKGFPSFPLVERQANEVDWWDMVCNVKKLINEKKEDGKVFWQNLAGYKRQEALRPYLSSEEDRKKGKKFARYQLGDLLLHLEKKHGEDWGKVYDEAWERIDKKVEGLSKHIKLEEERRSEDAQSKAALTDWLRAKASFVIEGKKEADKDEFCRCELKLQKWYGDLRGKPFAIEAENSILDISGFSKQYNCAFIWQKDGVKKLNLYLIINYFKGGKLRFKKIKPEAFEANRFYTVINKKSGEIVPMEVNFNFDDPNLIILPLAFGKRQGREFIWNDLLSLETGSLKLANGRVIEKTLYNRRTRQDEPALFVALTFERREVLDSSNIKPMNLIGVDRGENIPAVIALTDPEGCPLSRFKDSLGNPTHILRIGESYKEKQRTIQAKKEVEQRRAGGYSRKYASKAKNLADDMVRNTARDLLYYAVTQDAMLIFENLSRGFGRQGKRTFMAERQYTRMEDWLTAKLAYEGLPSKTYLSKTLAQYTSKTCSNCGFTITSADYDRVLEKLKKTATGWMTTINGKELKVEGQITYYNRYKRQNVVKDLSVELDRLSEESVNNDISSWTKGRSGEALSLLKKRFSHRPVQEKFVCLNCGFETHADEQAALNIARSWLFLRSQEYKKYQTNKTTGNTDKRAFVETWQSFYRKKLKEVWKPAV

SEQ ID NO: 41207 - protein, 979 aa, synthetic construct
  REGION 1..979: note = engineered CasX variant
QEIGKRINKIRRRLVKDSNTKKAGKTGPMKTLLVRVMTPDLRERLENLRKKPENIPQPISNTSRANLNKLLTDYTEMKKAILHVYWEEFQKDPVGLMSRVAQPASKKIDQNKLKPEMDEKGNLTTAGFACSQCGQPLFVYKLEQVSEKGKAYTNYFGRCNVAEHEKLILLAQLKPEKDSDEAVTYSLGKFGQRALDFYSIHVTKESTHPVKPLAQIAGNRYASVPVGKALSDACMGTIASFLSKYQDIIIEHQKVVKGNQKRLESLRELAGKENLEYPSVTLPPQPHTKEGVDAYNEVIARVRMWVNLNLWQKLKLSRDDAKPLLRLKGFPSFPLVERQANEVDWWDMVCNVKKLINEKKEDGKVFWQNLAGYKRQEALRPYLSSEEDRKKGKKFARYQLGDLLLHLEKKHGEDWGKVYDEAWERIDKKVEGLSKHIKLEEERRSEDAQSKAALTDWLRAKASFVIEGKKEADKDEFCRCELKLQKWYGDLRGKPFAIEAENSILDISGFSKQYNCAFIWQKDGVKKLNLYLIINYFKGGKLRFKKIKPEAFEANRFYTVINKKSGEIVPMEVNFNFDDPNLIILPLAFGKRQGREFIWNDLLSLETGSLKLANGRVIEKTLYNRRTRQDEPALFVALTFERREVLDSSNIKPMNLIGVDRGENIPAVIALTDPEGCPLSRFKDSLGNPTHILRIGESYKEKQRTIQAKKEVEQRRAGGYSRKYASKAKNLADDMVRNTARDLLYYAVTQDAMLIFENLSRGFGRQGKRTFMAERQYTRMEDWLTAKLAYEGLPSKTYLSKTLAQYTSKTCSNCGFTITSADYDRVLEKLKKTATGWMTTINGKELKVEGQITYYNRYKRQNVVKDLSVELDRLSEESVNNDISSWTKGRSGEALSLLKKRFSHRPVQEKFVCLNCGFETHADEQAALNIARSWLFLRSQEYKKYQTNKTTGNTDKRAFVETWQSFYRKKLKEVWKPAV

SEQ ID NO: 41208 - protein, 979 aa, synthetic construct
  REGION 1..979: note = engineered CasX variant
QEIGKRINKIRRRLVKDSNTKKAGKTGPMKTLLVRVMTPDLRERLENLRKKPENIPQPISNTSRANLNKLLTDYTEMKKAILHVYWEEFQKDPVGLMSRVAQPASKKIDQNKLKPEMDEKGNLTTAGFACSQCGQPLFVYKLEQVSEKGKAYTNYFGRCNVAEHEKLIKLAQLKPEKDSDEAVTYSLGKFGQRALDFYSIHVTKESTHPVKPLAQIAGNRYASGPVGKALSDACMGTIASFLSKYQDIIIEHQKVVKGNQKRLESLRELAGKENLEYPSVTLPPQPHTKEGVDAYNEVIARVRMWVNLNLWQKLKLSRDDAKPLLRLKGFPSFPLVERQANEVDWWDMVCNVKKLINEKKEDGKVFWQNLAGYKRQEALRPYLSSEEDRKKGKKFARYQLGDLLLHLEKKHGEDWGKVYDEAWERIDKKVEGLSKHIKLEEERRSEDAQSKAALTDWLRAKASFVIEGKKEADKDEFCRCELKLQKWYGDLRGKPFAIEAENSILDISGFSKQYNCAFIWQKDGVKKLNLYLIINYFKGGKLRFKKIKPEAFEANRFYTVINKKSGEIVPMEVNFNFDDPNLIILPLAFGKRQGREFIWNDLLSLETGSLKLANGRVIEKTLYNRRTRQDEPALFVALTFERREVLDSSNIKPMNLIGVDRGENIPAVIALTDPEGCPLSRFKDSLGNPTHILRIGESYKEKQRTIQAKKEVEQRRAGGYSRKYASKAKNLADDMVRNTARDLLYYAVTQDAMLIFENLSRGFGRQGKRTFMAERQYTRMEDWLTAKLAYEGLPSKTYLSKTLAQYTSKTCSNCGFTITSADYDRVLEKLKKTATGWMTTINGKELKVEGQITYYNRYKRQNVVKDLSVELDRLSEESVNNDISSWTKGRSGEALSLLKKRFSHRPVQEKFVCLNCGFETHADEQAALNIARSWLFLRSQEYKKYQTNKTTGNTDKRAFVETWQSFYRKKLKEVWKPAV

SEQ ID NO: 41209 - protein, 978 aa, synthetic construct
  REGION 1..978: note = engineered CasX variant
QEIGKRINKIRRRLVKDSNTKKAGKTGPMKTLLVRVMTPDLRERLENLRKKPENIPQPISNTSRANLNKLLTDYTEMKKAILHVYWEEFQKDPVGLMSRVAQPASKKIDQNKLKPEMDEKGNLTTAGFACSQCGQPLFVYKLEQVSEKGKAYTNYFGRCNVAEHEKLILLAQLKPEKDSDEAVTYSLGKFGQRALDFYSIHVTKESTHPVKPLAQIAGNRYASPVGKALSDACMGTIASFLSKYQDIIIEHQKVVKGNQKRLESLRELAGKENLEYPSVTLPPQPHTKEGVDAYNEVIARVRMWVNLNLWQKLKLSRDDAKPLLRLKGFPSFPLVERQANEVDWWDMVCNVKKLINEKKEDGKVFWQNLAGYKRQEALRPYLSSEEDRKKGKKFARYQLGDLLLHLEKKHGEDWGKVYDEAWERIDKKVEGLSKHIKLEEERRSEDAQSKAALTDWLRAKASFVIEGKKEADKDEFCRCELKLQKWYGDLRGKPFAIEAENSILDISGFSKQYNCAFIWQKDGVKKLNLYLIINYFKGGKLRFKKIKPEAFEANRFYTVINKKSGEIVPMEVNFNFDDPNLIILPLAFGKRQGREFIWNDLLSLETGSLKLANGRVIEKTLYNRRTRQDEPALFVALTFERREVLDSSNIKPMNLIGVDRGENIPAVIALTDPEGCPLSRFKDSLGNPTHILRIGESYKEKQRTIQAKKEVEQRRAGGYSRKYASKAKNLADDMVRNTARDLLYYAVTQDAMLIFENLSRGFGRQGKRTFMAERQYTRMEDWLTAKLAYEGLPSKTYLSKTLAQYTSKTCSNCGFTITSADYDRVLEKLKKTATGWMTTINGKELKVEGQITYYNRYKRQNVVKDLSVELDRLSEESVNNDISSWTKGRSGEALSLLKKRFSHRPVQEKFVCLNCGFETHADEQAALNIARSWLFLRSQEYKKYQTNKTTGNTDKRAFVETWQSFYRKKLKEVWKPAV

SEQ ID NO: 41210 - protein, 979 aa, synthetic construct
  REGION 1..979: note = engineered CasX variant
QEIGKRINKIRRRLVKDSNTKKAGKTGPMKTLLVRVMTPDLRERLENLRKKPENIPQPISNTSRANLNKLLTDYTEMKKAILHVYWEEFQKDPVGLMSRVAQPASKKIDQNKLKPEMDEKGNLTTAGFACSQCGQPLFVYKLEQVSEKGKAYTNYFGRCNVAEHEKLILLAQLKPEKDSDEAVTYSLGKFGQRALDFYSIHVTKESTHPVKPLAQIAGNRYASYPVGKALSDACMGTIASFLSKYQDIIIEHQKVVKGNQKRLESLRELAGKENLEYPSVTLPPQPHTKEGVDAYNEVIARVRMWVNLNLWQKLKLSRDDAKPLLRLKGFPSFPLVERQANEVDWWDMVCNVKKLINEKKEDGKVFWQNLAGYKRQEALRPYLSSEEDRKKGKKFARYQLGDLLLHLEKKHGEDWGKVYDEAWERIDKKVEGLSKHIKLEEERRSEDAQSKAALTDWLRAKASFVIEGSKEADKDEFCRCELKLQKWYGDLRGKPFAIEAENSILDISGFSKQYNCAFIWQKDGVKKLNLYLIINYFKGGKLRFKKIKPEAFEANRFYTVINKKSGEIVPMEVNFNFDDPNLIILPLAFGKRQGREFIWNDLLSLETGSLKLANGRVIEKTLYNRRTRQDEPALFVALTFERREVLDSSNIKPMNLIGVDRGENIPAVIALTDPEGCPLSRFKDSLGNPTHILRIGESYKEKQRTIQAKKEVEQRRAGGYSRKYASKAKNLADDMVRNTARDLLYYAVTQDAMLIFENLSRGFGRQGKRTFMAERQYTRMEDWLTAKLAYEGLPSKTYLSKTLAQYTSKTCSNCGFTITSADYDRVLEKLKKTATGWMTTINGKELKVEGQITYYNRYKRQNVVKDLSVELDRLSEESVNNDISSWTKGRSGEALSLLKKRFSHRPVQEKFVCLNCGFETHADEQAALNIARSWLFLRSQEYKKYQTNKTTGNTDKRAFVETWQSFYRKKLKEVWKPAV

SEQ ID NO: 41211 - protein, 979 aa, synthetic construct
  REGION 1..979: note = engineered CasX variant
QEIGKRINKIRRRLVKDSNTKKAGKTGPMKTLLVRVMTPDLRERLENLRKKPENIPQPISNTSRANLNKLLTDYTEMKKAILHVYWEEFQKDPVGLMSRVAQPASKKIDQNKLKPEMDEKGNLTTAGFACSQCGQPLFVYKLEQVSEKGKAYTNYFGRCNVAEHEKLILLAQLKPEKDSDEAVTYSLGKFGQRALDFYSIHVTKESTHPVKPLAQIAGNRYASHPVGKALSDACMGTIASFLSKYQDIIIEHQKVVKGNQKRLESLRELAGKENLEYPSVTLPPQPHTKEGVDAYNEVIARVRMWVNLNLWQKLKLSRDDAKPLLRLKGFPSFPLVERQANEVDWWDMVCNVKKLINEKKEDGKVFWQNLAGYKRQEALRPYLSSEEDRKKGKKFARYQLGDLLLHLEKKHGEDWGKVYDEAWERIDKKVEGLSKHIKLEEERRSEDAQSKAALTDWLRAKASFVIEGSKEADKDEFCRCELKLQKWYGDLRGKPFAIEAENSILDISGFSKQYNCAFIWQKDGVKKLNLYLIINYFKGGKLRFKKIKPEAFEANRFYTVINKKSGEIVPMEVNFNFDDPNLIILPLAFGKRQGREFIWNDLLSLETGSLKLANGRVIEKTLYNRRTRQDEPALFVALTFERREVLDSSNIKPMNLIGVDRGENIPAVIALTDPEGCPLSRFKDSLGNPTHILRIGESYKEKQRTIQAKKEVEQRRAGGYSRKYASKAKNLADDMVRNTARDLLYYAVTQDAMLIFENLSRGFGRQGKRTFMAERQYTRMEDWLTAKLAYEGLPSKTYLSKTLAQYTSKTCSNCGFTITSADYDRVLEKLKKTATGWMTTINGKELKVEGQITYYNRYKRQNVVKDLSVELDRLSEESVNNDISSWTKGRSGEALSLLKKRFSHRPVQEKFVCLNCGFETHADEQAALNIARSWLFLRSQEYKKYQTNKTTGNTDKRAFVETWQSFYRKKLKEVWKPAV

SEQ ID NO: 41212 - protein, 979 aa, synthetic construct
  REGION 1..979: note = engineered CasX variant
QEIGKRINKIRRRLVKDSNTKKAGKTGPMKTLLVRVMTPDLRERLENLRKKPENIPQPISNTSRANLNKLLTDYTEMKKAILHVYWEEFQKDPVGLMSRVAQPASKKIDQNKLKPEMDEKGNLTTAGFACSQCGQPLFVYKLEQVSEKGKAYTNYFGRCNVAEHEKLILLAQLKPEKDSDEAVTYSLGKFGQRALDFYSIHVTKESTHPVKPLAQIAGNRYASSPVGKALSDACMGTIASFLSKYQDIIIEHQKVVKGNQKRLESLRELAGKENLEYPSVTLPPQPHTKEGVDAYNEVIARVRMWVNLNLWQKLKLSRDDAKPLLRLKGFPSFPLVERQANEVDWWDMVCNVKKLINEKKEDGKVFWQNLAGYKRQEALRPYLSSEEDRKKGKKFARYQLGDLLLHLEKKHGEDWGKVYDEAWERIDKKVEGLSKHIKLEEERRSEDAQSKAALTDWLRAKASFVIEGSKEADKDEFCRCELKLQKWYGDLRGKPFAIEAENSILDISGFSKQYNCAFIWQKDGVKKLNLYLIINYFKGGKLRFKKIKPEAFEANRFYTVINKKSGEIVPMEVNFNFDDPNLIILPLAFGKRQGREFIWNDLLSLETGSLKLANGRVIEKTLYNRRTRQDEPALFVALTFERREVLDSSNIKPMNLIGVDRGENIPAVIALTDPEGCPLSRFKDSLGNPTHILRIGESYKEKQRTIQAKKEVEQRRAGGYSRKYASKAKNLADDMVRNTARDLLYYAVTQDAMLIFENLSRGFGRQGKRTFMAERQYTRMEDWLTAKLAYEGLPSKTYLSKTLAQYTSKTCSNCGFTITSADYDRVLEKLKKTATGWMTTINGKELKVEGQITYYNRYKRQNVVKDLSVELDRLSEESVNNDISSWTKGRSGEALSLLKKRFSHRPVQEKFVCLNCGFETHADEQAALNIARSWLFLRSQEYKKYQTNKTTGNTDKRAFVETWQSFYRKKLKEVWKPAV

SEQ ID NO: 41213 - protein, 979 aa, synthetic construct
  REGION 1..979: note = engineered CasX variant
QEIGKRINKIRRRLVKDSNTKKAGKTGPMKTLLVRVMTPDLRERLENLRKKPENIPQPISNTSRANLNKLLTDYTEMKKAILHVYWEEFQKDPVGLMSRVAQPASKKIDQNKLKPEMDEKGNLTTAGFACSQCGQPLFVYKLEQVSEKGKAYTNYFGRCNVAEHEKLILLAQLKPEKDSDEAVTYSLGKFGQRALDFYSIHVTKESTHPVKPLAQIAGNRYASTPVGKALSDACMGTIASFLSKYQDIIIEHQKVVKGNQKRLESLRELAGKENLEYPSVTLPPQPHTKEGVDAYNEVIARVRMWVNLNLWQKLKLSRDDAKPLLRLKGFPSFPLVERQANEVDWWDMVCNVKKLINEKKEDGKVFWQNLAGYKRQEALRPYLSSEEDRKKGKKFARYQLGDLLLHLEKKHGEDWGKVYDEAWERIDKKVEGLSKHIKLEEERRSEDAQSKAALTDWLRAKASFVIEGSKEADKDEFCRCELKLQKWYGDLRGKPFAIEAENSILDISGFSKQYNCAFIWQKDGVKKLNLYLIINYFKGGKLRFKKIKPEAFEANRFYTVINKKSGEIVPMEVNFNFDDPNLIILPLAFGKRQGREFIWNDLLSLETGSLKLANGRVIEKTLYNRRTRQDEPALFVALTFERREVLDSSNIKPMNLIGVDRGENIPAVIALTDPEGCPLSRFKDSLGNPTHILRIGESYKEKQRTIQAKKEVEQRRAGGYSRKYASKAKNLADDMVRNTARDLLYYAVTQDAMLIFENLSRGFGRQGKRTFMAERQYTRMEDWLTAKLAYEGLPSKTYLSKTLAQYTSKTCSNCGFTITSADYDRVLEKLKKTATGWMTTINGKELKVEGQITYYNRYKRQNVVKDLSVELDRLSEESVNNDISSWTKGRSGEALSLLKKRFSHRPVQEKFVCLNCGFETHADEQAALNIARSWLFLRSQEYKKYQTNKTTGNTDKRAFVETWQSFYRKKLKEVWKPAV

SEQ ID NO: 41214 - protein, 979 aa, synthetic construct
  REGION 1..979: note = engineered CasX variant
QEIGKRINKIRRRLVKDSNTKKAGKTGPMKTLLVRVMTPDLRERLENLRKKPENIPQPISNTSRANLNKLLTDYTEMKKAILHVYWEEFQKDPVGLMSRVAQPASKKIDQNKLKPEMDEKGNLTTAGFACSQCGQPLFVYKLEQVSEKGKAYTNYFGRCNVAEHEKLILLAQLKPEKDSDEAVTYSLGKFGQRALDFYSIHVTKESTHPVKPLAQIAGNRYASAPVGKALSDACMGTIASFLSKYQDIIIEHQKVVKGNQKRLESLRELAGKENLEYPSVTLPPQPHTKEGVDAYNEVIARVRMWVNLNLWQKLKLSRDDAKPLLRLKGFPSFPLVERQANEVDWWDMVCNVKKLINEKKEDGKVFWQNLAGYKRQEALRPYLSSEEDRKKGKKFARYQLGDLLLHLEKKHGEDWGKVYDEAWERIDKKVEGLSKHIKLEEERRSEDAQSKAALTDWLRAKASFVIEGSKEADKDEFCRCELKLQKWYGDLRGKPFAIEAENSILDISGFSKQYNCAFIWQKDGVKKLNLYLIINYFKGGKLRFKKIKPEAFEANRFYTVINKKSGEIVPMEVNFNFDDPNLIILPLAFGKRQGREFIWNDLLSLETGSLKLANGRVIEKTLYNRRTRQDEPALFVALTFERREVLDSSNIKPMNLIGVDRGENIPAVIALTDPEGCPLSRFKDSLGNPTHILRIGESYKEKQRTIQAKKEVEQRRAGGYSRKYASKAKNLADDMVRNTARDLLYYAVTQDAMLIFENLSRGFGRQGKRTFMAERQYTRMEDWLTAKLAYEGLPSKTYLSKTLAQYTSKTCSNCGFTITSADYDRVLEKLKKTATGWMTTINGKELKVEGQITYYNRYKRQNVVKDLSVELDRLSEESVNNDISSWTKGRSGEALSLLKKRFSHRPVQEKFVCLNCGFETHADEQAALNIARSWLFLRSQEYKKYQTNKTTGNTDKRAFVETWQSFYRKKLKEVWKPAV

SEQ ID NO: 41215 - protein, 979 aa, synthetic construct
  REGION 1..979: note = engineered CasX variant
QEIGKRINKIRRRLVKDSNTKKAGKTGPMKTLLVRVMTPDLRERLENLRKKPENIPQPISNTSRANLNKLLTDYTEMKKAILHVYWEEFQKDPVGLMSRVAQPASKKIDQNKLKPEMDEKGNLTTAGFACSQCGQPLFVYKLEQVSEKGKAYTNYFGRCNVAEHEKLILLAQLKPEKDSDEAVTYSLGKFGQRALDFYSIHVTKESTHPVKPLAQIAGNRYASVPVGKALSDACMGTIASFLSKYQDIIIEHQKVVKGNQKRLESLRELAGKENLEYPSVTLPPQPHTKEGVDAYNEVIARVRMWVNLNLWQKLKLSRDDAKPLLRLKGFPSFPLVERQANEVDWWDMVCNVKKLINEKKEDGKVFWQNLAGYKRQEALRPYLSSEEDRKKGKKFARYQLGDLLLHLEKKHGEDWGKVYDEAWERIDKKVEGLSKHIKLEEERRSEDAQSKAALTDWLRAKASFVIEGSKEADKDEFCRCELKLQKWYGDLRGKPFAIEAENSILDISGFSKQYNCAFIWQKDGVKKLNLYLIINYFKGGKLRFKKIKPEAFEANRFYTVINKKSGEIVPMEVNFNFDDPNLIILPLAFGKRQGREFIWNDLLSLETGSLKLANGRVIEKTLYNRRTRQDEPALFVALTFERREVLDSSNIKPMNLIGVDRGENIPAVIALTDPEGCPLSRFKDSLGNPTHILRIGESYKEKQRTIQAKKEVEQRRAGGYSRKYASKAKNLADDMVRNTARDLLYYAVTQDAMLIFENLSRGFGRQGKRTFMAERQYTRMEDWLTAKLAYEGLPSKTYLSKTLAQYTSKTCSNCGFTITSADYDRVLEKLKKTATGWMTTINGKELKVEGQITYYNRYKRQNVVKDLSVELDRLSEESVNNDISSWTKGRSGEALSLLKKRFSHRPVQEKFVCLNCGFETHADEQAALNIARSWLFLRSQEYKKYQTNKTTGNTDKRAFVETWQSFYRKKLKEVWKPAV

SEQ ID NO: 41216 - protein, 979 aa, synthetic construct
  REGION 1..979: note = engineered CasX variant
QEIGKRINKIRRRLVKDSNTKKAGKTGPMKTLLVRVMTPDLRERLENLRKKPENIPQPISNTSRANLNKLLTDYTEMKKAILHVYWEEFQKDPVGLMSRVAQPASKKIDQNKLKPEMDEKGNLTTAGFACSQCGQPLFVYKLEQVSEKGKAYTNYFGRCNVAEHEKLIKLAQLKPEKDSDEAVTYSLGKFGQRALDFYSIHVTKESTHPVKPLAQIAGNRYASGPVGKALSDACMGTIASFLSKYQDIIIEHQKVVKGNQKRLESLRELAGKENLEYPSVTLPPQPHTKEGVDAYNEVIARVRMWVNLNLWQKLKLSRDDAKPLLRLKGFPSFPLVERQANEVDWWDMVCNVKKLINEKKEDGKVFWQNLAGYKRQEALRPYLSSEEDRKKGKKFARYQLGDLLLHLEKKHGEDWGKVYDEAWERIDKKVEGLSKHIKLEEERRSEDAQSKAALTDWLRAKASFVIEGSKEADKDEFCRCELKLQKWYGDLRGKPFAIEAENSILDISGFSKQYNCAFIWQKDGVKKLNLYLIINYFKGGKLRFKKIKPEAFEANRFYTVINKKSGEIVPMEVNFNFDDPNLIILPLAFGKRQGREFIWNDLLSLETGSLKLANGRVIEKTLYNRRTRQDEPALFVALTFERREVLDSSNIKPMNLIGVDRGENIPAVIALTDPEGCPLSRFKDSLGNPTHILRIGESYKEKQRTIQAKKEVEQRRAGGYSRKYASKAKNLADDMVRNTARDLLYYAVTQDAMLIFENLSRGFGRQGKRTFMAERQYTRMEDWLTAKLAYEGLPSKTYLSKTLAQYTSKTCSNCGFTITSADYDRVLEKLKKTATGWMTTINGKELKVEGQITYYNRYKRQNVVKDLSVELDRLSEESVNNDISSWTKGRSGEALSLLKKRFSHRPVQEKFVCLNCGFETHADEQAALNIARSWLFLRSQEYKKYQTNKTTGNTDKRAFVETWQSFYRKKLKEVWKPAV

SEQ ID NO: 41217 - protein, 978 aa, synthetic construct
  REGION 1..978: note = engineered CasX variant
QEIGKRINKIRRRLVKDSNTKKAGKTGPMKTLLVRVMTPDLRERLENLRKKPENIPQPISNTSRANLNKLLTDYTEMKKAILHVYWEEFQKDPVGLMSRVAQPASKKIDQNKLKPEMDEKGNLTTAGFACSQCGQPLFVYKLEQVSEKGKAYTNYFGRCNVAEHEKLILLAQLKPEKDSDEAVTYSLGKFGQRALDFYSIHVTKESTHPVKPLAQIAGNRYASPVGKALSDACMGTIASFLSKYQDIIIEHQKVVKGNQKRLESLRELAGKENLEYPSVTLPPQPHTKEGVDAYNEVIARVRMWVNLNLWQKLKLSRDDAKPLLRLKGFPSFPLVERQANEVDWWDMVCNVKKLINEKKEDGKVFWQNLAGYKRQEALRPYLSSEEDRKKGKKFARYQLGDLLLHLEKKHGEDWGKVYDEAWERIDKKVEGLSKHIKLEEERRSEDAQSKAALTDWLRAKASFVIEGSKEADKDEFCRCELKLQKWYGDLRGKPFAIEAENSILDISGFSKQYNCAFIWQKDGVKKLNLYLIINYFKGGKLRFKKIKPEAFEANRFYTVINKKSGEIVPMEVNFNFDDPNLIILPLAFGKRQGREFIWNDLLSLETGSLKLANGRVIEKTLYNRRTRQDEPALFVALTFERREVLDSSNIKPMNLIGVDRGENIPAVIALTDPEGCPLSRFKDSLGNPTHILRIGESYKEKQRTIQAKKEVEQRRAGGYSRKYASKAKNLADDMVRNTARDLLYYAVTQDAMLIFENLSRGFGRQGKRTFMAERQYTRMEDWLTAKLAYEGLPSKTYLSKTLAQYTSKTCSNCGFTITSADYDRVLEKLKKTATGWMTTINGKELKVEGQITYYNRYKRQNVVKDLSVELDRLSEESVNNDISSWTKGRSGEALSLLKKRFSHRPVQEKFVCLNCGFETHADEQAALNIARSWLFLRSQEYKKYQTNKTTGNTDKRAFVETWQSFYRKKLKEVWKPAV

SEQ ID NO: 41218 - protein, 980 aa, synthetic construct
  REGION 1..980: note = engineered CasX variant
QEIGKRINKIRRRLVKDSNTKKAGKTGPMKTLLVRVMTPDLRERLENLRKKPENIPQPISNTSRANLNKLLTDYTEMKKAILHVYWEEFQKDPVGLMSRVAQPASKKIDQNKLKPEMDEKGNLTTAGFACSQCGQPLFVYKLEQVSEKGKAYTNYFGRCNVAEHEKLILLAQLKPEKDSDEAVTYSLGKFGQRALDFYSIHVTKESTHPVKPLAQIAGNRYASYPVGKALSDACMGTIASFLSKYQDIIIEHQKVVKGNQKRLESLRELAGKENLEYPSVTLPPQPHTKEGVDAYNEVIARVRMWVNLNLWQKLKLSRDDAKPLLRLKGFPSFPLVERQANEVDWWDMVCNVKKLINEKKEDGKVFWQNLAGYKRQEALRPYLSSEEDRKKGKKFARYQLGDLLLHLEKKHGEDWGKVYDEAWERIDKKVEGLSKHIKLEEERRSEDAQSKAALTDWLRAKASFVIEGLKEADDKDEFCRCELKLQKWYGDLRGKPFAIEAENSILDISGFSKQYNCAFIWQKDGVKKLNLYLIINYFKGGKLRFKKIKPEAFEANRFYTVINKKSGEIVPMEVNFNFDDPNLIILPLAFGKRQGREFIWNDLLSLETGSLKLANGRVIEKTLYNRRTRQDEPALFVALTFERREVLDSSNIKPMNLIGVDRGENIPAVIALTDPEGCPLSRFKDSLGNPTHILRIGESYKEKQRTIQAKKEVEQRRAGGYSRKYASKAKNLADDMVRNTARDLLYYAVTQDAMLIFENLSRGFGRQGKRTFMAERQYTRMEDWLTAKLAYEGLPSKTYLSKTLAQYTSKTCSNCGFTITSADYDRVLEKLKKTATGWMTTINGKELKVEGQITYYNRYKRQNVVKDLSVELDRLSEESVNNDISSWTKGRSGEALSLLKKRFSHRPVQEKFVCLNCGFETHADEQAALNIARSWLFLRSQEYKKYQTNKTTGNTDKRAFVETWQSFYRKKLKEVWKPAV

SEQ ID NO: 41219 - protein, 980 aa, synthetic construct
  REGION 1..980: note = engineered CasX variant
QEIGKRINKIRRRLVKDSNTKKAGKTGPMKTLLVRVMTPDLRERLENLRKKPENIPQPISNTSRANLNKLLTDYTEMKKAILHVYWEEFQKDPVGLMSRVAQPASKKIDQNKLKPEMDEKGNLTTAGFACSQCGQPLFVYKLEQVSEKGKAYTNYFGRCNVAEHEKLILLAQLKPEKDSDEAVTYSLGKFGQRALDFYSIHVTKESTHPVKPLAQIAGNRYASHPVGKALSDACMGTIASFLSKYQDIIIEHQKVVKGNQKRLESLRELAGKENLEYPSVTLPPQPHTKEGVDAYNEVIARVRMWVNLNLWQKLKLSRDDAKPLLRLKGFPSFPLVERQANEVDWWDMVCNVKKLINEKKEDGKVFWQNLAGYKRQEALRPYLSSEEDRKKGKKFARYQLGDLLLHLEKKHGEDWGKVYDEAWERIDKKVEGLSKHIKLEEERRSEDAQSKAALTDWLRAKASFVIEGLKEADDKDEFCRCELKLQKWYGDLRGKPFAIEAENSILDISGFSKQYNCAFIWQKDGVKKLNLYLIINYFKGGKLRFKKIKPEAFEANRFYTVINKKSGEIVPMEVNFNFDDPNLIILPLAFGKRQGREFIWNDLLSLETGSLKLANGRVIEKTLYNRRTRQDEPALFVALTFERREVLDSSNIKPMNLIGVDRGENIPAVIALTDPEGCPLSRFKDSLGNPTHILRIGESYKEKQRTIQAKKEVEQRRAGGYSRKYASKAKNLADDMVRNTARDLLYYAVTQDAMLIFENLSRGFGRQGKRTFMAERQYTRMEDWLTAKLAYEGLPSKTYLSKTLAQYTSKTCSNCGFTITSADYDRVLEKLKKTATGWMTTINGKELKVEGQITYYNRYKRQNVVKDLSVELDRLSEESVNNDISSWTKGRSGEALSLLKKRFSHRPVQEKFVCLNCGFETHADEQAALNIARSWLFLRSQEYKKYQTNKTTGNTDKRAFVETWQSFYRKKLKEVWKPAV

SEQ ID NO: 41220 - protein, 980 aa, synthetic construct
  REGION 1..980: note = engineered CasX variant
QEIGKRINKIRRRLVKDSNTKKAGKTGPMKTLLVRVMTPDLRERLENLRKKPENIPQPISNTSRANLNKLLTDYTEMKKAILHVYWEEFQKDPVGLMSRVAQPASKKIDQNKLKPEMDEKGNLTTAGFACSQCGQPLFVYKLEQVSEKGKAYTNYFGRCNVAEHEKLILLAQLKPEKDSDEAVTYSLGKFGQRALDFYSIHVTKESTHPVKPLAQIAGNRYASSPVGKALSDACMGTIASFLSKYQDIIIEHQKVVKGNQKRLESLRELAGKENLEYPSVTLPPQPHTKEGVDAYNEVIARVRMWVNLNLWQKLKLSRDDAKPLLRLKGFPSFPLVERQANEVDWWDMVCNVKKLINEKKEDGKVFWQNLAGYKRQEALRPYLSSEEDRKKGKKFARYQLGDLLLHLEKKHGEDWGKVYDEAWERIDKKVEGLSKHIKLEEERRSEDAQSKAALTDWLRAKASFVIEGLKEADDKDEFCRCELKLQKWYGDLRGKPFAIEAENSILDISGFSKQYNCAFIWQKDGVKKLNLYLIINYFKGGKLRFKKIKPEAFEANRFYTVINKKSGEIVPMEVNFNFDDPNLIILPLAFGKRQGREFIWNDLLSLETGSLKLANGRVIEKTLYNRRTRQDEPALFVALTFERREVLDSSNIKPMNLIGVDRGENIPAVIALTDPEGCPLSRFKDSLGNPTHILRIGESYKEKQRTIQAKKEVEQRRAGGYSRKYASKAKNLADDMVRNTARDLLYYAVTQDAMLIFENLSRGFGRQGKRTFMAERQYTRMEDWLTAKLAYEGLPSKTYLSKTLAQYTSKTCSNCGFTITSADYDRVLEKLKKTATGWMTTINGKELKVEGQITYYNRYKRQNVVKDLSVELDRLSEESVNNDISSWTKGRSGEALSLLKKRFSHRPVQEKFVCLNCGFETHADEQAALNIARSWLFLRSQEYKKYQTNKTTGNTDKRAFVETWQSFYRKKLKEVWKPAV

SEQ ID NO: 41221 - protein, 980 aa, synthetic construct
  REGION 1..980: note = engineered CasX variant
QEIGKRINKIRRRLVKDSNTKKAGKTGPMKTLLVRVMTPDLRERLENLRKKPENIPQPISNTSRANLNKLLTDYTEMKKAILHVYWEEFQKDPVGLMSRVAQPASKKIDQNKLKPEMDEKGNLTTAGFACSQCGQPLFVYKLEQVSEKGKAYTNYFGRCNVAEHEKLILLAQLKPEKDSDEAVTYSLGKFGQRALDFYSIHVTKESTHPVKPLAQIAGNRYASTPVGKALSDACMGTIASFLSKYQDIIIEHQKVVKGNQKRLESLRELAGKENLEYPSVTLPPQPHTKEGVDAYNEVIARVRMWVNLNLWQKLKLSRDDAKPLLRLKGFPSFPLVERQANEVDWWDMVCNVKKLINEKKEDGKVFWQNLAGYKRQEALRPYLSSEEDRKKGKKFARYQLGDLLLHLEKKHGEDWGKVYDEAWERIDKKVEGLSKHIKLEEERRSEDAQSKAALTDWLRAKASFVIEGLKEADDKDEFCRCELKLQKWYGDLRGKPFAIEAENSILDISGFSKQYNCAFIWQKDGVKKLNLYLIINYFKGGKLRFKKIKPEAFEANRFYTVINKKSGEIVPMEVNFNFDDPNLIILPLAFGKRQGREFIWNDLLSLETGSLKLANGRVIEKTLYNRRTRQDEPALFVALTFERREVLDSSNIKPMNLIGVDRGENIPAVIALTDPEGCPLSRFKDSLGNPTHILRIGESYKEKQRTIQAKKEVEQRRAGGYSRKYASKAKNLADDMVRNTARDLLYYAVTQDAMLIFENLSRGFGRQGKRTFMAERQYTRMEDWLTAKLAYEGLPSKTYLSKTLAQYTSKTCSNCGFTITSADYDRVLEKLKKTATGWMTTINGKELKVEGQITYYNRYKRQNVVKDLSVELDRLSEESVNNDISSWTKGRSGEALSLLKKRFSHRPVQEKFVCLNCGFETHADEQAALNIARSWLFLRSQEYKKYQTNKTTGNTDKRAFVETWQSFYRKKLKEVWKPAV

SEQ ID NO: 41222 - protein, 980 aa, synthetic construct
  REGION 1..980: note = engineered CasX variant
QEIGKRINKIRRRLVKDSNTKKAGKTGPMKTLLVRVMTPDLRERLENLRKKPENIPQPISNTSRANLNKLLTDYTEMKKAILHVYWEEFQKDPVGLMSRVAQPASKKIDQNKLKPEMDEKGNLTTAGFACSQCGQPLFVYKLEQVSEKGKAYTNYFGRCNVAEHEKLILLAQLKPEKDSDEAVTYSLGKFGQRALDFYSIHVTKESTHPVKPLAQIAGNRYASAPVGKALSDACMGTIASFLSKYQDIIIEHQKVVKGNQKRLESLRELAGKENLEYPSVTLPPQPHTKEGVDAYNEVIARVRMWVNLNLWQKLKLSRDDAKPLLRLKGFPSFPLVERQANEVDWWDMVCNVKKLINEKKEDGKVFWQNLAGYKRQEALRPYLSSEEDRKKGKKFARYQLGDLLLHLEKKHGEDWGKVYDEAWERIDKKVEGLSKHIKLEEERRSEDAQSKAALTDWLRAKASFVIEGLKEADDKDEFCRCELKLQKWYGDLRGKPFAIEAENSILDISGFSKQYNCAFIWQKDGVKKLNLYLIINYFKGGKLRFKKIKPEAFEANRFYTVINKKSGEIVPMEVNFNFDDPNLIILPLAFGKRQGREFIWNDLLSLETGSLKLANGRVIEKTLYNRRTRQDEPALFVALTFERREVLDSSNIKPMNLIGVDRGENIPAVIALTDPEGCPLSRFKDSLGNPTHILRIGESYKEKQRTIQAKKEVEQRRAGGYSRKYASKAKNLADDMVRNTARDLLYYAVTQDAMLIFENLSRGFGRQGKRTFMAERQYTRMEDWLTAKLAYEGLPSKTYLSKTLAQYTSKTCSNCGFTITSADYDRVLEKLKKTATGWMTTINGKELKVEGQITYYNRYKRQNVVKDLSVELDRLSEESVNNDISSWTKGRSGEALSLLKKRFSHRPVQEKFVCLNCGFETHADEQAALNIARSWLFLRSQEYKKYQTNKTTGNTDKRAFVETWQSFYRKKLKEVWKPAV

SEQ ID NO: 41223 - protein, 980 aa, synthetic construct
  REGION 1..980: note = engineered CasX variant
QEIGKRINKIRRRLVKDSNTKKAGKTGPMKTLLVRVMTPDLRERLENLRKKPENIPQPISNTSRANLNKLLTDYTEMKKAILHVYWEEFQKDPVGLMSRVAQPASKKIDQNKLKPEMDEKGNLTTAGFACSQCGQPLFVYKLEQVSEKGKAYTNYFGRCNVAEHEKLILLAQLKPEKDSDEAVTYSLGKFGQRALDFYSIHVTKESTHPVKPLAQIAGNRYASVPVGKALSDACMGTIASFLSKYQDIIIEHQKVVKGNQKRLESLRELAGKENLEYPSVTLPPQPHTKEGVDAYNEVIARVRMWVNLNLWQKLKLSRDDAKPLLRLKGFPSFPLVERQANEVDWWDMVCNVKKLINEKKEDGKVFWQNLAGYKRQEALRPYLSSEEDRKKGKKFARYQLGDLLLHLEKKHGEDWGKVYDEAWERIDKKVEGLSKHIKLEEERRSEDAQSKAALTDWLRAKASFVIEGLKEADDKDEFCRCELKLQKWYGDLRGKPFAIEAENSILDISGFSKQYNCAFIWQKDGVKKLNLYLIINYFKGGKLRFKKIKPEAFEANRFYTVINKKSGEIVPMEVNFNFDDPNLIILPLAFGKRQGREFIWNDLLSLETGSLKLANGRVIEKTLYNRRTRQDEPALFVALTFERREVLDSSNIKPMNLIGVDRGENIPAVIALTDPEGCPLSRFKDSLGNPTHILRIGESYKEKQRTIQAKKEVEQRRAGGYSRKYASKAKNLADDMVRNTARDLLYYAVTQDAMLIFENLSRGFGRQGKRTFMAERQYTRMEDWLTAKLAYEGLPSKTYLSKTLAQYTSKTCSNCGFTITSADYDRVLEKLKKTATGWMTTINGKELKVEGQITYYNRYKRQNVVKDLSVELDRLSEESVNNDISSWTKGRSGEALSLLKKRFSHRPVQEKFVCLNCGFETHADEQAALNIARSWLFLRSQEYKKYQTNKTTGNTDKRAFVETWQSFYRKKLKEVWKPAV

SEQ ID NO: 41224 - protein, 980 aa, synthetic construct
  REGION 1..980: note = engineered CasX variant
QEIGKRINKIRRRLVKDSNTKKAGKTGPMKTLLVRVMTPDLRERLENLRKKPENIPQPISNTSRANLNKLLTDYTEMKKAILHVYWEEFQKDPVGLMSRVAQPASKKIDQNKLKPEMDEKGNLTTAGFACSQCGQPLFVYKLEQVSEKGKAYTNYFGRCNVAEHEKLIKLAQLKPEKDSDEAVTYSLGKFGQRALDFYSIHVTKESTHPVKPLAQIAGNRYASGPVGKALSDACMGTIASFLSKYQDIIIEHQKVVKGNQKRLESLRELAGKENLEYPSVTLPPQPHTKEGVDAYNEVIARVRMWVNLNLWQKLKLSRDDAKPLLRLKGFPSFPLVERQANEVDWWDMVCNVKKLINEKKEDGKVFWQNLAGYKRQEALRPYLSSEEDRKKGKKFARYQLGDLLLHLEKKHGEDWGKVYDEAWERIDKKVEGLSKHIKLEEERRSEDAQSKAALTDWLRAKASFVIEGLKEADDKDEFCRCELKLQKWYGDLRGKPFAIEAENSILDISGFSKQYNCAFIWQKDGVKKLNLYLIINYFKGGKLRFKKIKPEAFEANRFYTVINKKSGEIVPMEVNFNFDDPNLIILPLAFGKRQGREFIWNDLLSLETGSLKLANGRVIEKTLYNRRTRQDEPALFVALTFERREVLDSSNIKPMNLIGVDRGENIPAVIALTDPEGCPLSRFKDSLGNPTHILRIGESYKEKQRTIQAKKEVEQRRAGGYSRKYASKAKNLADDMVRNTARDLLYYAVTQDAMLIFENLSRGFGRQGKRTFMAERQYTRMEDWLTAKLAYEGLPSKTYLSKTLAQYTSKTCSNCGFTITSADYDRVLEKLKKTATGWMTTINGKELKVEGQITYYNRYKRQNVVKDLSVELDRLSEESVNNDISSWTKGRSGEALSLLKKRFSHRPVQEKFVCLNCGFETHADEQAALNIARSWLFLRSQEYKKYQTNKTTGNTDKRAFVETWQSFYRKKLKEVWKPAV

SEQ ID NO: 41225 - protein, 979 aa, synthetic construct
  REGION 1..979: note = engineered CasX variant
QEIGKRINKIRRRLVKDSNTKKAGKTGPMKTLLVRVMTPDLRERLENLRKKPENIPQPISNTSRANLNKLLTDYTEMKKAILHVYWEEFQKDPVGLMSRVAQPASKKIDQNKLKPEMDEKGNLTTAGFACSQCGQPLFVYKLEQVSEKGKAYTNYFGRCNVAEHEKLILLAQLKPEKDSDEAVTYSLGKFGQRALDFYSIHVTKESTHPVKPLAQIAGNRYASPVGKALSDACMGTIASFLSKYQDIIIEHQKVVKGNQKRLESLRELAGKENLEYPSVTLPPQPHTKEGVDAYNEVIARVRMWVNLNLWQKLKLSRDDAKPLLRLKGFPSFPLVERQANEVDWWDMVCNVKKLINEKKEDGKVFWQNLAGYKRQEALRPYLSSEEDRKKGKKFARYQLGDLLLHLEKKHGEDWGKVYDEAWERIDKKVEGLSKHIKLEEERRSEDAQSKAALTDWLRAKASFVIEGLKEADDKDEFCRCELKLQKWYGDLRGKPFAIEAENSILDISGFSKQYNCAFIWQKDGVKKLNLYLIINYFKGGKLRFKKIKPEAFEANRFYTVINKKSGEIVPMEVNFNFDDPNLIILPLAFGKRQGREFIWNDLLSLETGSLKLANGRVIEKTLYNRRTRQDEPALFVALTFERREVLDSSNIKPMNLIGVDRGENIPAVIALTDPEGCPLSRFKDSLGNPTHILRIGESYKEKQRTIQAKKEVEQRRAGGYSRKYASKAKNLADDMVRNTARDLLYYAVTQDAMLIFENLSRGFGRQGKRTFMAERQYTRMEDWLTAKLAYEGLPSKTYLSKTLAQYTSKTCSNCGFTITSADYDRVLEKLKKTATGWMTTINGKELKVEGQITYYNRYKRQNVVKDLSVELDRLSEESVNNDISSWTKGRSGEALSLLKKRFSHRPVQEKFVCLNCGFETHADEQAALNIARSWLFLRSQEYKKYQTNKTTGNTDKRAFVETWQSFYRKKLKEVWKPAV

SEQ ID NO: 41226 - protein, 980 aa, synthetic construct
  REGION 1..980: note = engineered CasX variant
QEIGKRINKIRRRLVKDSNTKKAGKTGPMKTLLVRVMTPDLRERLENLRKKPENIPQPISNTSRANLNKLLTDYTEMKKAILHVYWEEFQKDPVGLMSRVAQPASKKIDQNKLKPEMDEKGNLTTAGFACSQCGQPLFVYKLEQVSEKGKAYTNYFGRCNVAEHEKLILLAQLKPEKDSDEAVTYSLGKFGQRALDFYSIHVTKESTHPVKPLAQIAGNRYASYPVGKALSDACMGTIASFLSKYQDIIIEHQKVVKGNQKRLESLRELAGKENLEYPSVTLPPQPHTKEGVDAYNEVIARVRMWVNLNLWQKLKLSRDDAKPLLRLKGFPSFPLVERQANEVDWWDMVCNVKKLINEKKEDGKVFWQNLAGYKRQEALRPYLSSEEDRKKGKKFARYQLGDLLLHLEKKHGEDWGKVYDEAWERIDKKVEGLSKHIKLEEERRSEDAQSKAALTDWLRAKASFVIEGLKEADKDEFCRCELKLQKWYGDLRGKPFAIEAENSILDISGFSKQYNCAFIWQKDGVKKLNLYLIINYFKGGKLRFKKIKPEAFEANRFYTVINKKSGEIVPMEVNFNFDDPNLIILPLAFGKRQGREFIWNDLLSLETGSLKLANGRVIEKTLYNRRTRQDEPALFVALTFERREVLDSSNIKPMNLIGVDRGENIPAVIALTDPEGCPLSRFKDSLGNPTHILRIGESYKEKQRTIQAKKEVEQRRAGGYSRKYASKAKNLADDMVRNTARDLLYYAVTQDAMLIFENLSRGFGRQGKRTFMAERQYTRMEDWLTAKLAYEGLPSKTYLSKTLAQYTSKTCSNCGFTITSADYDRVLEKLKKTATGWMTTINGKELKVEGQITYYNRYKRQNVVKDLSVELDRLSEESVNNDISSWTKGRSGNEALSLLKKRFSHRPVQEKFVCLNCGFETHADEQAALNIARSWLFLRSQEYKKYQTNKTTGNTDKRAFVETWQSFYRKKLKEVWKPAV

SEQ ID NO: 41227 - protein, 980 aa, synthetic construct
  REGION 1..980: note = engineered CasX variant
QEIGKRINKIRRRLVKDSNTKKAGKTGPMKTLLVRVMTPDLRERLENLRKKPENIPQPISNTSRANLNKLLTDYTEMKKAILHVYWEEFQKDPVGLMSRVAQPASKKIDQNKLKPEMDEKGNLTTAGFACSQCGQPLFVYKLEQVSEKGKAYTNYFGRCNVAEHEKLILLAQLKPEKDSDEAVTYSLGKFGQRALDFYSIHVTKESTHPVKPLAQIAGNRYASHPVGKALSDACMGTIASFLSKYQDIIIEHQKVVKGNQKRLESLRELAGKENLEYPSVTLPPQPHTKEGVDAYNEVIARVRMWVNLNLWQKLKLSRDDAKPLLRLKGFPSFPLVERQANEVDWWDMVCNVKKLINEKKEDGKVFWQNLAGYKRQEALRPYLSSEEDRKKGKKFARYQLGDLLLHLEKKHGEDWGKVYDEAWERIDKKVEGLSKHIKLEEERRSEDAQSKAALTDWLRAKASFVIEGLKEADKDEFCRCELKLQKWYGDLRGKPFAIEAENSILDISGFSKQYNCAFIWQKDGVKKLNLYLIINYFKGGKLRFKKIKPEAFEANRFYTVINKKSGEIVPMEVNFNFDDPNLIILPLAFGKRQGREFIWNDLLSLETGSLKLANGRVIEKTLYNRRTRQDEPALFVALTFERREVLDSSNIKPMNLIGVDRGENIPAVIALTDPEGCPLSRFKDSLGNPTHILRIGESYKEKQRTIQAKKEVEQRRAGGYSRKYASKAKNLADDMVRNTARDLLYYAVTQDAMLIFENLSRGFGRQGKRTFMAERQYTRMEDWLTAKLAYEGLPSKTYLSKTLAQYTSKTCSNCGFTITSADYDRVLEKLKKTATGWMTTINGKELKVEGQITYYNRYKRQNVVKDLSVELDRLSEESVNNDISSWTKGRSGNEALSLLKKRFSHRPVQEKFVCLNCGFETHADEQAALNIARSWLFLRSQEYKKYQTNKTTGNTDKRAFVETWQSFYRKKLKEVWKPAV

SEQ ID NO: 41228 - protein, 980 aa, synthetic construct
  REGION 1..980: note = engineered CasX variant
QEIGKRINKIRRRLVKDSNTKKAGKTGPMKTLLVRVMTPDLRERLENLRKKPENIPQPISNTSRANLNKLLTDYTEMKKAILHVYWEEFQKDPVGLMSRVAQPASKKIDQNKLKPEMDEKGNLTTAGFACSQCGQPLFVYKLEQVSEKGKAYTNYFGRCNVAEHEKLILLAQLKPEKDSDEAVTYSLGKFGQRALDFYSIHVTKESTHPVKPLAQIAGNRYASSPVGKALSDACMGTIASFLSKYQDIIIEHQKVVKGNQKRLESLRELAGKENLEYPSVTLPPQPHTKEGVDAYNEVIARVRMWVNLNLWQKLKLSRDDAKPLLRLKGFPSFPLVERQANEVDWWDMVCNVKKLINEKKEDGKVFWQNLAGYKRQEALRPYLSSEEDRKKGKKFARYQLGDLLLHLEKKHGEDWGKVYDEAWERIDKKVEGLSKHIKLEEERRSEDAQSKAALTDWLRAKASFVIEGLKEADKDEFCRCELKLQKWYGDLRGKPFAIEAENSILDISGFSKQYNCAFIWQKDGVKKLNLYLIINYFKGGKLRFKKIKPEAFEANRFYTVINKKSGEIVPMEVNFNFDDPNLIILPLAFGKRQGREFIWNDLLSLETGSLKLANGRVIEKTLYNRRTRQDEPALFVALTFERREVLDSSNIKPMNLIGVDRGENIPAVIALTDPEGCPLSRFKDSLGNPTHILRIGESYKEKQRTIQAKKEVEQRRAGGYSRKYASKAKNLADDMVRNTARDLLYYAVTQDAMLIFENLSRGFGRQGKRTFMAERQYTRMEDWLTAKLAYEGLPSKTYLSKTLAQYTSKTCSNCGFTITSADYDRVLEKLKKTATGWMTTINGKELKVEGQITYYNRYKRQNVVKDLSVELDRLSEESVNNDISSWTKGRSGNEALSLLKKRFSHRPVQEKFVCLNCGFETHADEQAALNIARSWLFLRSQEYKKYQTNKTTGNTDKRAFVETWQSFYRKKLKEVWKPAV

SEQ ID NO: 41229 - protein, 980 aa, synthetic construct
  REGION 1..980: note = engineered CasX variant
QEIGKRINKIRRRLVKDSNTKKAGKTGPMKTLLVRVMTPDLRERLENLRKKPENIPQPISNTSRANLNKLLTDYTEMKKAILHVYWEEFQKDPVGLMSRVAQPASKKIDQNKLKPEMDEKGNLTTAGFACSQCGQPLFVYKLEQVSEKGKAYTNYFGRCNVAEHEKLILLAQLKPEKDSDEAVTYSLGKFGQRALDFYSIHVTKESTHPVKPLAQIAGNRYASTPVGKALSDACMGTIASFLSKYQDIIIEHQKVVKGNQKRLESLRELAGKENLEYPSVTLPPQPHTKEGVDAYNEVIARVRMWVNLNLWQKLKLSRDDAKPLLRLKGFPSFPLVERQANEVDWWDMVCNVKKLINEKKEDGKVFWQNLAGYKRQEALRPYLSSEEDRKKGKKFARYQLGDLLLHLEKKHGEDWGKVYDEAWERIDKKVEGLSKHIKLEEERRSEDAQSKAALTDWLRAKASFVIEGLKEADKDEFCRCELKLQKWYGDLRGKPFAIEAENSILDISGFSKQYNCAFIWQKDGVKKLNLYLIINYFKGGKLRFKKIKPEAFEANRFYTVINKKSGEIVPMEVNFNFDDPNLIILPLAFGKRQGREFIWNDLLSLETGSLKLANGRVIEKTLYNRRTRQDEPALFVALTFERREVLDSSNIKPMNLIGVDRGENIPAVIALTDPEGCPLSRFKDSLGNPTHILRIGESYKEKQRTIQAKKEVEQRRAGGYSRKYASKAKNLADDMVRNTARDLLYYAVTQDAMLIFENLSRGFGRQGKRTFMAERQYTRMEDWLTAKLAYEGLPSKTYLSKTLAQYTSKTCSNCGFTITSADYDRVLEKLKKTATGWMTTINGKELKVEGQITYYNRYKRQNVVKDLSVELDRLSEESVNNDISSWTKGRSGNEALSLLKKRFSHRPVQEKFVCLNCGFETHADEQAALNIARSWLFLRSQEYKKYQTNKTTGNTDKRAFVETWQSFYRKKLKEVWKPAV

SEQ ID NO: 41230 - protein, 980 aa, synthetic construct
  REGION 1..980: note = engineered CasX variant
QEIGKRINKIRRRLVKDSNTKKAGKTGPMKTLLVRVMTPDLRERLENLRKKPENIPQPISNTSRANLNKLLTDYTEMKKAILHVYWEEFQKDPVGLMSRVAQPASKKIDQNKLKPEMDEKGNLTTAGFACSQCGQPLFVYKLEQVSEKGKAYTNYFGRCNVAEHEKLILLAQLKPEKDSDEAVTYSLGKFGQRALDFYSIHVTKESTHPVKPLAQIAGNRYASAPVGKALSDACMGTIASFLSKYQDIIIEHQKVVKGNQKRLESLRELAGKENLEYPSVTLPPQPHTKEGVDAYNEVIARVRMWVNLNLWQKLKLSRDDAKPLLRLKGFPSFPLVERQANEVDWWDMVCNVKKLINEKKEDGKVFWQNLAGYKRQEALRPYLSSEEDRKKGKKFARYQLGDLLLHLEKKHGEDWGKVYDEAWERIDKKVEGLSKHIKLEEERRSEDAQSKAALTDWLRAKASFVIEGLKEADKDEFCRCELKLQKWYGDLRGKPFAIEAENSILDISGFSKQYNCAFIWQKDGVKKLNLYLIINYFKGGKLRFKKIKPEAFEANRFYTVINKKSGEIVPMEVNFNFDDPNLIILPLAFGKRQGREFIWNDLLSLETGSLKLANGRVIEKTLYNRRTRQDEPALFVALTFERREVLDSSNIKPMNLIGVDRGENIPAVIALTDPEGCPLSRFKDSLGNPTHILRIGESYKEKQRTIQAKKEVEQRRAGGYSRKYASKAKNLADDMVRNTARDLLYYAVTQDAMLIFENLSRGFGRQGKRTFMAERQYTRMEDWLTAKLAYEGLPSKTYLSKTLAQYTSKTCSNCGFTITSADYDRVLEKLKKTATGWMTTINGKELKVEGQITYYNRYKRQNVVKDLSVELDRLSEESVNNDISSWTKGRSGNEALSLLKKRFSHRPVQEKFVCLNCGFETHADEQAALNIARSWLFLRSQEYKKYQTNKTTGNTDKRAFVETWQSFYRKKLKEVWKPAV

SEQ ID NO: 41231 - protein, 980 aa, synthetic construct
  REGION 1..980: note = engineered CasX variant
QEIGKRINKIRRRLVKDSNTKKAGKTGPMKTLLVRVMTPDLRERLENLRKKPENIPQPISNTSRANLNKLLTDYTEMKKAILHVYWEEFQKDPVGLMSRVAQPASKKIDQNKLKPEMDEKGNLTTAGFACSQCGQPLFVYKLEQVSEKGKAYTNYFGRCNVAEHEKLILLAQLKPEKDSDEAVTYSLGKFGQRALDFYSIHVTKESTHPVKPLAQIAGNRYASVPVGKALSDACMGTIASFLSKYQDIIIEHQKVVKGNQKRLESLRELAGKENLEYPSVTLPPQPHTKEGVDAYNEVIARVRMWVNLNLWQKLKLSRDDAKPLLRLKGFPSFPLVERQANEVDWWDMVCNVKKLINEKKEDGKVFWQNLAGYKRQEALRPYLSSEEDRKKGKKFARYQLGDLLLHLEKKHGEDWGKVYDEAWERIDKKVEGLSKHIKLEEERRSEDAQSKAALTDWLRAKASFVIEGLKEADKDEFCRCELKLQKWYGDLRGKPFAIEAENSILDISGFSKQYNCAFIWQKDGVKKLNLYLIINYFKGGKLRFKKIKPEAFEANRFYTVINKKSGEIVPMEVNFNFDDPNLIILPLAFGKRQGREFIWNDLLSLETGSLKLANGRVIEKTLYNRRTRQDEPALFVALTFERREVLDSSNIKPMNLIGVDRGENIPAVIALTDPEGCPLSRFKDSLGNPTHILRIGESYKEKQRTIQAKKEVEQRRAGGYSRKYASKAKNLADDMVRNTARDLLYYAVTQDAMLIFENLSRGFGRQGKRTFMAERQYTRMEDWLTAKLAYEGLPSKTYLSKTLAQYTSKTCSNCGFTITSADYDRVLEKLKKTATGWMTTINGKELKVEGQITYYNRYKRQNVVKDLSVELDRLSEESVNNDISSWTKGRSGNEALSLLKKRFSHRPVQEKFVCLNCGFETHADEQAALNIARSWLFLRSQEYKKYQTNKTTGNTDKRAFVETWQSFYRKKLKEVWKPAV

SEQ ID NO: 41232 - protein, 980 aa, synthetic construct
  REGION 1..980: note = engineered CasX variant
QEIGKRINKIRRRLVKDSNTKKAGKTGPMKTLLVRVMTPDLRERLENLRKKPENIPQPISNTSRANLNKLLTDYTEMKKAILHVYWEEFQKDPVGLMSRVAQPASKKIDQNKLKPEMDEKGNLTTAGFACSQCGQPLFVYKLEQVSEKGKAYTNYFGRCNVAEHEKLIKLAQLKPEKDSDEAVTYSLGKFGQRALDFYSIHVTKESTHPVKPLAQIAGNRYASGPVGKALSDACMGTIASFLSKYQDIIIEHQKVVKGNQKRLESLRELAGKENLEYPSVTLPPQPHTKEGVDAYNEVIARVRMWVNLNLWQKLKLSRDDAKPLLRLKGFPSFPLVERQANEVDWWDMVCNVKKLINEKKEDGKVFWQNLAGYKRQEALRPYLSSEEDRKKGKKFARYQLGDLLLHLEKKHGEDWGKVYDEAWERIDKKVEGLSKHIKLEEERRSEDAQSKAALTDWLRAKASFVIEGLKEADKDEFCRCELKLQKWYGDLRGKPFAIEAENSILDISGFSKQYNCAFIWQKDGVKKLNLYLIINYFKGGKLRFKKIKPEAFEANRFYTVINKKSGEIVPMEVNFNFDDPNLIILPLAFGKRQGREFIWNDLLSLETGSLKLANGRVIEKTLYNRRTRQDEPALFVALTFERREVLDSSNIKPMNLIGVDRGENIPAVIALTDPEGCPLSRFKDSLGNPTHILRIGESYKEKQRTIQAKKEVEQRRAGGYSRKYASKAKNLADDMVRNTARDLLYYAVTQDAMLIFENLSRGFGRQGKRTFMAERQYTRMEDWLTAKLAYEGLPSKTYLSKTLAQYTSKTCSNCGFTITSADYDRVLEKLKKTATGWMTTINGKELKVEGQITYYNRYKRQNVVKDLSVELDRLSEESVNNDISSWTKGRSGNEALSLLKKRFSHRPVQEKFVCLNCGFETHADEQAALNIARSWLFLRSQEYKKYQTNKTTGNTDKRAFVETWQSFYRKKLKEVWKPAV

SEQ ID NO: 41233 - protein, 979 aa, synthetic construct
  REGION 1..979: note = engineered CasX variant
QEIGKRINKIRRRLVKDSNTKKAGKTGPMKTLLVRVMTPDLRERLENLRKKPENIPQPISNTSRANLNKLLTDYTEMKKAILHVYWEEFQKDPVGLMSRVAQPASKKIDQNKLKPEMDEKGNLTTAGFACSQCGQPLFVYKLEQVSEKGKAYTNYFGRCNVAEHEKLILLAQLKPEKDSDEAVTYSLGKFGQRALDFYSIHVTKESTHPVKPLAQIAGNRYASPVGKALSDACMGTIASFLSKYQDIIIEHQKVVKGNQKRLESLRELAGKENLEYPSVTLPPQPHTKEGVDAYNEVIARVRMWVNLNLWQKLKLSRDDAKPLLRLKGFPSFPLVERQANEVDWWDMVCNVKKLINEKKEDGKVFWQNLAGYKRQEALRPYLSSEEDRKKGKKFARYQLGDLLLHLEKKHGEDWGKVYDEAWERIDKKVEGLSKHIKLEEERRSEDAQSKAALTDWLRAKASFVIEGLKEADKDEFCRCELKLQKWYGDLRGKPFAIEAENSILDISGFSKQYNCAFIWQKDGVKKLNLYLIINYFKGGKLRFKKIKPEAFEANRFYTVINKKSGEIVPMEVNFNFDDPNLIILPLAFGKRQGREFIWNDLLSLETGSLKLANGRVIEKTLYNRRTRQDEPALFVALTFERREVLDSSNIKPMNLIGVDRGENIPAVIALTDPEGCPLSRFKDSLGNPTHILRIGESYKEKQRTIQAKKEVEQRRAGGYSRKYASKAKNLADDMVRNTARDLLYYAVTQDAMLIFENLSRGFGRQGKRTFMAERQYTRMEDWLTAKLAYEGLPSKTYLSKTLAQYTSKTCSNCGFTITSADYDRVLEKLKKTATGWMTTINGKELKVEGQITYYNRYKRQNVVKDLSVELDRLSEESVNNDISSWTKGRSGNEALSLLKKRFSHRPVQEKFVCLNCGFETHADEQAALNIARSWLFLRSQEYKKYQTNKTTGNTDKRAFVETWQSFYRKKLKEVWKPAV

SEQ ID NO: 41234 - protein, 979 aa, synthetic construct
  REGION 1..979: note = engineered CasX variant
QEIGKRINKIRRRLVKDSNTKKAGKTGPMKTLLVRVMTPDLRERLENLRKKPENIPQPISNTSRANLNKLLTDYTEMKKAILHVYWEEFQKDPVGLMSRVAQPASKKIDQNKLKPEMDEKGNLTTAGFACSQCGQPLFVYKLEQVSEKGKAYTNYFGRCNVAEHEKLILLAQLKPEKDSDEAVTYSLGKFGQRALDFYSIHVTKESTHPVKPLAQIAGNRYASYPVGKALSDACMGTIASFLSKYQDIIIEHQKVVKGNQKRLESLRELAGKENLEYPSVTLPPQPHTKEGVDAYNEVIARVRMWVNLNLWQKLKLSRDDAKPLLRLKGFPSFPLVERQANEVDWWDMVCNVKKLINEKKEDGKVFWQNLAGYKRQEALRPYLSSEEDRQKGKKFARYQLGDLLLHLEKKHGEDWGKVYDEAWERIDKKVEGLSKHIKLEEERRSEDAQSKAALTDWLRAKASFVIEGLKEADKDEFCRCELKLQKWYGDLRGKPFAIEAENSILDISGFSKQYNCAFIWQKDGVKKLNLYLIINYFKGGKLRFKKIKPEAFEANRFYTVINKKSGEIVPMEVNFNFDDPNLIILPLAFGKRQGREFIWNDLLSLETGSLKLANGRVIEKTLYNRRTRQDEPALFVALTFERREVLDSSNIKPMNLIGVDRGENIPAVIALTDPEGCPLSRFKDSLGNPTHILRIGESYKEKQRTIQAKKEVEQRRAGGYSRKYASKAKNLADDMVRNTARDLLYYAVTQDAMLIFENLSRGFGRQGKRTFMAERQYTRMEDWLTAKLAYEGLPSKTYLSKTLAQYTSKTCSNCGFTITSADYDRVLEKLKKTATGWMTTINGKELKVEGQITYYNRYKRQNVVKDLSVELDRLSEESVNNDISSWTKGRSGEALSLLKKRFSHRPVQEKFVCLNCGFETHADEQAALNIARSWLFLRSQEYKKYQTNKTTGNTDKRAFVETWQSFYRKKLKEVWKPAV

SEQ ID NO: 41235 - protein, 979 aa, synthetic construct
  REGION 1..979: note = engineered CasX variant
QEIGKRINKIRRRLVKDSNTKKAGKTGPMKTLLVRVMTPDLRERLENLRKKPENIPQPISNTSRANLNKLLTDYTEMKKAILHVYWEEFQKDPVGLMSRVAQPASKKIDQNKLKPEMDEKGNLTTAGFACSQCGQPLFVYKLEQVSEKGKAYTNYFGRCNVAEHEKLILLAQLKPEKDSDEAVTYSLGKFGQRALDFYSIHVTKESTHPVKPLAQIAGNRYASHPVGKALSDACMGTIASFLSKYQDIIIEHQKVVKGNQKRLESLRELAGKENLEYPSVTLPPQPHTKEGVDAYNEVIARVRMWVNLNLWQKLKLSRDDAKPLLRLKGFPSFPLVERQANEVDWWDMVCNVKKLINEKKEDGKVFWQNLAGYKRQEALRPYLSSEEDRQKGKKFARYQLGDLLLHLEKKHGEDWGKVYDEAWERIDKKVEGLSKHIKLEEERRSEDAQSKAALTDWLRAKASFVIEGLKEADKDEFCRCELKLQKWYGDLRGKPFAIEAENSILDISGFSKQYNCAFIWQKDGVKKLNLYLIINYFKGGKLRFKKIKPEAFEANRFYTVINKKSGEIVPMEVNFNFDDPNLIILPLAFGKRQGREFIWNDLLSLETGSLKLANGRVIEKTLYNRRTRQDEPALFVALTFERREVLDSSNIKPMNLIGVDRGENIPAVIALTDPEGCPLSRFKDSLGNPTHILRIGESYKEKQRTIQAKKEVEQRRAGGYSRKYASKAKNLADDMVRNTARDLLYYAVTQDAMLIFENLSRGFGRQGKRTFMAERQYTRMEDWLTAKLAYEGLPSKTYLSKTLAQYTSKTCSNCGFTITSADYDRVLEKLKKTATGWMTTINGKELKVEGQITYYNRYKRQNVVKDLSVELDRLSEESVNNDISSWTKGRSGEALSLLKKRFSHRPVQEKFVCLNCGFETHADEQAALNIARSWLFLRSQEYKKYQTNKTTGNTDKRAFVETWQSFYRKKLKEVWKPAV

SEQ ID NO: 41236 - protein, 979 aa, synthetic construct
  REGION 1..979: note = engineered CasX variant
QEIGKRINKIRRRLVKDSNTKKAGKTGPMKTLLVRVMTPDLRERLENLRKKPENIPQPISNTSRANLNKLLTDYTEMKKAILHVYWEEFQKDPVGLMSRVAQPASKKIDQNKLKPEMDEKGNLTTAGFACSQCGQPLFVYKLEQVSEKGKAYTNYFGRCNVAEHEKLILLAQLKPEKDSDEAVTYSLGKFGQRALDFYSIHVTKESTHPVKPLAQIAGNRYASSPVGKALSDACMGTIASFLSKYQDIIIEHQKVVKGNQKRLESLRELAGKENLEYPSVTLPPQPHTKEGVDAYNEVIARVRMWVNLNLWQKLKLSRDDAKPLLRLKGFPSFPLVERQANEVDWWDMVCNVKKLINEKKEDGKVFWQNLAGYKRQEALRPYLSSEEDRQKGKKFARYQLGDLLLHLEKKHGEDWGKVYDEAWERIDKKVEGLSKHIKLEEERRSEDAQSKAALTDWLRAKASFVIEGLKEADKDEFCRCELKLQKWYGDLRGKPFAIEAENSILDISGFSKQYNCAFIWQKDGVKKLNLYLIINYFKGGKLRFKKIKPEAFEANRFYTVINKKSGEIVPMEVNFNFDDPNLIILPLAFGKRQGREFIWNDLLSLETGSLKLANGRVIEKTLYNRRTRQDEPALFVALTFERREVLDSSNIKPMNLIGVDRGENIPAVIALTDPEGCPLSRFKDSLGNPTHILRIGESYKEKQRTIQAKKEVEQRRAGGYSRKYASKAKNLADDMVRNTARDLLYYAVTQDAMLIFENLSRGFGRQGKRTFMAERQYTRMEDWLTAKLAYEGLPSKTYLSKTLAQYTSKTCSNCGFTITSADYDRVLEKLKKTATGWMTTINGKELKVEGQITYYNRYKRQNVVKDLSVELDRLSEESVNNDISSWTKGRSGEALSLLKKRFSHRPVQEKFVCLNCGFETHADEQAALNIARSWLFLRSQEYKKYQTNKTTGNTDKRAFVETWQSFYRKKLKEVWKPAV

SEQ ID NO: 41237 - protein, 979 aa, synthetic construct
  REGION 1..979: note = engineered CasX variant
QEIGKRINKIRRRLVKDSNTKKAGKTGPMKTLLVRVMTPDLRERLENLRKKPENIPQPISNTSRANLNKLLTDYTEMKKAILHVYWEEFQKDPVGLMSRVAQPASKKIDQNKLKPEMDEKGNLTTAGFACSQCGQPLFVYKLEQVSEKGKAYTNYFGRCNVAEHEKLILLAQLKPEKDSDEAVTYSLGKFGQRALDFYSIHVTKESTHPVKPLAQIAGNRYASTPVGKALSDACMGTIASFLSKYQDIIIEHQKVVKGNQKRLESLRELAGKENLEYPSVTLPPQPHTKEGVDAYNEVIARVRMWVNLNLWQKLKLSRDDAKPLLRLKGFPSFPLVERQANEVDWWDMVCNVKKLINEKKEDGKVFWQNLAGYKRQEALRPYLSSEEDRQKGKKFARYQLGDLLLHLEKKHGEDWGKVYDEAWERIDKKVEGLSKHIKLEEERRSEDAQSKAALTDWLRAKASFVIEGLKEADKDEFCRCELKLQKWYGDLRGKPFAIEAENSILDISGFSKQYNCAFIWQKDGVKKLNLYLIINYFKGGKLRFKKIKPEAFEANRFYTVINKKSGEIVPMEVNFNFDDPNLIILPLAFGKRQGREFIWNDLLSLETGSLKLANGRVIEKTLYNRRTRQDEPALFVALTFERREVLDSSNIKPMNLIGVDRGENIPAVIALTDPEGCPLSRFKDSLGNPTHILRIGESYKEKQRTIQAKKEVEQRRAGGYSRKYASKAKNLADDMVRNTARDLLYYAVTQDAMLIFENLSRGFGRQGKRTFMAERQYTRMEDWLTAKLAYEGLPSKTYLSKTLAQYTSKTCSNCGFTITSADYDRVLEKLKKTATGWMTTINGKELKVEGQITYYNRYKRQNVVKDLSVELDRLSEESVNNDISSWTKGRSGEALSLLKKRFSHRPVQEKFVCLNCGFETHADEQAALNIARSWLFLRSQEYKKYQTNKTTGNTDKRAFVETWQSFYRKKLKEVWKPAV

SEQ ID NO: 41238 - protein, 979 aa, synthetic construct
  REGION 1..979: note = engineered CasX variant
QEIGKRINKIRRRLVKDSNTKKAGKTGPMKTLLVRVMTPDLRERLENLRKKPENIPQPISNTSRANLNKLLTDYTEMKKAILHVYWEEFQKDPVGLMSRVAQPASKKIDQNKLKPEMDEKGNLTTAGFACSQCGQPLFVYKLEQVSEKGKAYTNYFGRCNVAEHEKLILLAQLKPEKDSDEAVTYSLGKFGQRALDFYSIHVTKESTHPVKPLAQIAGNRYASAPVGKALSDACMGTIASFLSKYQDIIIEHQKVVKGNQKRLESLRELAGKENLEYPSVTLPPQPHTKEGVDAYNEVIARVRMWVNLNLWQKLKLSRDDAKPLLRLKGFPSFPLVERQANEVDWWDMVCNVKKLINEKKEDGKVFWQNLAGYKRQEALRPYLSSEEDRQKGKKFARYQLGDLLLHLEKKHGEDWGKVYDEAWERIDKKVEGLSKHIKLEEERRSEDAQSKAALTDWLRAKASFVIEGLKEADKDEFCRCELKLQKWYGDLRGKPFAIEAENSILDISGFSKQYNCAFIWQKDGVKKLNLYLIINYFKGGKLRFKKIKPEAFEANRFYTVINKKSGEIVPMEVNFNFDDPNLIILPLAFGKRQGREFIWNDLLSLETGSLKLANGRVIEKTLYNRRTRQDEPALFVALTFERREVLDSSNIKPMNLIGVDRGENIPAVIALTDPEGCPLSRFKDSLGNPTHILRIGESYKEKQRTIQAKKEVEQRRAGGYSRKYASKAKNLADDMVRNTARDLLYYAVTQDAMLIFENLSRGFGRQGKRTFMAERQYTRMEDWLTAKLAYEGLPSKTYLSKTLAQYTSKTCSNCGFTITSADYDRVLEKLKKTATGWMTTINGKELKVEGQITYYNRYKRQNVVKDLSVELDRLSEESVNNDISSWTKGRSGEALSLLKKRFSHRPVQEKFVCLNCGFETHADEQAALNIARSWLFLRSQEYKKYQTNKTTGNTDKRAFVETWQSFYRKKLKEVWKPAV

SEQ ID NO: 41239 - protein, 979 aa, synthetic construct
  REGION 1..979: note = engineered CasX variant
QEIGKRINKIRRRLVKDSNTKKAGKTGPMKTLLVRVMTPDLRERLENLRKKPENIPQPISNTSRANLNKLLTDYTEMKKAILHVYWEEFQKDPVGLMSRVAQPASKKIDQNKLKPEMDEKGNLTTAGFACSQCGQPLFVYKLEQVSEKGKAYTNYFGRCNVAEHEKLILLAQLKPEKDSDEAVTYSLGKFGQRALDFYSIHVTKESTHPVKPLAQIAGNRYASVPVGKALSDACMGTIASFLSKYQDIIIEHQKVVKGNQKRLESLRELAGKENLEYPSVTLPPQPHTKEGVDAYNEVIARVRMWVNLNLWQKLKLSRDDAKPLLRLKGFPSFPLVERQANEVDWWDMVCNVKKLINEKKEDGKVFWQNLAGYKRQEALRPYLSSEEDRQKGKKFARYQLGDLLLHLEKKHGEDWGKVYDEAWERIDKKVEGLSKHIKLEEERRSEDAQSKAALTDWLRAKASFVIEGLKEADKDEFCRCELKLQKWYGDLRGKPFAIEAENSILDISGFSKQYNCAFIWQKDGVKKLNLYLIINYFKGGKLRFKKIKPEAFEANRFYTVINKKSGEIVPMEVNFNFDDPNLIILPLAFGKRQGREFIWNDLLSLETGSLKLANGRVIEKTLYNRRTRQDEPALFVALTFERREVLDSSNIKPMNLIGVDRGENIPAVIALTDPEGCPLSRFKDSLGNPTHILRIGESYKEKQRTIQAKKEVEQRRAGGYSRKYASKAKNLADDMVRNTARDLLYYAVTQDAMLIFENLSRGFGRQGKRTFMAERQYTRMEDWLTAKLAYEGLPSKTYLSKTLAQYTSKTCSNCGFTITSADYDRVLEKLKKTATGWMTTINGKELKVEGQITYYNRYKRQNVVKDLSVELDRLSEESVNNDISSWTKGRSGEALSLLKKRFSHRPVQEKFVCLNCGFETHADEQAALNIARSWLFLRSQEYKKYQTNKTTGNTDKRAFVETWQSFYRKKLKEVWKPAV

SEQ ID NO: 41240 - protein, 979 aa, synthetic construct
  REGION 1..979: note = engineered CasX variant
QEIGKRINKIRRRLVKDSNTKKAGKTGPMKTLLVRVMTPDLRERLENLRKKPENIPQPISNTSRANLNKLLTDYTEMKKAILHVYWEEFQKDPVGLMSRVAQPASKKIDQNKLKPEMDEKGNLTTAGFACSQCGQPLFVYKLEQVSEKGKAYTNYFGRCNVAEHEKLIKLAQLKPEKDSDEAVTYSLGKFGQRALDFYSIHVTKESTHPVKPLAQIAGNRYASGPVGKALSDACMGTIASFLSKYQDIIIEHQKVVKGNQKRLESLRELAGKENLEYPSVTLPPQPHTKEGVDAYNEVIARVRMWVNLNLWQKLKLSRDDAKPLLRLKGFPSFPLVERQANEVDWWDMVCNVKKLINEKKEDGKVFWQNLAGYKRQEALRPYLSSEEDRQKGKKFARYQLGDLLLHLEKKHGEDWGKVYDEAWERIDKKVEGLSKHIKLEEERRSEDAQSKAALTDWLRAKASFVIEGLKEADKDEFCRCELKLQKWYGDLRGKPFAIEAENSILDISGFSKQYNCAFIWQKDGVKKLNLYLIINYFKGGKLRFKKIKPEAFEANRFYTVINKKSGEIVPMEVNFNFDDPNLIILPLAFGKRQGREFIWNDLLSLETGSLKLANGRVIEKTLYNRRTRQDEPALFVALTFERREVLDSSNIKPMNLIGVDRGENIPAVIALTDPEGCPLSRFKDSLGNPTHILRIGESYKEKQRTIQAKKEVEQRRAGGYSRKYASKAKNLADDMVRNTARDLLYYAVTQDAMLIFENLSRGFGRQGKRTFMAERQYTRMEDWLTAKLAYEGLPSKTYLSKTLAQYTSKTCSNCGFTITSADYDRVLEKLKKTATGWMTTINGKELKVEGQITYYNRYKRQNVVKDLSVELDRLSEESVNNDISSWTKGRSGEALSLLKKRFSHRPVQEKFVCLNCGFETHADEQAALNIARSWLFLRSQEYKKYQTNKTTGNTDKRAFVETWQSFYRKKLKEVWKPAV

SEQ ID NO: 41241 - protein, 978 aa, synthetic construct
  REGION 1..978: note = engineered CasX variant
QEIGKRINKIRRRLVKDSNTKKAGKTGPMKTLLVRVMTPDLRERLENLRKKPENIPQPISNTSRANLNKLLTDYTEMKKAILHVYWEEFQKDPVGLMSRVAQPASKKIDQNKLKPEMDEKGNLTTAGFACSQCGQPLFVYKLEQVSEKGKAYTNYFGRCNVAEHEKLILLAQLKPEKDSDEAVTYSLGKFGQRALDFYSIHVTKESTHPVKPLAQIAGNRYASPVGKALSDACMGTIASFLSKYQDIIIEHQKVVKGNQKRLESLRELAGKENLEYPSVTLPPQPHTKEGVDAYNEVIARVRMWVNLNLWQKLKLSRDDAKPLLRLKGFPSFPLVERQANEVDWWDMVCNVKKLINEKKEDGKVFWQNLAGYKRQEALRPYLSSEEDRQKGKKFARYQLGDLLLHLEKKHGEDWGKVYDEAWERIDKKVEGLSKHIKLEEERRSEDAQSKAALTDWLRAKASFVIEGLKEADKDEFCRCELKLQKWYGDLRGKPFAIEAENSILDISGFSKQYNCAFIWQKDGVKKLNLYLIINYFKGGKLRFKKIKPEAFEANRFYTVINKKSGEIVPMEVNFNFDDPNLIILPLAFGKRQGREFIWNDLLSLETGSLKLANGRVIEKTLYNRRTRQDEPALFVALTFERREVLDSSNIKPMNLIGVDRGENIPAVIALTDPEGCPLSRFKDSLGNPTHILRIGESYKEKQRTIQAKKEVEQRRAGGYSRKYASKAKNLADDMVRNTARDLLYYAVTQDAMLIFENLSRGFGRQGKRTFMAERQYTRMEDWLTAKLAYEGLPSKTYLSKTLAQYTSKTCSNCGFTITSADYDRVLEKLKKTATGWMTTINGKELKVEGQITYYNRYKRQNVVKDLSVELDRLSEESVNNDISSWTKGRSGEALSLLKKRFSHRPVQEKFVCLNCGFETHADEQAALNIARSWLFLRSQEYKKYQTNKTTGNTDKRAFVETWQSFYRKKLKEVWKPAV

SEQ ID NO: 41242 - protein, 979 aa, synthetic construct
  REGION 1..979: note = engineered CasX variant
QEIGKRINKIRRRLVKDSNTKKAGKTGPMKTLLVRVMTPDLRERLENLRKKPENIPQPISNTSRANLNKLLTDYTEMKKAILHVYWEEFQKDPVGLMSRVAQPASKKIDQNKLKPEMDEKGNLTTAGFACSQCGQPLFVYKLEQVSEKGKAYTNYFGRCNVAEHEKLILLAQLKPEKDSDEAVTYSLGKFGQRALDFYSIHVTKESTHPVKPLAQIAGNRYASYPVGKALSDACMGTIASFLSKYQDIIIEHQKVVKGNQKRLESLRELAGKENLEYPSVTLPPQPHTKEGVDAYNEVIARVRMWVNLNLWQKLKLSRDDAKPLLRLKGFPSFPLVERQANEVDWWDMVCNVKKLINEKKEDGKVFWQNLAGYKRQEALRPYLSSEEDRKKGKKFARYQLGDLLLHLEKKHGEDWGKVYDEAWERIDKKVEGLSKHIKLEEERRSEDAQSKAALTDWLRAKASFVIEGLKEADKDEFCRCELKLQKWYGDLRGKPFAIEAENSILDISGFSKQYNCAFIWQKDGVKKLNLYLIINYFKGGKLRFKKIKPEAFEANRFYTVINKKSGEIVPMEVNFNFDDPNLIILPLAFGKRQGREFIWNDLLSLETGSLKLANGRVIEKTLYNRRTRQDEPALFVALTFERREVLDSSNIKPMNLIGVDRGENIPAVIALTDPEGCPLSRFKDSLGNPTHILRIGESYKEKQRTIQAKKEVEQRRAGGYSRKYASKAKNLADDMVRNTARDLLYYAVTQDAMLIFENLSRGFGRQGKRTFMAERQYTRMEDWLTAKLAYEGLPSQTYLSKTLAQYTSKTCSNCGFTITSADYDRVLEKLKKTATGWMTTINGKELKVEGQITYYNRYKRQNVVKDLSVELDRLSEESVNNDISSWTKGRSGEALSLLKKRFSHRPVQEKFVCLNCGFETHADEQAALNIARSWLFLRSQEYKKYQTNKTTGNTDKRAFVETWQSFYRKKLKEVWKPAV

SEQ ID NO: 41243 - protein, 979 aa, synthetic construct
  REGION 1..979: note = engineered CasX variant
QEIGKRINKIRRRLVKDSNTKKAGKTGPMKTLLVRVMTPDLRERLENLRKKPENIPQPISNTSRANLNKLLTDYTEMKKAILHVYWEEFQKDPVGLMSRVAQPASKKIDQNKLKPEMDEKGNLTTAGFACSQCGQPLFVYKLEQVSEKGKAYTNYFGRCNVAEHEKLILLAQLKPEKDSDEAVTYSLGKFGQRALDFYSIHVTKESTHPVKPLAQIAGNRYASHPVGKALSDACMGTIASFLSKYQDIIIEHQKVVKGNQKRLESLRELAGKENLEYPSVTLPPQPHTKEGVDAYNEVIARVRMWVNLNLWQKLKLSRDDAKPLLRLKGFPSFPLVERQANEVDWWDMVCNVKKLINEKKEDGKVFWQNLAGYKRQEALRPYLSSEEDRKKGKKFARYQLGDLLLHLEKKHGEDWGKVYDEAWERIDKKVEGLSKHIKLEEERRSEDAQSKAALTDWLRAKASFVIEGLKEADKDEFCRCELKLQKWYGDLRGKPFAIEAENSILDISGFSKQYNCAFIWQKDGVKKLNLYLIINYFKGGKLRFKKIKPEAFEANRFYTVINKKSGEIVPMEVNFNFDDPNLIILPLAFGKRQGREFIWNDLLSLETGSLKLANGRVIEKTLYNRRTRQDEPALFVALTFERREVLDSSNIKPMNLIGVDRGENIPAVIALTDPEGCPLSRFKDSLGNPTHILRIGESYKEKQRTIQAKKEVEQRRAGGYSRKYASKAKNLADDMVRNTARDLLYYAVTQDAMLIFENLSRGFGRQGKRTFMAERQYTRMEDWLTAKLAYEGLPSQTYLSKTLAQYTSKTCSNCGFTITSADYDRVLEKLKKTATGWMTTINGKELKVEGQITYYNRYKRQNVVKDLSVELDRLSEESVNNDISSWTKGRSGEALSLLKKRFSHRPVQEKFVCLNCGFETHADEQAALNIARSWLFLRSQEYKKYQTNKTTGNTDKRAFVETWQSFYRKKLKEVWKPAV

SEQ ID NO: 41244 - protein, 979 aa, synthetic construct
  REGION 1..979: note = engineered CasX variant
QEIGKRINKIRRRLVKDSNTKKAGKTGPMKTLLVRVMTPDLRERLENLRKKPENIPQPISNTSRANLNKLLTDYTEMKKAILHVYWEEFQKDPVGLMSRVAQPASKKIDQNKLKPEMDEKGNLTTAGFACSQCGQPLFVYKLEQVSEKGKAYTNYFGRCNVAEHEKLILLAQLKPEKDSDEAVTYSLGKFGQRALDFYSIHVTKESTHPVKPLAQIAGNRYASSPVGKALSDACMGTIASFLSKYQDIIIEHQKVVKGNQKRLESLRELAGKENLEYPSVTLPPQPHTKEGVDAYNEVIARVRMWVNLNLWQKLKLSRDDAKPLLRLKGFPSFPLVERQANEVDWWDMVCNVKKLINEKKEDGKVFWQNLAGYKRQEALRPYLSSEEDRKKGKKFARYQLGDLLLHLEKKHGEDWGKVYDEAWERIDKKVEGLSKHIKLEEERRSEDAQSKAALTDWLRAKASFVIEGLKEADKDEFCRCELKLQKWYGDLRGKPFAIEAENSILDISGFSKQYNCAFIWQKDGVKKLNLYLIINYFKGGKLRFKKIKPEAFEANRFYTVINKKSGEIVPMEVNFNFDDPNLIILPLAFGKRQGREFIWNDLLSLETGSLKLANGRVIEKTLYNRRTRQDEPALFVALTFERREVLDSSNIKPMNLIGVDRGENIPAVIALTDPEGCPLSRFKDSLGNPTHILRIGESYKEKQRTIQAKKEVEQRRAGGYSRKYASKAKNLADDMVRNTARDLLYYAVTQDAMLIFENLSRGFGRQGKRTFMAERQYTRMEDWLTAKLAYEGLPSQTYLSKTLAQYTSKTCSNCGFTITSADYDRVLEKLKKTATGWMTTINGKELKVEGQITYYNRYKRQNVVKDLSVELDRLSEESVNNDISSWTKGRSGEALSLLKKRFSHRPVQEKFVCLNCGFETHADEQAALNIARSWLFLRSQEYKKYQTNKTTGNTDKRAFVETWQSFYRKKLKEVWKPAV

SEQ ID NO: 41245 - protein, 979 aa, synthetic construct
  REGION 1..979: note = engineered CasX variant
QEIGKRINKIRRRLVKDSNTKKAGKTGPMKTLLVRVMTPDLRERLENLRKKPENIPQPISNTSRANLNKLLTDYTEMKKAILHVYWEEFQKDPVGLMSRVAQPASKKIDQNKLKPEMDEKGNLTTAGFACSQCGQPLFVYKLEQVSEKGKAYTNYFGRCNVAEHEKLILLAQLKPEKDSDEAVTYSLGKFGQRALDFYSIHVTKESTHPVKPLAQIAGNRYASTPVGKALSDACMGTIASFLSKYQDIIIEHQKVVKGNQKRLESLRELAGKENLEYPSVTLPPQPHTKEGVDAYNEVIARVRMWVNLNLWQKLKLSRDDAKPLLRLKGFPSFPLVERQANEVDWWDMVCNVKKLINEKKEDGKVFWQNLAGYKRQEALRPYLSSEEDRKKGKKFARYQLGDLLLHLEKKHGEDWGKVYDEAWERIDKKVEGLSKHIKLEEERRSEDAQSKAALTDWLRAKASFVIEGLKEADKDEFCRCELKLQKWYGDLRGKPFAIEAENSILDISGFSKQYNCAFIWQKDGVKKLNLYLIINYFKGGKLRFKKIKPEAFEANRFYTVINKKSGEIVPMEVNFNFDDPNLIILPLAFGKRQGREFIWNDLLSLETGSLKLANGRVIEKTLYNRRTRQDEPALFVALTFERREVLDSSNIKPMNLIGVDRGENIPAVIALTDPEGCPLSRFKDSLGNPTHILRIGESYKEKQRTIQAKKEVEQRRAGGYSRKYASKAKNLADDMVRNTARDLLYYAVTQDAMLIFENLSRGFGRQGKRTFMAERQYTRMEDWLTAKLAYEGLPSQTYLSKTLAQYTSKTCSNCGFTITSADYDRVLEKLKKTATGWMTTINGKELKVEGQITYYNRYKRQNVVKDLSVELDRLSEESVNNDISSWTKGRSGEALSLLKKRFSHRPVQEKFVCLNCGFETHADEQAALNIARSWLFLRSQEYKKYQTNKTTGNTDKRAFVETWQSFYRKKLKEVWKPAV

SEQ ID NO: 41246 - protein, 979 aa, synthetic construct
  REGION 1..979: note = engineered CasX variant
QEIGKRINKIRRRLVKDSNTKKAGKTGPMKTLLVRVMTPDLRERLENLRKKPENIPQPISNTSRANLNKLLTDYTEMKKAILHVYWEEFQKDPVGLMSRVAQPASKKIDQNKLKPEMDEKGNLTTAGFACSQCGQPLFVYKLEQVSEKGKAYTNYFGRCNVAEHEKLILLAQLKPEKDSDEAVTYSLGKFGQRALDFYSIHVTKESTHPVKPLAQIAGNRYASAPVGKALSDACMGTIASFLSKYQDIIIEHQKVVKGNQKRLESLRELAGKENLEYPSVTLPPQPHTKEGVDAYNEVIARVRMWVNLNLWQKLKLSRDDAKPLLRLKGFPSFPLVERQANEVDWWDMVCNVKKLINEKKEDGKVFWQNLAGYKRQEALRPYLSSEEDRKKGKKFARYQLGDLLLHLEKKHGEDWGKVYDEAWERIDKKVEGLSKHIKLEEERRSEDAQSKAALTDWLRAKASFVIEGLKEADKDEFCRCELKLQKWYGDLRGKPFAIEAENSILDISGFSKQYNCAFIWQKDGVKKLNLYLIINYFKGGKLRFKKIKPEAFEANRFYTVINKKSGEIVPMEVNFNFDDPNLIILPLAFGKRQGREFIWNDLLSLETGSLKLANGRVIEKTLYNRRTRQDEPALFVALTFERREVLDSSNIKPMNLIGVDRGENIPAVIALTDPEGCPLSRFKDSLGNPTHILRIGESYKEKQRTIQAKKEVEQRRAGGYSRKYASKAKNLADDMVRNTARDLLYYAVTQDAMLIFENLSRGFGRQGKRTFMAERQYTRMEDWLTAKLAYEGLPSQTYLSKTLAQYTSKTCSNCGFTITSADYDRVLEKLKKTATGWMTTINGKELKVEGQITYYNRYKRQNVVKDLSVELDRLSEESVNNDISSWTKGRSGEALSLLKKRFSHRPVQEKFVCLNCGFETHADEQAALNIARSWLFLRSQEYKKYQTNKTTGNTDKRAFVETWQSFYRKKLKEVWKPAV

SEQ ID NO: 41247 - protein, 979 aa, synthetic construct
  REGION 1..979: note = engineered CasX variant
QEIGKRINKIRRRLVKDSNTKKAGKTGPMKTLLVRVMTPDLRERLENLRKKPENIPQPISNTSRANLNKLLTDYTEMKKAILHVYWEEFQKDPVGLMSRVAQPASKKIDQNKLKPEMDEKGNLTTAGFACSQCGQPLFVYKLEQVSEKGKAYTNYFGRCNVAEHEKLILLAQLKPEKDSDEAVTYSLGKFGQRALDFYSIHVTKESTHPVKPLAQIAGNRYASVPVGKALSDACMGTIASFLSKYQDIIIEHQKVVKGNQKRLESLRELAGKENLEYPSVTLPPQPHTKEGVDAYNEVIARVRMWVNLNLWQKLKLSRDDAKPLLRLKGFPSFPLVERQANEVDWWDMVCNVKKLINEKKEDGKVFWQNLAGYKRQEALRPYLSSEEDRKKGKKFARYQLGDLLLHLEKKHGEDWGKVYDEAWERIDKKVEGLSKHIKLEEERRSEDAQSKAALTDWLRAKASFVIEGLKEADKDEFCRCELKLQKWYGDLRGKPFAIEAENSILDISGFSKQYNCAFIWQKDGVKKLNLYLIINYFKGGKLRFKKIKPEAFEANRFYTVINKKSGEIVPMEVNFNFDDPNLIILPLAFGKRQGREFIWNDLLSLETGSLKLANGRVIEKTLYNRRTRQDEPALFVALTFERREVLDSSNIKPMNLIGVDRGENIPAVIALTDPEGCPLSRFKDSLGNPTHILRIGESYKEKQRTIQAKKEVEQRRAGGYSRKYASKAKNLADDMVRNTARDLLYYAVTQDAMLIFENLSRGFGRQGKRTFMAERQYTRMEDWLTAKLAYEGLPSQTYLSKTLAQYTSKTCSNCGFTITSADYDRVLEKLKKTATGWMTTINGKELKVEGQITYYNRYKRQNVVKDLSVELDRLSEESVNNDISSWTKGRSGEALSLLKKRFSHRPVQEKFVCLNCGFETHADEQAALNIARSWLFLRSQEYKKYQTNKTTGNTDKRAFVETWQSFYRKKLKEVWKPAV

SEQ ID NO: 41248 - protein, 979 aa, synthetic construct
  REGION 1..979: note = engineered CasX variant
QEIGKRINKIRRRLVKDSNTKKAGKTGPMKTLLVRVMTPDLRERLENLRKKPENIPQPISNTSRANLNKLLTDYTEMKKAILHVYWEEFQKDPVGLMSRVAQPASKKIDQNKLKPEMDEKGNLTTAGFACSQCGQPLFVYKLEQVSEKGKAYTNYFGRCNVAEHEKLIKLAQLKPEKDSDEAVTYSLGKFGQRALDFYSIHVTKESTHPVKPLAQIAGNRYASGPVGKALSDACMGTIASFLSKYQDIIIEHQKVVKGNQKRLESLRELAGKENLEYPSVTLPPQPHTKEGVDAYNEVIARVRMWVNLNLWQKLKLSRDDAKPLLRLKGFPSFPLVERQANEVDWWDMVCNVKKLINEKKEDGKVFWQNLAGYKRQEALRPYLSSEEDRKKGKKFARYQLGDLLLHLEKKHGEDWGKVYDEAWERIDKKVEGLSKHIKLEEERRSEDAQSKAALTDWLRAKASFVIEGLKEADKDEFCRCELKLQKWYGDLRGKPFAIEAENSILDISGFSKQYNCAFIWQKDGVKKLNLYLIINYFKGGKLRFKKIKPEAFEANRFYTVINKKSGEIVPMEVNFNFDDPNLIILPLAFGKRQGREFIWNDLLSLETGSLKLANGRVIEKTLYNRRTRQDEPALFVALTFERREVLDSSNIKPMNLIGVDRGENIPAVIALTDPEGCPLSRFKDSLGNPTHILRIGESYKEKQRTIQAKKEVEQRRAGGYSRKYASKAKNLADDMVRNTARDLLYYAVTQDAMLIFENLSRGFGRQGKRTFMAERQYTRMEDWLTAKLAYEGLPSQTYLSKTLAQYTSKTCSNCGFTITSADYDRVLEKLKKTATGWMTTINGKELKVEGQITYYNRYKRQNVVKDLSVELDRLSEESVNNDISSWTKGRSGEALSLLKKRFSHRPVQEKFVCLNCGFETHADEQAALNIARSWLFLRSQEYKKYQTNKTTGNTDKRAFVETWQSFYRKKLKEVWKPAV

SEQ ID NO: 41249 - protein, 978 aa, synthetic construct
  REGION 1..978: note = engineered CasX variant
QEIGKRINKIRRRLVKDSNTKKAGKTGPMKTLLVRVMTPDLRERLENLRKKPENIPQPISNTSRANLNKLLTDYTEMKKAILHVYWEEFQKDPVGLMSRVAQPASKKIDQNKLKPEMDEKGNLTTAGFACSQCGQPLFVYKLEQVSEKGKAYTNYFGRCNVAEHEKLILLAQLKPEKDSDEAVTYSLGKFGQRALDFYSIHVTKESTHPVKPLAQIAGNRYASPVGKALSDACMGTIASFLSKYQDIIIEHQKVVKGNQKRLESLRELAGKENLEYPSVTLPPQPHTKEGVDAYNEVIARVRMWVNLNLWQKLKLSRDDAKPLLRLKGFPSFPLVERQANEVDWWDMVCNVKKLINEKKEDGKVFWQNLAGYKRQEALRPYLSSEEDRKKGKKFARYQLGDLLLHLEKKHGEDWGKVYDEAWERIDKKVEGLSKHIKLEEERRSEDAQSKAALTDWLRAKASFVIEGLKEADKDEFCRCELKLQKWYGDLRGKPFAIEAENSILDISGFSKQYNCAFIWQKDGVKKLNLYLIINYFKGGKLRFKKIKPEAFEANRFYTVINKKSGEIVPMEVNFNFDDPNLIILPLAFGKRQGREFIWNDLLSLETGSLKLANGRVIEKTLYNRRTRQDEPALFVALTFERREVLDSSNIKPMNLIGVDRGENIPAVIALTDPEGCPLSRFKDSLGNPTHILRIGESYKEKQRTIQAKKEVEQRRAGGYSRKYASKAKNLADDMVRNTARDLLYYAVTQDAMLIFENLSRGFGRQGKRTFMAERQYTRMEDWLTAKLAYEGLPSQTYLSKTLAQYTSKTCSNCGFTITSADYDRVLEKLKKTATGWMTTINGKELKVEGQITYYNRYKRQNVVKDLSVELDRLSEESVNNDISSWTKGRSGEALSLLKKRFSHRPVQEKFVCLNCGFETHADEQAALNIARSWLFLRSQEYKKYQTNKTTGNTDKRAFVETWQSFYRKKLKEVWKPAV

SEQ ID NO: 41250 - protein, 979 aa, synthetic construct
  REGION 1..979: note = engineered CasX variant
QEIGKRINKIRRRLVKDSNTKKAGKTGPMKTLLVRVMTPDLRERLENLRKKPENIPQPISNTSRANLNKLLTDYTEMKKAILHVYWEEFQKDPVGLMSRVAQPASKKIDQNKLKPEMDEKGNLTTAGFACSQCGQPLFVYKLEQVSEKGKAYTNYFGRCNVAEHEKLILLAQLKPEKDSDEAVTYSLGKFGQRALDFYSIHVTKESTHPVKPLAQIAGNRYASYPVGKALSDACMGTIASFLSKYQDIIIEHQKVVKGNQKRLESLRELAGKENLEYPSVTLPPQPHTKEGVDAYNEVIARVRMWVNLNLWQKLKLSRDDAKPLLRLKGFPSFPLVERQANEVDWWDMVCNVKKLINEKKEDGKVFWQNLAGYKRQEALRPYLSSEEDRKKGKKFARYQLGDLLLHLEKKHGEDWGKVYDEAWERIDKKVEGLSKHIKLEEERRSEDAQSKAALTDWLRAKASFVIEGLKEADKDEFCRCELKLQKWYGDLRGKPFAIEAENSILDISGFSKQYNCAFIWQKDGVKKLNLYLIINYFKGGKLRFKKIKPEAFEANRFYTVINKKSGEIVPMEVNFNFDDPNLIILPLAFGKRQGREFIWNDLLSLETGSLKLANGRVIEKTLYNRRTRQDEPALFVALTFERREVLDSSNIKPMNLIGVDRGENIPAVIALTDPEGCPLSRFKDSLGNPTHILRIGESYKEKQRTIQAKKEVEQRRAGGYSRKYASKAKNLADDMVRNTARDLLYYAVTQDAMLIFENLSRGFGRQGKRTFMAERQYTRMEDWLTAKLAYNGLPSKTYLSKTLAQYTSKTCSNCGFTITSADYDRVLEKLKKTATGWMTTINGKELKVEGQITYYNRYKRQNVVKDLSVELDRLSEESVNNDISSWTKGRSGEALSLLKKRFSHRPVQEKFVCLNCGFETHADEQAALNIARSWLFLRSQEYKKYQTNKTTGNTDKRAFVETWQSFYRKKLKEVWKPAV

SEQ ID NO: 41251 - protein, 979 aa, synthetic construct
  REGION 1..979: note = engineered CasX variant
QEIGKRINKIRRRLVKDSNTKKAGKTGPMKTLLVRVMTPDLRERLENLRKKPENIPQPISNTSRANLNKLLTDYTEMKKAILHVYWEEFQKDPVGLMSRVAQPASKKIDQNKLKPEMDEKGNLTTAGFACSQCGQPLFVYKLEQVSEKGKAYTNYFGRCNVAEHEKLILLAQLKPEKDSDEAVTYSLGKFGQRALDFYSIHVTKESTHPVKPLAQIAGNRYASHPVGKALSDACMGTIASFLSKYQDIIIEHQKVVKGNQKRLESLRELAGKENLEYPSVTLPPQPHTKEGVDAYNEVIARVRMWVNLNLWQKLKLSRDDAKPLLRLKGFPSFPLVERQANEVDWWDMVCNVKKLINEKKEDGKVFWQNLAGYKRQEALRPYLSSEEDRKKGKKFARYQLGDLLLHLEKKHGEDWGKVYDEAWERIDKKVEGLSKHIKLEEERRSEDAQSKAALTDWLRAKASFVIEGLKEADKDEFCRCELKLQKWYGDLRGKPFAIEAENSILDISGFSKQYNCAFIWQKDGVKKLNLYLIINYFKGGKLRFKKIKPEAFEANRFYTVINKKSGEIVPMEVNFNFDDPNLIILPLAFGKRQGREFIWNDLLSLETGSLKLANGRVIEKTLYNRRTRQDEPALFVALTFERREVLDSSNIKPMNLIGVDRGENIPAVIALTDPEGCPLSRFKDSLGNPTHILRIGESYKEKQRTIQAKKEVEQRRAGGYSRKYASKAKNLADDMVRNTARDLLYYAVTQDAMLIFENLSRGFGRQGKRTFMAERQYTRMEDWLTAKLAYNGLPSKTYLSKTLAQYTSKTCSNCGFTITSADYDRVLEKLKKTATGWMTTINGKELKVEGQITYYNRYKRQNVVKDLSVELDRLSEESVNNDISSWTKGRSGEALSLLKKRFSHRPVQEKFVCLNCGFETHADEQAALNIARSWLFLRSQEYKKYQTNKTTGNTDKRAFVETWQSFYRKKLKEVWKPAV

SEQ ID NO: 41252 - protein, 979 aa, synthetic construct
  REGION 1..979: note = engineered CasX variant
QEIGKRINKIRRRLVKDSNTKKAGKTGPMKTLLVRVMTPDLRERLENLRKKPENIPQPISNTSRANLNKLLTDYTEMKKAILHVYWEEFQKDPVGLMSRVAQPASKKIDQNKLKPEMDEKGNLTTAGFACSQCGQPLFVYKLEQVSEKGKAYTNYFGRCNVAEHEKLILLAQLKPEKDSDEAVTYSLGKFGQRALDFYSIHVTKESTHPVKPLAQIAGNRYASSPVGKALSDACMGTIASFLSKYQDIIIEHQKVVKGNQKRLESLRELAGKENLEYPSVTLPPQPHTKEGVDAYNEVIARVRMWVNLNLWQKLKLSRDDAKPLLRLKGFPSFPLVERQANEVDWWDMVCNVKKLINEKKEDGKVFWQNLAGYKRQEALRPYLSSEEDRKKGKKFARYQLGDLLLHLEKKHGEDWGKVYDEAWERIDKKVEGLSKHIKLEEERRSEDAQSKAALTDWLRAKASFVIEGLKEADKDEFCRCELKLQKWYGDLRGKPFAIEAENSILDISGFSKQYNCAFIWQKDGVKKLNLYLIINYFKGGKLRFKKIKPEAFEANRFYTVINKKSGEIVPMEVNFNFDDPNLIILPLAFGKRQGREFIWNDLLSLETGSLKLANGRVIEKTLYNRRTRQDEPALFVALTFERREVLDSSNIKPMNLIGVDRGENIPAVIALTDPEGCPLSRFKDSLGNPTHILRIGESYKEKQRTIQAKKEVEQRRAGGYSRKYASKAKNLADDMVRNTARDLLYYAVTQDAMLIFENLSRGFGRQGKRTFMAERQYTRMEDWLTAKLAYNGLPSKTYLSKTLAQYTSKTCSNCGFTITSADYDRVLEKLKKTATGWMTTINGKELKVEGQITYYNRYKRQNVVKDLSVELDRLSEESVNNDISSWTKGRSGEALSLLKKRFSHRPVQEKFVCLNCGFETHADEQAALNIARSWLFLRSQEYKKYQTNKTTGNTDKRAFVETWQSFYRKKLKEVWKPAV

SEQ ID NO: 41253 - protein, 979 aa, synthetic construct
  REGION 1..979: note = engineered CasX variant
QEIGKRINKIRRRLVKDSNTKKAGKTGPMKTLLVRVMTPDLRERLENLRKKPENIPQPISNTSRANLNKLLTDYTEMKKAILHVYWEEFQKDPVGLMSRVAQPASKKIDQNKLKPEMDEKGNLTTAGFACSQCGQPLFVYKLEQVSEKGKAYTNYFGRCNVAEHEKLILLAQLKPEKDSDEAVTYSLGKFGQRALDFYSIHVTKESTHPVKPLAQIAGNRYASTPVGKALSDACMGTIASFLSKYQDIIIEHQKVVKGNQKRLESLRELAGKENLEYPSVTLPPQPHTKEGVDAYNEVIARVRMWVNLNLWQKLKLSRDDAKPLLRLKGFPSFPLVERQANEVDWWDMVCNVKKLINEKKEDGKVFWQNLAGYKRQEALRPYLSSEEDRKKGKKFARYQLGDLLLHLEKKHGEDWGKVYDEAWERIDKKVEGLSKHIKLEEERRSEDAQSKAALTDWLRAKASFVIEGLKEADKDEFCRCELKLQKWYGDLRGKPFAIEAENSILDISGFSKQYNCAFIWQKDGVKKLNLYLIINYFKGGKLRFKKIKPEAFEANRFYTVINKKSGEIVPMEVNFNFDDPNLIILPLAFGKRQGREFIWNDLLSLETGSLKLANGRVIEKTLYNRRTRQDEPALFVALTFERREVLDSSNIKPMNLIGVDRGENIPAVIALTDPEGCPLSRFKDSLGNPTHILRIGESYKEKQRTIQAKKEVEQRRAGGYSRKYASKAKNLADDMVRNTARDLLYYAVTQDAMLIFENLSRGFGRQGKRTFMAERQYTRMEDWLTAKLAYNGLPSKTYLSKTLAQYTSKTCSNCGFTITSADYDRVLEKLKKTATGWMTTINGKELKVEGQITYYNRYKRQNVVKDLSVELDRLSEESVNNDISSWTKGRSGEALSLLKKRFSHRPVQEKFVCLNCGFETHADEQAALNIARSWLFLRSQEYKKYQTNKTTGNTDKRAFVETWQSFYRKKLKEVWKPAV

SEQ ID NO: 41254 - protein, 979 aa, synthetic construct
  REGION 1..979: note = engineered CasX variant
QEIGKRINKIRRRLVKDSNTKKAGKTGPMKTLLVRVMTPDLRERLENLRKKPENIPQPISNTSRANLNKLLTDYTEMKKAILHVYWEEFQKDPVGLMSRVAQPASKKIDQNKLKPEMDEKGNLTTAGFACSQCGQPLFVYKLEQVSEKGKAYTNYFGRCNVAEHEKLILLAQLKPEKDSDEAVTYSLGKFGQRALDFYSIHVTKESTHPVKPLAQIAGNRYASAPVGKALSDACMGTIASFLSKYQDIIIEHQKVVKGNQKRLESLRELAGKENLEYPSVTLPPQPHTKEGVDAYNEVIARVRMWVNLNLWQKLKLSRDDAKPLLRLKGFPSFPLVERQANEVDWWDMVCNVKKLINEKKEDGKVFWQNLAGYKRQEALRPYLSSEEDRKKGKKFARYQLGDLLLHLEKKHGEDWGKVYDEAWERIDKKVEGLSKHIKLEEERRSEDAQSKAALTDWLRAKASFVIEGLKEADKDEFCRCELKLQKWYGDLRGKPFAIEAENSILDISGFSKQYNCAFIWQKDGVKKLNLYLIINYFKGGKLRFKKIKPEAFEANRFYTVINKKSGEIVPMEVNFNFDDPNLIILPLAFGKRQGREFIWNDLLSLETGSLKLANGRVIEKTLYNRRTRQDEPALFVALTFERREVLDSSNIKPMNLIGVDRGENIPAVIALTDPEGCPLSRFKDSLGNPTHILRIGESYKEKQRTIQAKKEVEQRRAGGYSRKYASKAKNLADDMVRNTARDLLYYAVTQDAMLIFENLSRGFGRQGKRTFMAERQYTRMEDWLTAKLAYNGLPSKTYLSKTLAQYTSKTCSNCGFTITSADYDRVLEKLKKTATGWMTTINGKELKVEGQITYYNRYKRQNVVKDLSVELDRLSEESVNNDISSWTKGRSGEALSLLKKRFSHRPVQEKFVCLNCGFETHADEQAALNIARSWLFLRSQEYKKYQTNKTTGNTDKRAFVETWQSFYRKKLKEVWKPAV

SEQ ID NO: 41255 - protein, 979 aa, synthetic construct
  REGION 1..979: note = engineered CasX variant
QEIGKRINKIRRRLVKDSNTKKAGKTGPMKTLLVRVMTPDLRERLENLRKKPENIPQPISNTSRANLNKLLTDYTEMKKAILHVYWEEFQKDPVGLMSRVAQPASKKIDQNKLKPEMDEKGNLTTAGFACSQCGQPLFVYKLEQVSEKGKAYTNYFGRCNVAEHEKLILLAQLKPEKDSDEAVTYSLGKFGQRALDFYSIHVTKESTHPVKPLAQIAGNRYASVPVGKALSDACMGTIASFLSKYQDIIIEHQKVVKGNQKRLESLRELAGKENLEYPSVTLPPQPHTKEGVDAYNEVIARVRMWVNLNLWQKLKLSRDDAKPLLRLKGFPSFPLVERQANEVDWWDMVCNVKKLINEKKEDGKVFWQNLAGYKRQEALRPYLSSEEDRKKGKKFARYQLGDLLLHLEKKHGEDWGKVYDEAWERIDKKVEGLSKHIKLEEERRSEDAQSKAALTDWLRAKASFVIEGLKEADKDEFCRCELKLQKWYGDLRGKPFAIEAENSILDISGFSKQYNCAFIWQKDGVKKLNLYLIINYFKGGKLRFKKIKPEAFEANRFYTVINKKSGEIVPMEVNFNFDDPNLIILPLAFGKRQGREFIWNDLLSLETGSLKLANGRVIEKTLYNRRTRQDEPALFVALTFERREVLDSSNIKPMNLIGVDRGENIPAVIALTDPEGCPLSRFKDSLGNPTHILRIGESYKEKQRTIQAKKEVEQRRAGGYSRKYASKAKNLADDMVRNTARDLLYYAVTQDAMLIFENLSRGFGRQGKRTFMAERQYTRMEDWLTAKLAYNGLPSKTYLSKTLAQYTSKTCSNCGFTITSADYDRVLEKLKKTATGWMTTINGKELKVEGQITYYNRYKRQNVVKDLSVELDRLSEESVNNDISSWTKGRSGEALSLLKKRFSHRPVQEKFVCLNCGFETHADEQAALNIARSWLFLRSQEYKKYQTNKTTGNTDKRAFVETWQSFYRKKLKEVWKPAV

SEQ ID NO: 41256 - protein, 979 aa, synthetic construct
  REGION 1..979: note = engineered CasX variant
QEIGKRINKIRRRLVKDSNTKKAGKTGPMKTLLVRVMTPDLRERLENLRKKPENIPQPISNTSRANLNKLLTDYTEMKKAILHVYWEEFQKDPVGLMSRVAQPASKKIDQNKLKPEMDEKGNLTTAGFACSQCGQPLFVYKLEQVSEKGKAYTNYFGRCNVAEHEKLIKLAQLKPEKDSDEAVTYSLGKFGQRALDFYSIHVTKESTHPVKPLAQIAGNRYASGPVGKALSDACMGTIASFLSKYQDIIIEHQKVVKGNQKRLESLRELAGKENLEYPSVTLPPQPHTKEGVDAYNEVIARVRMWVNLNLWQKLKLSRDDAKPLLRLKGFPSFPLVERQANEVDWWDMVCNVKKLINEKKEDGKVFWQNLAGYKRQEALRPYLSSEEDRKKGKKFARYQLGDLLLHLEKKHGEDWGKVYDEAWERIDKKVEGLSKHIKLEEERRSEDAQSKAALTDWLRAKASFVIEGLKEADKDEFCRCELKLQKWYGDLRGKPFAIEAENSILDISGFSKQYNCAFIWQKDGVKKLNLYLIINYFKGGKLRFKKIKPEAFEANRFYTVINKKSGEIVPMEVNFNFDDPNLIILPLAFGKRQGREFIWNDLLSLETGSLKLANGRVIEKTLYNRRTRQDEPALFVALTFERREVLDSSNIKPMNLIGVDRGENIPAVIALTDPEGCPLSRFKDSLGNPTHILRIGESYKEKQRTIQAKKEVEQRRAGGYSRKYASKAKNLADDMVRNTARDLLYYAVTQDAMLIFENLSRGFGRQGKRTFMAERQYTRMEDWLTAKLAYNGLPSKTYLSKTLAQYTSKTCSNCGFTITSADYDRVLEKLKKTATGWMTTINGKELKVEGQITYYNRYKRQNVVKDLSVELDRLSEESVNNDISSWTKGRSGEALSLLKKRFSHRPVQEKFVCLNCGFETHADEQAALNIARSWLFLRSQEYKKYQTNKTTGNTDKRAFVETWQSFYRKKLKEVWKPAV

SEQ ID NO: 41257 - protein, 978 aa, synthetic construct
  REGION 1..978: note = engineered CasX variant
QEIGKRINKIRRRLVKDSNTKKAGKTGPMKTLLVRVMTPDLRERLENLRKKPENIPQPISNTSRANLNKLLTDYTEMKKAILHVYWEEFQKDPVGLMSRVAQPASKKIDQNKLKPEMDEKGNLTTAGFACSQCGQPLFVYKLEQVSEKGKAYTNYFGRCNVAEHEKLILLAQLKPEKDSDEAVTYSLGKFGQRALDFYSIHVTKESTHPVKPLAQIAGNRYASPVGKALSDACMGTIASFLSKYQDIIIEHQKVVKGNQKRLESLRELAGKENLEYPSVTLPPQPHTKEGVDAYNEVIARVRMWVNLNLWQKLKLSRDDAKPLLRLKGFPSFPLVERQANEVDWWDMVCNVKKLINEKKEDGKVFWQNLAGYKRQEALRPYLSSEEDRKKGKKFARYQLGDLLLHLEKKHGEDWGKVYDEAWERIDKKVEGLSKHIKLEEERRSEDAQSKAALTDWLRAKASFVIEGLKEADKDEFCRCELKLQKWYGDLRGKPFAIEAENSILDISGFSKQYNCAFIWQKDGVKKLNLYLIINYFKGGKLRFKKIKPEAFEANRFYTVINKKSGEIVPMEVNFNFDDPNLIILPLAFGKRQGREFIWNDLLSLETGSLKLANGRVIEKTLYNRRTRQDEPALFVALTFERREVLDSSNIKPMNLIGVDRGENIPAVIALTDPEGCPLSRFKDSLGNPTHILRIGESYKEKQRTIQAKKEVEQRRAGGYSRKYASKAKNLADDMVRNTARDLLYYAVTQDAMLIFENLSRGFGRQGKRTFMAERQYTRMEDWLTAKLAYNGLPSKTYLSKTLAQYTSKTCSNCGFTITSADYDRVLEKLKKTATGWMTTINGKELKVEGQITYYNRYKRQNVVKDLSVELDRLSEESVNNDISSWTKGRSGEALSLLKKRFSHRPVQEKFVCLNCGFETHADEQAALNIARSWLFLRSQEYKKYQTNKTTGNTDKRAFVETWQSFYRKKLKEVWKPAV

SEQ ID NO: 41258 - protein, 979 aa, synthetic construct
  REGION 1..979: note = engineered CasX variant
QEIGKRINKIRRRLVKDSNTKKAGKTGPMKTLLVRVMTPDLRERLENLRKKPENIPQPISNTSRANLNKLLTDYTEMKKAILHVYWEEFQKDPVGLMSRVAQPASKKIDQNKLKPEMDEKGNLTTAGFACSQCGQPLFVYKLEQVSEKGKAYTNYFGRCNVAEHEKLIQLAQLKPEKDSDEAVTYSLGKFGQRALDFYSIHVTKESTHPVKPLAQIAGNRYASYPVGKALSDACMGTIASFLSKYQDIIIEHQKVVKGNQKRLESLRELAGKENLEYPSVTLPPQPHTKEGVDAYNEVIARVRMWVNLNLWQKLKLSRDDAKPLLRLKGFPSFPLVERQANEVDWWDMVCNVKKLINEKKEDGKVFWQNLAGYKRQEALRPYLSSEEDRKKGKKFARYQLGDLLLHLEKKHGEDWGKVYDEAWERIDKKVEGLSKHIKLEEERRSEDAQSKAALTDWLRAKASFVIEGLKEADKDEFCRCELKLQKWYGDLRGKPFAIEAENSILDISGFSKQYNCAFIWQKDGVKKLNLYLIINYFKGGKLRFKKIKPEAFEANRFYTVINKKSGEIVPMEVNFNFDDPNLIILPLAFGKRQGREFIWNDLLSLETGSLKLANGRVIEKTLYNRRTRQDEPALFVALTFERREVLDSSNIKPMNLIGVDRGENIPAVIALTDPEGCPLSRFKDSLGNPTHILRIGESYKEKQRTIQAKKEVEQRRAGGYSRKYASKAKNLADDMVRNTARDLLYYAVTQDAMLIFENLSRGFGRQGKRTFMAERQYTRMEDWLTAKLAYEGLPSKTYLSKTLAQYTSKTCSNCGFTITSADYDRVLEKLKKTATGWMTTINGKELKVEGQITYYNRYKRQNVVKDLSVELDRLSEESVNNDISSWTKGRSGEALSLLKKRFSHRPVQEKFVCLNCGFETHADEQAALNIARSWLFLRSQEYKKYQTNKTTGNTDKRAFVETWQSFYRKKLKEVWKPAV

SEQ ID NO: 41259 - protein, 979 aa, synthetic construct
  REGION 1..979: note = engineered CasX variant
QEIGKRINKIRRRLVKDSNTKKAGKTGPMKTLLVRVMTPDLRERLENLRKKPENIPQPISNTSRANLNKLLTDYTEMKKAILHVYWEEFQKDPVGLMSRVAQPASKKIDQNKLKPEMDEKGNLTTAGFACSQCGQPLFVYKLEQVSEKGKAYTNYFGRCNVAEHEKLIQLAQLKPEKDSDEAVTYSLGKFGQRALDFYSIHVTKESTHPVKPLAQIAGNRYASHPVGKALSDACMGTIASFLSKYQDIIIEHQKVVKGNQKRLESLRELAGKENLEYPSVTLPPQPHTKEGVDAYNEVIARVRMWVNLNLWQKLKLSRDDAKPLLRLKGFPSFPLVERQANEVDWWDMVCNVKKLINEKKEDGKVFWQNLAGYKRQEALRPYLSSEEDRKKGKKFARYQLGDLLLHLEKKHGEDWGKVYDEAWERIDKKVEGLSKHIKLEEERRSEDAQSKAALTDWLRAKASFVIEGLKEADKDEFCRCELKLQKWYGDLRGKPFAIEAENSILDISGFSKQYNCAFIWQKDGVKKLNLYLIINYFKGGKLRFKKIKPEAFEANRFYTVINKKSGEIVPMEVNFNFDDPNLIILPLAFGKRQGREFIWNDLLSLETGSLKLANGRVIEKTLYNRRTRQDEPALFVALTFERREVLDSSNIKPMNLIGVDRGENIPAVIALTDPEGCPLSRFKDSLGNPTHILRIGESYKEKQRTIQAKKEVEQRRAGGYSRKYASKAKNLADDMVRNTARDLLYYAVTQDAMLIFENLSRGFGRQGKRTFMAERQYTRMEDWLTAKLAYEGLPSKTYLSKTLAQYTSKTCSNCGFTITSADYDRVLEKLKKTATGWMTTINGKELKVEGQITYYNRYKRQNVVKDLSVELDRLSEESVNNDISSWTKGRSGEALSLLKKRFSHRPVQEKFVCLNCGFETHADEQAALNIARSWLFLRSQEYKKYQTNKTTGNTDKRAFVETWQSFYRKKLKEVWKPAV

SEQ ID NO: 41260 - protein, 979 aa, synthetic construct
  REGION 1..979: note = engineered CasX variant
QEIGKRINKIRRRLVKDSNTKKAGKTGPMKTLLVRVMTPDLRERLENLRKKPENIPQPISNTSRANLNKLLTDYTEMKKAILHVYWEEFQKDPVGLMSRVAQPASKKIDQNKLKPEMDEKGNLTTAGFACSQCGQPLFVYKLEQVSEKGKAYTNYFGRCNVAEHEKLIQLAQLKPEKDSDEAVTYSLGKFGQRALDFYSIHVTKESTHPVKPLAQIAGNRYASSPVGKALSDACMGTIASFLSKYQDIIIEHQKVVKGNQKRLESLRELAGKENLEYPSVTLPPQPHTKEGVDAYNEVIARVRMWVNLNLWQKLKLSRDDAKPLLRLKGFPSFPLVERQANEVDWWDMVCNVKKLINEKKEDGKVFWQNLAGYKRQEALRPYLSSEEDRKKGKKFARYQLGDLLLHLEKKHGEDWGKVYDEAWERIDKKVEGLSKHIKLEEERRSEDAQSKAALTDWLRAKASFVIEGLKEADKDEFCRCELKLQKWYGDLRGKPFAIEAENSILDISGFSKQYNCAFIWQKDGVKKLNLYLIINYFKGGKLRFKKIKPEAFEANRFYTVINKKSGEIVPMEVNFNFDDPNLIILPLAFGKRQGREFIWNDLLSLETGSLKLANGRVIEKTLYNRRTRQDEPALFVALTFERREVLDSSNIKPMNLIGVDRGENIPAVIALTDPEGCPLSRFKDSLGNPTHILRIGESYKEKQRTIQAKKEVEQRRAGGYSRKYASKAKNLADDMVRNTARDLLYYAVTQDAMLIFENLSRGFGRQGKRTFMAERQYTRMEDWLTAKLAYEGLPSKTYLSKTLAQYTSKTCSNCGFTITSADYDRVLEKLKKTATGWMTTINGKELKVEGQITYYNRYKRQNVVKDLSVELDRLSEESVNNDISSWTKGRSGEALSLLKKRFSHRPVQEKFVCLNCGFETHADEQAALNIARSWLFLRSQEYKKYQTNKTTGNTDKRAFVETWQSFYRKKLKEVWKPAV

SEQ ID NO: 41261 - protein, 979 aa, synthetic construct
  REGION 1..979: note = engineered CasX variant
QEIGKRINKIRRRLVKDSNTKKAGKTGPMKTLLVRVMTPDLRERLENLRKKPENIPQPISNTSRANLNKLLTDYTEMKKAILHVYWEEFQKDPVGLMSRVAQPASKKIDQNKLKPEMDEKGNLTTAGFACSQCGQPLFVYKLEQVSEKGKAYTNYFGRCNVAEHEKLIQLAQLKPEKDSDEAVTYSLGKFGQRALDFYSIHVTKESTHPVKPLAQIAGNRYASTPVGKALSDACMGTIASFLSKYQDIIIEHQKVVKGNQKRLESLRELAGKENLEYPSVTLPPQPHTKEGVDAYNEVIARVRMWVNLNLWQKLKLSRDDAKPLLRLKGFPSFPLVERQANEVDWWDMVCNVKKLINEKKEDGKVFWQNLAGYKRQEALRPYLSSEEDRKKGKKFARYQLGDLLLHLEKKHGEDWGKVYDEAWERIDKKVEGLSKHIKLEEERRSEDAQSKAALTDWLRAKASFVIEGLKEADKDEFCRCELKLQKWYGDLRGKPFAIEAENSILDISGFSKQYNCAFIWQKDGVKKLNLYLIINYFKGGKLRFKKIKPEAFEANRFYTVINKKSGEIVPMEVNFNFDDPNLIILPLAFGKRQGREFIWNDLLSLETGSLKLANGRVIEKTLYNRRTRQDEPALFVALTFERREVLDSSNIKPMNLIGVDRGENIPAVIALTDPEGCPLSRFKDSLGNPTHILRIGESYKEKQRTIQAKKEVEQRRAGGYSRKYASKAKNLADDMVRNTARDLLYYAVTQDAMLIFENLSRGFGRQGKRTFMAERQYTRMEDWLTAKLAYEGLPSKTYLSKTLAQYTSKTCSNCGFTITSADYDRVLEKLKKTATGWMTTINGKELKVEGQITYYNRYKRQNVVKDLSVELDRLSEESVNNDISSWTKGRSGEALSLLKKRFSHRPVQEKFVCLNCGFETHADEQAALNIARSWLFLRSQEYKKYQTNKTTGNTDKRAFVETWQSFYRKKLKEVWKPAV

SEQ ID NO: 41262 - protein, 979 aa, synthetic construct
  REGION 1..979: note = engineered CasX variant
QEIGKRINKIRRRLVKDSNTKKAGKTGPMKTLLVRVMTPDLRERLENLRKKPENIPQPISNTSRANLNKLLTDYTEMKKAILHVYWEEFQKDPVGLMSRVAQPASKKIDQNKLKPEMDEKGNLTTAGFACSQCGQPLFVYKLEQVSEKGKAYTNYFGRCNVAEHEKLIQLAQLKPEKDSDEAVTYSLGKFGQRALDFYSIHVTKESTHPVKPLAQIAGNRYASAPVGKALSDACMGTIASFLSKYQDIIIEHQKVVKGNQKRLESLRELAGKENLEYPSVTLPPQPHTKEGVDAYNEVIARVRMWVNLNLWQKLKLSRDDAKPLLRLKGFPSFPLVERQANEVDWWDMVCNVKKLINEKKEDGKVFWQNLAGYKRQEALRPYLSSEEDRKKGKKFARYQLGDLLLHLEKKHGEDWGKVYDEAWERIDKKVEGLSKHIKLEEERRSEDAQSKAALTDWLRAKASFVIEGLKEADKDEFCRCELKLQKWYGDLRGKPFAIEAENSILDISGFSKQYNCAFIWQKDGVKKLNLYLIINYFKGGKLRFKKIKPEAFEANRFYTVINKKSGEIVPMEVNFNFDDPNLIILPLAFGKRQGREFIWNDLLSLETGSLKLANGRVIEKTLYNRRTRQDEPALFVALTFERREVLDSSNIKPMNLIGVDRGENIPAVIALTDPEGCPLSRFKDSLGNPTHILRIGESYKEKQRTIQAKKEVEQRRAGGYSRKYASKAKNLADDMVRNTARDLLYYAVTQDAMLIFENLSRGFGRQGKRTFMAERQYTRMEDWLTAKLAYEGLPSKTYLSKTLAQYTSKTCSNCGFTITSADYDRVLEKLKKTATGWMTTINGKELKVEGQITYYNRYKRQNVVKDLSVELDRLSEESVNNDISSWTKGRSGEALSLLKKRFSHRPVQEKFVCLNCGFETHADEQAALNIARSWLFLRSQEYKKYQTNKTTGNTDKRAFVETWQSFYRKKLKEVWKPAV

SEQ ID NO: 41263 - protein, 979 aa, synthetic construct
  REGION 1..979: note = engineered CasX variant
QEIGKRINKIRRRLVKDSNTKKAGKTGPMKTLLVRVMTPDLRERLENLRKKPENIPQPISNTSRANLNKLLTDYTEMKKAILHVYWEEFQKDPVGLMSRVAQPASKKIDQNKLKPEMDEKGNLTTAGFACSQCGQPLFVYKLEQVSEKGKAYTNYFGRCNVAEHEKLIQLAQLKPEKDSDEAVTYSLGKFGQRALDFYSIHVTKESTHPVKPLAQIAGNRYASVPVGKALSDACMGTIASFLSKYQDIIIEHQKVVKGNQKRLESLRELAGKENLEYPSVTLPPQPHTKEGVDAYNEVIARVRMWVNLNLWQKLKLSRDDAKPLLRLKGFPSFPLVERQANEVDWWDMVCNVKKLINEKKEDGKVFWQNLAGYKRQEALRPYLSSEEDRKKGKKFARYQLGDLLLHLEKKHGEDWGKVYDEAWERIDKKVEGLSKHIKLEEERRSEDAQSKAALTDWLRAKASFVIEGLKEADKDEFCRCELKLQKWYGDLRGKPFAIEAENSILDISGFSKQYNCAFIWQKDGVKKLNLYLIINYFKGGKLRFKKIKPEAFEANRFYTVINKKSGEIVPMEVNFNFDDPNLIILPLAFGKRQGREFIWNDLLSLETGSLKLANGRVIEKTLYNRRTRQDEPALFVALTFERREVLDSSNIKPMNLIGVDRGENIPAVIALTDPEGCPLSRFKDSLGNPTHILRIGESYKEKQRTIQAKKEVEQRRAGGYSRKYASKAKNLADDMVRNTARDLLYYAVTQDAMLIFENLSRGFGRQGKRTFMAERQYTRMEDWLTAKLAYEGLPSKTYLSKTLAQYTSKTCSNCGFTITSADYDRVLEKLKKTATGWMTTINGKELKVEGQITYYNRYKRQNVVKDLSVELDRLSEESVNNDISSWTKGRSGEALSLLKKRFSHRPVQEKFVCLNCGFETHADEQAALNIARSWLFLRSQEYKKYQTNKTTGNTDKRAFVETWQSFYRKKLKEVWKPAV

SEQ ID NO: 41264 - protein, 980 aa, synthetic construct
  REGION 1..980: note = engineered CasX variant
QEIGKRINKIRRRLVKDSNTKKAGKTGPMKTLLVRVMTPDLRERLENLRKKPENIPQPISNTSRANLNKLLTDYTEMKKAILHVYWEEFQKDPVGLMSRVAQPASKKIDQNKLKPEMDEKGNLTTAGFACSQCGQPLFVYKLEQVSEKGKAYTNYFGRCNVAEHEKLIQKLAQLKPEKDSDEAVTYSLGKFGQRALDFYSIHVTKESTHPVKPLAQIAGNRYASGPVGKALSDACMGTIASFLSKYQDIIIEHQKVVKGNQKRLESLRELAGKENLEYPSVTLPPQPHTKEGVDAYNEVIARVRMWVNLNLWQKLKLSRDDAKPLLRLKGFPSFPLVERQANEVDWWDMVCNVKKLINEKKEDGKVFWQNLAGYKRQEALRPYLSSEEDRKKGKKFARYQLGDLLLHLEKKHGEDWGKVYDEAWERIDKKVEGLSKHIKLEEERRSEDAQSKAALTDWLRAKASFVIEGLKEADKDEFCRCELKLQKWYGDLRGKPFAIEAENSILDISGFSKQYNCAFIWQKDGVKKLNLYLIINYFKGGKLRFKKIKPEAFEANRFYTVINKKSGEIVPMEVNFNFDDPNLIILPLAFGKRQGREFIWNDLLSLETGSLKLANGRVIEKTLYNRRTRQDEPALFVALTFERREVLDSSNIKPMNLIGVDRGENIPAVIALTDPEGCPLSRFKDSLGNPTHILRIGESYKEKQRTIQAKKEVEQRRAGGYSRKYASKAKNLADDMVRNTARDLLYYAVTQDAMLIFENLSRGFGRQGKRTFMAERQYTRMEDWLTAKLAYEGLPSKTYLSKTLAQYTSKTCSNCGFTITSADYDRVLEKLKKTATGWMTTINGKELKVEGQITYYNRYKRQNVVKDLSVELDRLSEESVNNDISSWTKGRSGEALSLLKKRFSHRPVQEKFVCLNCGFETHADEQAALNIARSWLFLRSQEYKKYQTNKTTGNTDKRAFVETWQSFYRKKLKEVWKPAV

SEQ ID NO: 41265 - protein, 978 aa, synthetic construct
  REGION 1..978: note = engineered CasX variant
QEIGKRINKIRRRLVKDSNTKKAGKTGPMKTLLVRVMTPDLRERLENLRKKPENIPQPISNTSRANLNKLLTDYTEMKKAILHVYWEEFQKDPVGLMSRVAQPASKKIDQNKLKPEMDEKGNLTTAGFACSQCGQPLFVYKLEQVSEKGKAYTNYFGRCNVAEHEKLIQLAQLKPEKDSDEAVTYSLGKFGQRALDFYSIHVTKESTHPVKPLAQIAGNRYASPVGKALSDACMGTIASFLSKYQDIIIEHQKVVKGNQKRLESLRELAGKENLEYPSVTLPPQPHTKEGVDAYNEVIARVRMWVNLNLWQKLKLSRDDAKPLLRLKGFPSFPLVERQANEVDWWDMVCNVKKLINEKKEDGKVFWQNLAGYKRQEALRPYLSSEEDRKKGKKFARYQLGDLLLHLEKKHGEDWGKVYDEAWERIDKKVEGLSKHIKLEEERRSEDAQSKAALTDWLRAKASFVIEGLKEADKDEFCRCELKLQKWYGDLRGKPFAIEAENSILDISGFSKQYNCAFIWQKDGVKKLNLYLIINYFKGGKLRFKKIKPEAFEANRFYTVINKKSGEIVPMEVNFNFDDPNLIILPLAFGKRQGREFIWNDLLSLETGSLKLANGRVIEKTLYNRRTRQDEPALFVALTFERREVLDSSNIKPMNLIGVDRGENIPAVIALTDPEGCPLSRFKDSLGNPTHILRIGESYKEKQRTIQAKKEVEQRRAGGYSRKYASKAKNLADDMVRNTARDLLYYAVTQDAMLIFENLSRGFGRQGKRTFMAERQYTRMEDWLTAKLAYEGLPSKTYLSKTLAQYTSKTCSNCGFTITSADYDRVLEKLKKTATGWMTTINGKELKVEGQITYYNRYKRQNVVKDLSVELDRLSEESVNNDISSWTKGRSGEALSLLKKRFSHRPVQEKFVCLNCGFETHADEQAALNIARSWLFLRSQEYKKYQTNKTTGNTDKRAFVETWQSFYRKKLKEVWKPAV

SEQ ID NO: 41266 - protein, 979 aa, synthetic construct
  REGION 1..979: note = engineered CasX variant
QEIGKRINKIRRRLVKDSNTKKAGKTGPMKTLLVRVMTPDLRERLENLRKKPENIPQPISNTSRANLNKLLTDYTEMKKAILHVYWEEFQKDPVGLMSRVAQPASKKIDQNKLKPEMDEKGNLTTAGFACSQCGQPLFVYKLEQVSEKGKAYTNYFGRCNVAEHEKLILLAQLKPEKDSDEAVTYSLGKFGQRALDFYSIHVTKESTHPVKPLAQIAGNRYASYPVGKALSDACMGTIASFLSKYQDIIIEHQKVVKGNQKRLESLRELAGKENLEYPSVTLPPQPHTKEGVDAYNEVIARVRMWVNLNLWQKLKLSRDDAKPLLRLKGFPSFPLVERQANEVDWWDMVCNVKKLINEKKEDGKVFWQNLAIYKRQEALRPYLSSEEDRKKGKKFARYQLGDLLLHLEKKHGEDWGKVYDEAWERIDKKVEGLSKHIKLEEERRSEDAQSKAALTDWLRAKASFVIEGLKEADKDEFCRCELKLQKWYGDLRGKPFAIEAENSILDISGFSKQYNCAFIWQKDGVKKLNLYLIINYFKGGKLRFKKIKPEAFEANRFYTVINKKSGEIVPMEVNFNFDDPNLIILPLAFGKRQGREFIWNDLLSLETGSLKLANGRVIEKTLYNRRTRQDEPALFVALTFERREVLDSSNIKPMNLIGVDRGENIPAVIALTDPEGCPLSRFKDSLGNPTHILRIGESYKEKQRTIQAKKEVEQRRAGGYSRKYASKAKNLADDMVRNTARDLLYYAVTQDAMLIFENLSRGFGRQGKRTFMAERQYTRMEDWLTAKLAYEGLPSKTYLSKTLAQYTSKTCSNCGFTITSADYDRVLEKLKKTATGWMTTINGKELKVEGQITYYNRYKRQNVVKDLSVELDRLSEESVNNDISSWTKGRSGEALSLLKKRFSHRPVQEKFVCLNCGFETHADEQAALNIARSWLFLRSQEYKKYQTNKTTGNTDKRAFVETWQSFYRKKLKEVWKPAV

SEQ ID NO: 41267 - protein, 979 aa, synthetic construct
  REGION 1..979: note = engineered CasX variant
QEIGKRINKIRRRLVKDSNTKKAGKTGPMKTLLVRVMTPDLRERLENLRKKPENIPQPISNTSRANLNKLLTDYTEMKKAILHVYWEEFQKDPVGLMSRVAQPASKKIDQNKLKPEMDEKGNLTTAGFACSQCGQPLFVYKLEQVSEKGKAYTNYFGRCNVAEHEKLILLAQLKPEKDSDEAVTYSLGKFGQRALDFYSIHVTKESTHPVKPLAQIAGNRYASHPVGKALSDACMGTIASFLSKYQDIIIEHQKVVKGNQKRLESLRELAGKENLEYPSVTLPPQPHTKEGVDAYNEVIARVRMWVNLNLWQKLKLSRDDAKPLLRLKGFPSFPLVERQANEVDWWDMVCNVKKLINEKKEDGKVFWQNLAIYKRQEALRPYLSSEEDRKKGKKFARYQLGDLLLHLEKKHGEDWGKVYDEAWERIDKKVEGLSKHIKLEEERRSEDAQSKAALTDWLRAKASFVIEGLKEADKDEFCRCELKLQKWYGDLRGKPFAIEAENSILDISGFSKQYNCAFIWQKDGVKKLNLYLIINYFKGGKLRFKKIKPEAFEANRFYTVINKKSGEIVPMEVNFNFDDPNLIILPLAFGKRQGREFIWNDLLSLETGSLKLANGRVIEKTLYNRRTRQDEPALFVALTFERREVLDSSNIKPMNLIGVDRGENIPAVIALTDPEGCPLSRFKDSLGNPTHILRIGESYKEKQRTIQAKKEVEQRRAGGYSRKYASKAKNLADDMVRNTARDLLYYAVTQDAMLIFENLSRGFGRQGKRTFMAERQYTRMEDWLTAKLAYEGLPSKTYLSKTLAQYTSKTCSNCGFTITSADYDRVLEKLKKTATGWMTTINGKELKVEGQITYYNRYKRQNVVKDLSVELDRLSEESVNNDISSWTKGRSGEALSLLKKRFSHRPVQEKFVCLNCGFETHADEQAALNIARSWLFLRSQEYKKYQTNKTTGNTDKRAFVETWQSFYRKKLKEVWKPAV

SEQ ID NO: 41268 - protein, 979 aa, synthetic construct
  REGION 1..979: note = engineered CasX variant
QEIGKRINKIRRRLVKDSNTKKAGKTGPMKTLLVRVMTPDLRERLENLRKKPENIPQPISNTSRANLNKLLTDYTEMKKAILHVYWEEFQKDPVGLMSRVAQPASKKIDQNKLKPEMDEKGNLTTAGFACSQCGQPLFVYKLEQVSEKGKAYTNYFGRCNVAEHEKLILLAQLKPEKDSDEAVTYSLGKFGQRALDFYSIHVTKESTHPVKPLAQIAGNRYASSPVGKALSDACMGTIASFLSKYQDIIIEHQKVVKGNQKRLESLRELAGKENLEYPSVTLPPQPHTKEGVDAYNEVIARVRMWVNLNLWQKLKLSRDDAKPLLRLKGFPSFPLVERQANEVDWWDMVCNVKKLINEKKEDGKVFWQNLAIYKRQEALRPYLSSEEDRKKGKKFARYQLGDLLLHLEKKHGEDWGKVYDEAWERIDKKVEGLSKHIKLEEERRSEDAQSKAALTDWLRAKASFVIEGLKEADKDEFCRCELKLQKWYGDLRGKPFAIEAENSILDISGFSKQYNCAFIWQKDGVKKLNLYLIINYFKGGKLRFKKIKPEAFEANRFYTVINKKSGEIVPMEVNFNFDDPNLIILPLAFGKRQGREFIWNDLLSLETGSLKLANGRVIEKTLYNRRTRQDEPALFVALTFERREVLDSSNIKPMNLIGVDRGENIPAVIALTDPEGCPLSRFKDSLGNPTHILRIGESYKEKQRTIQAKKEVEQRRAGGYSRKYASKAKNLADDMVRNTARDLLYYAVTQDAMLIFENLSRGFGRQGKRTFMAERQYTRMEDWLTAKLAYEGLPSKTYLSKTLAQYTSKTCSNCGFTITSADYDRVLEKLKKTATGWMTTINGKELKVEGQITYYNRYKRQNVVKDLSVELDRLSEESVNNDISSWTKGRSGEALSLLKKRFSHRPVQEKFVCLNCGFETHADEQAALNIARSWLFLRSQEYKKYQTNKTTGNTDKRAFVETWQSFYRKKLKEVWKPAV

SEQ ID NO: 41269 - protein, 979 aa, synthetic construct
  REGION 1..979: note = engineered CasX variant
QEIGKRINKIRRRLVKDSNTKKAGKTGPMKTLLVRVMTPDLRERLENLRKKPENIPQPISNTSRANLNKLLTDYTEMKKAILHVYWEEFQKDPVGLMSRVAQPASKKIDQNKLKPEMDEKGNLTTAGFACSQCGQPLFVYKLEQVSEKGKAYTNYFGRCNVAEHEKLILLAQLKPEKDSDEAVTYSLGKFGQRALDFYSIHVTKESTHPVKPLAQIAGNRYASTPVGKALSDACMGTIASFLSKYQDIIIEHQKVVKGNQKRLESLRELAGKENLEYPSVTLPPQPHTKEGVDAYNEVIARVRMWVNLNLWQKLKLSRDDAKPLLRLKGFPSFPLVERQANEVDWWDMVCNVKKLINEKKEDGKVFWQNLAIYKRQEALRPYLSSEEDRKKGKKFARYQLGDLLLHLEKKHGEDWGKVYDEAWERIDKKVEGLSKHIKLEEERRSEDAQSKAALTDWLRAKASFVIEGLKEADKDEFCRCELKLQKWYGDLRGKPFAIEAENSILDISGFSKQYNCAFIWQKDGVKKLNLYLIINYFKGGKLRFKKIKPEAFEANRFYTVINKKSGEIVPMEVNFNFDDPNLIILPLAFGKRQGREFIWNDLLSLETGSLKLANGRVIEKTLYNRRTRQDEPALFVALTFERREVLDSSNIKPMNLIGVDRGENIPAVIALTDPEGCPLSRFKDSLGNPTHILRIGESYKEKQRTIQAKKEVEQRRAGGYSRKYASKAKNLADDMVRNTARDLLYYAVTQDAMLIFENLSRGFGRQGKRTFMAERQYTRMEDWLTAKLAYEGLPSKTYLSKTLAQYTSKTCSNCGFTITSADYDRVLEKLKKTATGWMTTINGKELKVEGQITYYNRYKRQNVVKDLSVELDRLSEESVNNDISSWTKGRSGEALSLLKKRFSHRPVQEKFVCLNCGFETHADEQAALNIARSWLFLRSQEYKKYQTNKTTGNTDKRAFVETWQSFYRKKLKEVWKPAV

SEQ ID NO: 41270 - protein, 979 aa, synthetic construct
  REGION 1..979: note = engineered CasX variant
QEIGKRINKIRRRLVKDSNTKKAGKTGPMKTLLVRVMTPDLRERLENLRKKPENIPQPISNTSRANLNKLLTDYTEMKKAILHVYWEEFQKDPVGLMSRVAQPASKKIDQNKLKPEMDEKGNLTTAGFACSQCGQPLFVYKLEQVSEKGKAYTNYFGRCNVAEHEKLILLAQLKPEKDSDEAVTYSLGKFGQRALDFYSIHVTKESTHPVKPLAQIAGNRYASAPVGKALSDACMGTIASFLSKYQDIIIEHQKVVKGNQKRLESLRELAGKENLEYPSVTLPPQPHTKEGVDAYNEVIARVRMWVNLNLWQKLKLSRDDAKPLLRLKGFPSFPLVERQANEVDWWDMVCNVKKLINEKKEDGKVFWQNLAIYKRQEALRPYLSSEEDRKKGKKFARYQLGDLLLHLEKKHGEDWGKVYDEAWERIDKKVEGLSKHIKLEEERRSEDAQSKAALTDWLRAKASFVIEGLKEADKDEFCRCELKLQKWYGDLRGKPFAIEAENSILDISGFSKQYNCAFIWQKDGVKKLNLYLIINYFKGGKLRFKKIKPEAFEANRFYTVINKKSGEIVPMEVNFNFDDPNLIILPLAFGKRQGREFIWNDLLSLETGSLKLANGRVIEKTLYNRRTRQDEPALFVALTFERREVLDSSNIKPMNLIGVDRGENIPAVIALTDPEGCPLSRFKDSLGNPTHILRIGESYKEKQRTIQAKKEVEQRRAGGYSRKYASKAKNLADDMVRNTARDLLYYAVTQDAMLIFENLSRGFGRQGKRTFMAERQYTRMEDWLTAKLAYEGLPSKTYLSKTLAQYTSKTCSNCGFTITSADYDRVLEKLKKTATGWMTTINGKELKVEGQITYYNRYKRQNVVKDLSVELDRLSEESVNNDISSWTKGRSGEALSLLKKRFSHRPVQEKFVCLNCGFETHADEQAALNIARSWLFLRSQEYKKYQTNKTTGNTDKRAFVETWQSFYRKKLKEVWKPAV

SEQ ID NO: 41271 - protein, 979 aa, synthetic construct
  REGION 1..979: note = engineered CasX variant
QEIGKRINKIRRRLVKDSNTKKAGKTGPMKTLLVRVMTPDLRERLENLRKKPENIPQPISNTSRANLNKLLTDYTEMKKAILHVYWEEFQKDPVGLMSRVAQPASKKIDQNKLKPEMDEKGNLTTAGFACSQCGQPLFVYKLEQVSEKGKAYTNYFGRCNVAEHEKLILLAQLKPEKDSDEAVTYSLGKFGQRALDFYSIHVTKESTHPVKPLAQIAGNRYASVPVGKALSDACMGTIASFLSKYQDIIIEHQKVVKGNQKRLESLRELAGKENLEYPSVTLPPQPHTKEGVDAYNEVIARVRMWVNLNLWQKLKLSRDDAKPLLRLKGFPSFPLVERQANEVDWWDMVCNVKKLINEKKEDGKVFWQNLAIYKRQEALRPYLSSEEDRKKGKKFARYQLGDLLLHLEKKHGEDWGKVYDEAWERIDKKVEGLSKHIKLEEERRSEDAQSKAALTDWLRAKASFVIEGLKEADKDEFCRCELKLQKWYGDLRGKPFAIEAENSILDISGFSKQYNCAFIWQKDGVKKLNLYLIINYFKGGKLRFKKIKPEAFEANRFYTVINKKSGEIVPMEVNFNFDDPNLIILPLAFGKRQGREFIWNDLLSLETGSLKLANGRVIEKTLYNRRTRQDEPALFVALTFERREVLDSSNIKPMNLIGVDRGENIPAVIALTDPEGCPLSRFKDSLGNPTHILRIGESYKEKQRTIQAKKEVEQRRAGGYSRKYASKAKNLADDMVRNTARDLLYYAVTQDAMLIFENLSRGFGRQGKRTFMAERQYTRMEDWLTAKLAYEGLPSKTYLSKTLAQYTSKTCSNCGFTITSADYDRVLEKLKKTATGWMTTINGKELKVEGQITYYNRYKRQNVVKDLSVELDRLSEESVNNDISSWTKGRSGEALSLLKKRFSHRPVQEKFVCLNCGFETHADEQAALNIARSWLFLRSQEYKKYQTNKTTGNTDKRAFVETWQSFYRKKLKEVWKPAV

SEQ ID NO: 41272 - protein, 979 aa, synthetic construct
  REGION 1..979: note = engineered CasX variant
QEIGKRINKIRRRLVKDSNTKKAGKTGPMKTLLVRVMTPDLRERLENLRKKPENIPQPISNTSRANLNKLLTDYTEMKKAILHVYWEEFQKDPVGLMSRVAQPASKKIDQNKLKPEMDEKGNLTTAGFACSQCGQPLFVYKLEQVSEKGKAYTNYFGRCNVAEHEKLIKLAQLKPEKDSDEAVTYSLGKFGQRALDFYSIHVTKESTHPVKPLAQIAGNRYASGPVGKALSDACMGTIASFLSKYQDIIIEHQKVVKGNQKRLESLRELAGKENLEYPSVTLPPQPHTKEGVDAYNEVIARVRMWVNLNLWQKLKLSRDDAKPLLRLKGFPSFPLVERQANEVDWWDMVCNVKKLINEKKEDGKVFWQNLAIYKRQEALRPYLSSEEDRKKGKKFARYQLGDLLLHLEKKHGEDWGKVYDEAWERIDKKVEGLSKHIKLEEERRSEDAQSKAALTDWLRAKASFVIEGLKEADKDEFCRCELKLQKWYGDLRGKPFAIEAENSILDISGFSKQYNCAFIWQKDGVKKLNLYLIINYFKGGKLRFKKIKPEAFEANRFYTVINKKSGEIVPMEVNFNFDDPNLIILPLAFGKRQGREFIWNDLLSLETGSLKLANGRVIEKTLYNRRTRQDEPALFVALTFERREVLDSSNIKPMNLIGVDRGENIPAVIALTDPEGCPLSRFKDSLGNPTHILRIGESYKEKQRTIQAKKEVEQRRAGGYSRKYASKAKNLADDMVRNTARDLLYYAVTQDAMLIFENLSRGFGRQGKRTFMAERQYTRMEDWLTAKLAYEGLPSKTYLSKTLAQYTSKTCSNCGFTITSADYDRVLEKLKKTATGWMTTINGKELKVEGQITYYNRYKRQNVVKDLSVELDRLSEESVNNDISSWTKGRSGEALSLLKKRFSHRPVQEKFVCLNCGFETHADEQAALNIARSWLFLRSQEYKKYQTNKTTGNTDKRAFVETWQSFYRKKLKEVWKPAV

SEQ ID NO: 41273 - protein, 978 aa, synthetic construct
  REGION 1..978: note = engineered CasX variant
QEIGKRINKIRRRLVKDSNTKKAGKTGPMKTLLVRVMTPDLRERLENLRKKPENIPQPISNTSRANLNKLLTDYTEMKKAILHVYWEEFQKDPVGLMSRVAQPASKKIDQNKLKPEMDEKGNLTTAGFACSQCGQPLFVYKLEQVSEKGKAYTNYFGRCNVAEHEKLILLAQLKPEKDSDEAVTYSLGKFGQRALDFYSIHVTKESTHPVKPLAQIAGNRYASPVGKALSDACMGTIASFLSKYQDIIIEHQKVVKGNQKRLESLRELAGKENLEYPSVTLPPQPHTKEGVDAYNEVIARVRMWVNLNLWQKLKLSRDDAKPLLRLKGFPSFPLVERQANEVDWWDMVCNVKKLINEKKEDGKVFWQNLAIYKRQEALRPYLSSEEDRKKGKKFARYQLGDLLLHLEKKHGEDWGKVYDEAWERIDKKVEGLSKHIKLEEERRSEDAQSKAALTDWLRAKASFVIEGLKEADKDEFCRCELKLQKWYGDLRGKPFAIEAENSILDISGFSKQYNCAFIWQKDGVKKLNLYLIINYFKGGKLRFKKIKPEAFEANRFYTVINKKSGEIVPMEVNFNFDDPNLIILPLAFGKRQGREFIWNDLLSLETGSLKLANGRVIEKTLYNRRTRQDEPALFVALTFERREVLDSSNIKPMNLIGVDRGENIPAVIALTDPEGCPLSRFKDSLGNPTHILRIGESYKEKQRTIQAKKEVEQRRAGGYSRKYASKAKNLADDMVRNTARDLLYYAVTQDAMLIFENLSRGFGRQGKRTFMAERQYTRMEDWLTAKLAYEGLPSKTYLSKTLAQYTSKTCSNCGFTITSADYDRVLEKLKKTATGWMTTINGKELKVEGQITYYNRYKRQNVVKDLSVELDRLSEESVNNDISSWTKGRSGEALSLLKKRFSHRPVQEKFVCLNCGFETHADEQAALNIARSWLFLRSQEYKKYQTNKTTGNTDKRAFVETWQSFYRKKLKEVWKPAV

SEQ ID NO: 41274 - protein, 979 aa, synthetic construct
  REGION 1..979: note = engineered CasX variant
QEIGKRINKIRRRLVKDSNTKKAGKTGPMKTLLVRVMTPDLRERLENLRKKPENIPQPISNTSRANLNKLLTDYTEMKKAILHVYWEEFQKDPVGLMSRVAQPASKKIDQNKLKPEMDEKGNLTTAGFACSQCGQPLFVYKLEQVSEKGKAYTNYFGRCNVAEHEKLILLAQLKPEKDSDEAVTYSLGKFGQRALDFYSIHVTKESTHPVKPLAQIAGNRYASYPVGKALSDACMGTIASFLSKYQDIIIEHQKVVKGNQKRLESLRELAGKENLEYPSVTLPPQPHTKEGVDAYNEVIARVRMWVNLNLWQKLKLSRDDAKPLLRLKGFPSFPLVERQANEVDWWDMVCNVKKLINEKKEDGKVFWQNLAGYKRQEALRPYLSSEEDREKGKKFARYQLGDLLLHLEKKHGEDWGKVYDEAWERIDKKVEGLSKHIKLEEERRSEDAQSKAALTDWLRAKASFVIEGLKEADKDEFCRCELKLQKWYGDLRGKPFAIEAENSILDISGFSKQYNCAFIWQKDGVKKLNLYLIINYFKGGKLRFKKIKPEAFEANRFYTVINKKSGEIVPMEVNFNFDDPNLIILPLAFGKRQGREFIWNDLLSLETGSLKLANGRVIEKTLYNRRTRQDEPALFVALTFERREVLDSSNIKPMNLIGVDRGENIPAVIALTDPEGCPLSRFKDSLGNPTHILRIGESYKEKQRTIQAKKEVEQRRAGGYSRKYASKAKNLADDMVRNTARDLLYYAVTQDAMLIFENLSRGFGRQGKRTFMAERQYTRMEDWLTAKLAYEGLPSKTYLSKTLAQYTSKTCSNCGFTITSADYDRVLEKLKKTATGWMTTINGKELKVEGQITYYNRYKRQNVVKDLSVELDRLSEESVNNDISSWTKGRSGEALSLLKKRFSHRPVQEKFVCLNCGFETHADEQAALNIARSWLFLRSQEYKKYQTNKTTGNTDKRAFVETWQSFYRKKLKEVWKPAV

SEQ ID NO: 41275 - protein, 979 aa, synthetic construct
  REGION 1..979: note = engineered CasX variant
QEIGKRINKIRRRLVKDSNTKKAGKTGPMKTLLVRVMTPDLRERLENLRKKPENIPQPISNTSRANLNKLLTDYTEMKKAILHVYWEEFQKDPVGLMSRVAQPASKKIDQNKLKPEMDEKGNLTTAGFACSQCGQPLFVYKLEQVSEKGKAYTNYFGRCNVAEHEKLILLAQLKPEKDSDEAVTYSLGKFGQRALDFYSIHVTKESTHPVKPLAQIAGNRYASHPVGKALSDACMGTIASFLSKYQDIIIEHQKVVKGNQKRLESLRELAGKENLEYPSVTLPPQPHTKEGVDAYNEVIARVRMWVNLNLWQKLKLSRDDAKPLLRLKGFPSFPLVERQANEVDWWDMVCNVKKLINEKKEDGKVFWQNLAGYKRQEALRPYLSSEEDREKGKKFARYQLGDLLLHLEKKHGEDWGKVYDEAWERIDKKVEGLSKHIKLEEERRSEDAQSKAALTDWLRAKASFVIEGLKEADKDEFCRCELKLQKWYGDLRGKPFAIEAENSILDISGFSKQYNCAFIWQKDGVKKLNLYLIINYFKGGKLRFKKIKPEAFEANRFYTVINKKSGEIVPMEVNFNFDDPNLIILPLAFGKRQGREFIWNDLLSLETGSLKLANGRVIEKTLYNRRTRQDEPALFVALTFERREVLDSSNIKPMNLIGVDRGENIPAVIALTDPEGCPLSRFKDSLGNPTHILRIGESYKEKQRTIQAKKEVEQRRAGGYSRKYASKAKNLADDMVRNTARDLLYYAVTQDAMLIFENLSRGFGRQGKRTFMAERQYTRMEDWLTAKLAYEGLPSKTYLSKTLAQYTSKTCSNCGFTITSADYDRVLEKLKKTATGWMTTINGKELKVEGQITYYNRYKRQNVVKDLSVELDRLSEESVNNDISSWTKGRSGEALSLLKKRFSHRPVQEKFVCLNCGFETHADEQAALNIARSWLFLRSQEYKKYQTNKTTGNTDKRAFVETWQSFYRKKLKEVWKPAV

SEQ ID NO: 41276 - protein, 979 aa, synthetic construct
  REGION 1..979: note = engineered CasX variant
QEIGKRINKIRRRLVKDSNTKKAGKTGPMKTLLVRVMTPDLRERLENLRKKPENIPQPISNTSRANLNKLLTDYTEMKKAILHVYWEEFQKDPVGLMSRVAQPASKKIDQNKLKPEMDEKGNLTTAGFACSQCGQPLFVYKLEQVSEKGKAYTNYFGRCNVAEHEKLILLAQLKPEKDSDEAVTYSLGKFGQRALDFYSIHVTKESTHPVKPLAQIAGNRYASSPVGKALSDACMGTIASFLSKYQDIIIEHQKVVKGNQKRLESLRELAGKENLEYPSVTLPPQPHTKEGVDAYNEVIARVRMWVNLNLWQKLKLSRDDAKPLLRLKGFPSFPLVERQANEVDWWDMVCNVKKLINEKKEDGKVFWQNLAGYKRQEALRPYLSSEEDREKGKKFARYQLGDLLLHLEKKHGEDWGKVYDEAWERIDKKVEGLSKHIKLEEERRSEDAQSKAALTDWLRAKASFVIEGLKEADKDEFCRCELKLQKWYGDLRGKPFAIEAENSILDISGFSKQYNCAFIWQKDGVKKLNLYLIINYFKGGKLRFKKIKPEAFEANRFYTVINKKSGEIVPMEVNFNFDDPNLIILPLAFGKRQGREFIWNDLLSLETGSLKLANGRVIEKTLYNRRTRQDEPALFVALTFERREVLDSSNIKPMNLIGVDRGENIPAVIALTDPEGCPLSRFKDSLGNPTHILRIGESYKEKQRTIQAKKEVEQRRAGGYSRKYASKAKNLADDMVRNTARDLLYYAVTQDAMLIFENLSRGFGRQGKRTFMAERQYTRMEDWLTAKLAYEGLPSKTYLSKTLAQYTSKTCSNCGFTITSADYDRVLEKLKKTATGWMTTINGKELKVEGQITYYNRYKRQNVVKDLSVELDRLSEESVNNDISSWTKGRSGEALSLLKKRFSHRPVQEKFVCLNCGFETHADEQAALNIARSWLFLRSQEYKKYQTNKTTGNTDKRAFVETWQSFYRKKLKEVWKPAV

SEQ ID NO: 41277 - protein, 979 aa, synthetic construct
  REGION 1..979: note = engineered CasX variant
QEIGKRINKIRRRLVKDSNTKKAGKTGPMKTLLVRVMTPDLRERLENLRKKPENIPQPISNTSRANLNKLLTDYTEMKKAILHVYWEEFQKDPVGLMSRVAQPASKKIDQNKLKPEMDEKGNLTTAGFACSQCGQPLFVYKLEQVSEKGKAYTNYFGRCNVAEHEKLILLAQLKPEKDSDEAVTYSLGKFGQRALDFYSIHVTKESTHPVKPLAQIAGNRYASTPVGKALSDACMGTIASFLSKYQDIIIEHQKVVKGNQKRLESLRELAGKENLEYPSVTLPPQPHTKEGVDAYNEVIARVRMWVNLNLWQKLKLSRDDAKPLLRLKGFPSFPLVERQANEVDWWDMVCNVKKLINEKKEDGKVFWQNLAGYKRQEALRPYLSSEEDREKGKKFARYQLGDLLLHLEKKHGEDWGKVYDEAWERIDKKVEGLSKHIKLEEERRSEDAQSKAALTDWLRAKASFVIEGLKEADKDEFCRCELKLQKWYGDLRGKPFAIEAENSILDISGFSKQYNCAFIWQKDGVKKLNLYLIINYFKGGKLRFKKIKPEAFEANRFYTVINKKSGEIVPMEVNFNFDDPNLIILPLAFGKRQGREFIWNDLLSLETGSLKLANGRVIEKTLYNRRTRQDEPALFVALTFERREVLDSSNIKPMNLIGVDRGENIPAVIALTDPEGCPLSRFKDSLGNPTHILRIGESYKEKQRTIQAKKEVEQRRAGGYSRKYASKAKNLADDMVRNTARDLLYYAVTQDAMLIFENLSRGFGRQGKRTFMAERQYTRMEDWLTAKLAYEGLPSKTYLSKTLAQYTSKTCSNCGFTITSADYDRVLEKLKKTATGWMTTINGKELKVEGQITYYNRYKRQNVVKDLSVELDRLSEESVNNDISSWTKGRSGEALSLLKKRFSHRPVQEKFVCLNCGFETHADEQAALNIARSWLFLRSQEYKKYQTNKTTGNTDKRAFVETWQSFYRKKLKEVWKPAV

SEQ ID NO: 41278 - protein, 979 aa, synthetic construct
  REGION 1..979: note = engineered CasX variant
QEIGKRINKIRRRLVKDSNTKKAGKTGPMKTLLVRVMTPDLRERLENLRKKPENIPQPISNTSRANLNKLLTDYTEMKKAILHVYWEEFQKDPVGLMSRVAQPASKKIDQNKLKPEMDEKGNLTTAGFACSQCGQPLFVYKLEQVSEKGKAYTNYFGRCNVAEHEKLILLAQLKPEKDSDEAVTYSLGKFGQRALDFYSIHVTKESTHPVKPLAQIAGNRYASAPVGKALSDACMGTIASFLSKYQDIIIEHQKVVKGNQKRLESLRELAGKENLEYPSVTLPPQPHTKEGVDAYNEVIARVRMWVNLNLWQKLKLSRDDAKPLLRLKGFPSFPLVERQANEVDWWDMVCNVKKLINEKKEDGKVFWQNLAGYKRQEALRPYLSSEEDREKGKKFARYQLGDLLLHLEKKHGEDWGKVYDEAWERIDKKVEGLSKHIKLEEERRSEDAQSKAALTDWLRAKASFVIEGLKEADKDEFCRCELKLQKWYGDLRGKPFAIEAENSILDISGFSKQYNCAFIWQKDGVKKLNLYLIINYFKGGKLRFKKIKPEAFEANRFYTVINKKSGEIVPMEVNFNFDDPNLIILPLAFGKRQGREFIWNDLLSLETGSLKLANGRVIEKTLYNRRTRQDEPALFVALTFERREVLDSSNIKPMNLIGVDRGENIPAVIALTDPEGCPLSRFKDSLGNPTHILRIGESYKEKQRTIQAKKEVEQRRAGGYSRKYASKAKNLADDMVRNTARDLLYYAVTQDAMLIFENLSRGFGRQGKRTFMAERQYTRMEDWLTAKLAYEGLPSKTYLSKTLAQYTSKTCSNCGFTITSADYDRVLEKLKKTATGWMTTINGKELKVEGQITYYNRYKRQNVVKDLSVELDRLSEESVNNDISSWTKGRSGEALSLLKKRFSHRPVQEKFVCLNCGFETHADEQAALNIARSWLFLRSQEYKKYQTNKTTGNTDKRAFVETWQSFYRKKLKEVWKPAV

SEQ ID NO: 41279 - protein, 979 aa, synthetic construct
  REGION 1..979: note = engineered CasX variant
QEIGKRINKIRRRLVKDSNTKKAGKTGPMKTLLVRVMTPDLRERLENLRKKPENIPQPISNTSRANLNKLLTDYTEMKKAILHVYWEEFQKDPVGLMSRVAQPASKKIDQNKLKPEMDEKGNLTTAGFACSQCGQPLFVYKLEQVSEKGKAYTNYFGRCNVAEHEKLILLAQLKPEKDSDEAVTYSLGKFGQRALDFYSIHVTKESTHPVKPLAQIAGNRYASVPVGKALSDACMGTIASFLSKYQDIIIEHQKVVKGNQKRLESLRELAGKENLEYPSVTLPPQPHTKEGVDAYNEVIARVRMWVNLNLWQKLKLSRDDAKPLLRLKGFPSFPLVERQANEVDWWDMVCNVKKLINEKKEDGKVFWQNLAGYKRQEALRPYLSSEEDREKGKKFARYQLGDLLLHLEKKHGEDWGKVYDEAWERIDKKVEGLSKHIKLEEERRSEDAQSKAALTDWLRAKASFVIEGLKEADKDEFCRCELKLQKWYGDLRGKPFAIEAENSILDISGFSKQYNCAFIWQKDGVKKLNLYLIINYFKGGKLRFKKIKPEAFEANRFYTVINKKSGEIVPMEVNFNFDDPNLIILPLAFGKRQGREFIWNDLLSLETGSLKLANGRVIEKTLYNRRTRQDEPALFVALTFERREVLDSSNIKPMNLIGVDRGENIPAVIALTDPEGCPLSRFKDSLGNPTHILRIGESYKEKQRTIQAKKEVEQRRAGGYSRKYASKAKNLADDMVRNTARDLLYYAVTQDAMLIFENLSRGFGRQGKRTFMAERQYTRMEDWLTAKLAYEGLPSKTYLSKTLAQYTSKTCSNCGFTITSADYDRVLEKLKKTATGWMTTINGKELKVEGQITYYNRYKRQNVVKDLSVELDRLSEESVNNDISSWTKGRSGEALSLLKKRFSHRPVQEKFVCLNCGFETHADEQAALNIARSWLFLRSQEYKKYQTNKTTGNTDKRAFVETWQSFYRKKLKEVWKPAV

SEQ ID NO: 41280 - protein, 979 aa, synthetic construct
  REGION 1..979: note = engineered CasX variant
QEIGKRINKIRRRLVKDSNTKKAGKTGPMKTLLVRVMTPDLRERLENLRKKPENIPQPISNTSRANLNKLLTDYTEMKKAILHVYWEEFQKDPVGLMSRVAQPASKKIDQNKLKPEMDEKGNLTTAGFACSQCGQPLFVYKLEQVSEKGKAYTNYFGRCNVAEHEKLIKLAQLKPEKDSDEAVTYSLGKFGQRALDFYSIHVTKESTHPVKPLAQIAGNRYASGPVGKALSDACMGTIASFLSKYQDIIIEHQKVVKGNQKRLESLRELAGKENLEYPSVTLPPQPHTKEGVDAYNEVIARVRMWVNLNLWQKLKLSRDDAKPLLRLKGFPSFPLVERQANEVDWWDMVCNVKKLINEKKEDGKVFWQNLAGYKRQEALRPYLSSEEDREKGKKFARYQLGDLLLHLEKKHGEDWGKVYDEAWERIDKKVEGLSKHIKLEEERRSEDAQSKAALTDWLRAKASFVIEGLKEADKDEFCRCELKLQKWYGDLRGKPFAIEAENSILDISGFSKQYNCAFIWQKDGVKKLNLYLIINYFKGGKLRFKKIKPEAFEANRFYTVINKKSGEIVPMEVNFNFDDPNLIILPLAFGKRQGREFIWNDLLSLETGSLKLANGRVIEKTLYNRRTRQDEPALFVALTFERREVLDSSNIKPMNLIGVDRGENIPAVIALTDPEGCPLSRFKDSLGNPTHILRIGESYKEKQRTIQAKKEVEQRRAGGYSRKYASKAKNLADDMVRNTARDLLYYAVTQDAMLIFENLSRGFGRQGKRTFMAERQYTRMEDWLTAKLAYEGLPSKTYLSKTLAQYTSKTCSNCGFTITSADYDRVLEKLKKTATGWMTTINGKELKVEGQITYYNRYKRQNVVKDLSVELDRLSEESVNNDISSWTKGRSGEALSLLKKRFSHRPVQEKFVCLNCGFETHADEQAALNIARSWLFLRSQEYKKYQTNKTTGNTDKRAFVETWQSFYRKKLKEVWKPAV

SEQ ID NO: 41281 - protein, 978 aa, synthetic construct
  REGION 1..978: note = engineered CasX variant
QEIGKRINKIRRRLVKDSNTKKAGKTGPMKTLLVRVMTPDLRERLENLRKKPENIPQPISNTSRANLNKLLTDYTEMKKAILHVYWEEFQKDPVGLMSRVAQPASKKIDQNKLKPEMDEKGNLTTAGFACSQCGQPLFVYKLEQVSEKGKAYTNYFGRCNVAEHEKLILLAQLKPEKDSDEAVTYSLGKFGQRALDFYSIHVTKESTHPVKPLAQIAGNRYASPVGKALSDACMGTIASFLSKYQDIIIEHQKVVKGNQKRLESLRELAGKENLEYPSVTLPPQPHTKEGVDAYNEVIARVRMWVNLNLWQKLKLSRDDAKPLLRLKGFPSFPLVERQANEVDWWDMVCNVKKLINEKKEDGKVFWQNLAGYKRQEALRPYLSSEEDREKGKKFARYQLGDLLLHLEKKHGEDWGKVYDEAWERIDKKVEGLSKHIKLEEERRSEDAQSKAALTDWLRAKASFVIEGLKEADKDEFCRCELKLQKWYGDLRGKPFAIEAENSILDISGFSKQYNCAFIWQKDGVKKLNLYLIINYFKGGKLRFKKIKPEAFEANRFYTVINKKSGEIVPMEVNFNFDDPNLIILPLAFGKRQGREFIWNDLLSLETGSLKLANGRVIEKTLYNRRTRQDEPALFVALTFERREVLDSSNIKPMNLIGVDRGENIPAVIALTDPEGCPLSRFKDSLGNPTHILRIGESYKEKQRTIQAKKEVEQRRAGGYSRKYASKAKNLADDMVRNTARDLLYYAVTQDAMLIFENLSRGFGRQGKRTFMAERQYTRMEDWLTAKLAYEGLPSKTYLSKTLAQYTSKTCSNCGFTITSADYDRVLEKLKKTATGWMTTINGKELKVEGQITYYNRYKRQNVVKDLSVELDRLSEESVNNDISSWTKGRSGEALSLLKKRFSHRPVQEKFVCLNCGFETHADEQAALNIARSWLFLRSQEYKKYQTNKTTGNTDKRAFVETWQSFYRKKLKEVWKPAV

SEQ ID NO: 41282 - protein, 979 aa, synthetic construct
  REGION 1..979: note = engineered CasX variant
QEIGKRINKIRRRLVKDSNTKKAGKTGPMKTLLVRVMTPDLRERLENLRKKPENIPQPISNTSRANLNKLLTDYTEMKKAILHVYWEEFQKDPVGLMSRVAQPASKKIDQNKLKPEMDEKGNLTTAGFACSQCGQPLFVYKLEQVSEKGKAYTNYFGRCNVAEHEKLILLAQLKPEKDSDEAVTYSLGKFGQRALDFYSIHVTKESTHPVKPLAQIAGNRYASYPVGKALSDACMGTIASFLSKYQDIIIEHQKVVKGNQKRLESLRELAGKENLEYPSVTLPPQPHTKEGVDAYNEVIARVRMWVNLNLWQKLKLSRDDAKPLLRLKGFPSFPLVERQANEVDWWDMVCNVKKLINEKKEDGKVFWQNLAGYKRQEALRPYLSSEEDRKKGKKFARYQLGDLLLHLEKKHGEDWGKVYDEAWERIDKKVEGLSKHIKLEEERRSEDAQSKAALTDWLRAKASFVIEGLKEADKDEFCRCELKLQKWYGDLRGKPFAIEAENSILDISGFSKQYNCAFIWQKDGVKKLNLYLIINYFKGGKLRFKKIKPEAFEANRFYTVINKKSGEIVIMEVNFNFDDPNLIILPLAFGKRQGREFIWNDLLSLETGSLKLANGRVIEKTLYNRRTRQDEPALFVALTFERREVLDSSNIKPMNLIGVDRGENIPAVIALTDPEGCPLSRFKDSLGNPTHILRIGESYKEKQRTIQAKKEVEQRRAGGYSRKYASKAKNLADDMVRNTARDLLYYAVTQDAMLIFENLSRGFGRQGKRTFMAERQYTRMEDWLTAKLAYEGLPSKTYLSKTLAQYTSKTCSNCGFTITSADYDRVLEKLKKTATGWMTTINGKELKVEGQITYYNRYKRQNVVKDLSVELDRLSEESVNNDISSWTKGRSGEALSLLKKRFSHRPVQEKFVCLNCGFETHADEQAALNIARSWLFLRSQEYKKYQTNKTTGNTDKRAFVETWQSFYRKKLKEVWKPAV

SEQ ID NO: 41283 - protein, 979 aa, synthetic construct
  REGION 1..979: note = engineered CasX variant
QEIGKRINKIRRRLVKDSNTKKAGKTGPMKTLLVRVMTPDLRERLENLRKKPENIPQPISNTSRANLNKLLTDYTEMKKAILHVYWEEFQKDPVGLMSRVAQPASKKIDQNKLKPEMDEKGNLTTAGFACSQCGQPLFVYKLEQVSEKGKAYTNYFGRCNVAEHEKLILLAQLKPEKDSDEAVTYSLGKFGQRALDFYSIHVTKESTHPVKPLAQIAGNRYASHPVGKALSDACMGTIASFLSKYQDIIIEHQKVVKGNQKRLESLRELAGKENLEYPSVTLPPQPHTKEGVDAYNEVIARVRMWVNLNLWQKLKLSRDDAKPLLRLKGFPSFPLVERQANEVDWWDMVCNVKKLINEKKEDGKVFWQNLAGYKRQEALRPYLSSEEDRKKGKKFARYQLGDLLLHLEKKHGEDWGKVYDEAWERIDKKVEGLSKHIKLEEERRSEDAQSKAALTDWLRAKASFVIEGLKEADKDEFCRCELKLQKWYGDLRGKPFAIEAENSILDISGFSKQYNCAFIWQKDGVKKLNLYLIINYFKGGKLRFKKIKPEAFEANRFYTVINKKSGEIVIMEVNFNFDDPNLIILPLAFGKRQGREFIWNDLLSLETGSLKLANGRVIEKTLYNRRTRQDEPALFVALTFERREVLDSSNIKPMNLIGVDRGENIPAVIALTDPEGCPLSRFKDSLGNPTHILRIGESYKEKQRTIQAKKEVEQRRAGGYSRKYASKAKNLADDMVRNTARDLLYYAVTQDAMLIFENLSRGFGRQGKRTFMAERQYTRMEDWLTAKLAYEGLPSKTYLSKTLAQYTSKTCSNCGFTITSADYDRVLEKLKKTATGWMTTINGKELKVEGQITYYNRYKRQNVVKDLSVELDRLSEESVNNDISSWTKGRSGEALSLLKKRFSHRPVQEKFVCLNCGFETHADEQAALNIARSWLFLRSQEYKKYQTNKTTGNTDKRAFVETWQSFYRKKLKEVWKPAV

SEQ ID NO: 41284 - protein, 979 aa, synthetic construct
  REGION 1..979: note = engineered CasX variant
QEIGKRINKIRRRLVKDSNTKKAGKTGPMKTLLVRVMTPDLRERLENLRKKPENIPQPISNTSRANLNKLLTDYTEMKKAILHVYWEEFQKDPVGLMSRVAQPASKKIDQNKLKPEMDEKGNLTTAGFACSQCGQPLFVYKLEQVSEKGKAYTNYFGRCNVAEHEKLILLAQLKPEKDSDEAVTYSLGKFGQRALDFYSIHVTKESTHPVKPLAQIAGNRYASSPVGKALSDACMGTIASFLSKYQDIIIEHQKVVKGNQKRLESLRELAGKENLEYPSVTLPPQPHTKEGVDAYNEVIARVRMWVNLNLWQKLKLSRDDAKPLLRLKGFPSFPLVERQANEVDWWDMVCNVKKLINEKKEDGKVFWQNLAGYKRQEALRPYLSSEEDRKKGKKFARYQLGDLLLHLEKKHGEDWGKVYDEAWERIDKKVEGLSKHIKLEEERRSEDAQSKAALTDWLRAKASFVIEGLKEADKDEFCRCELKLQKWYGDLRGKPFAIEAENSILDISGFSKQYNCAFIWQKDGVKKLNLYLIINYFKGGKLRFKKIKPEAFEANRFYTVINKKSGEIVIMEVNFNFDDPNLIILPLAFGKRQGREFIWNDLLSLETGSLKLANGRVIEKTLYNRRTRQDEPALFVALTFERREVLDSSNIKPMNLIGVDRGENIPAVIALTDPEGCPLSRFKDSLGNPTHILRIGESYKEKQRTIQAKKEVEQRRAGGYSRKYASKAKNLADDMVRNTARDLLYYAVTQDAMLIFENLSRGFGRQGKRTFMAERQYTRMEDWLTAKLAYEGLPSKTYLSKTLAQYTSKTCSNCGFTITSADYDRVLEKLKKTATGWMTTINGKELKVEGQITYYNRYKRQNVVKDLSVELDRLSEESVNNDISSWTKGRSGEALSLLKKRFSHRPVQEKFVCLNCGFETHADEQAALNIARSWLFLRSQEYKKYQTNKTTGNTDKRAFVETWQSFYRKKLKEVWKPAV

SEQ ID NO: 41285 - protein, 979 aa, synthetic construct
  REGION 1..979: note = engineered CasX variant
QEIGKRINKIRRRLVKDSNTKKAGKTGPMKTLLVRVMTPDLRERLENLRKKPENIPQPISNTSRANLNKLLTDYTEMKKAILHVYWEEFQKDPVGLMSRVAQPASKKIDQNKLKPEMDEKGNLTTAGFACSQCGQPLFVYKLEQVSEKGKAYTNYFGRCNVAEHEKLILLAQLKPEKDSDEAVTYSLGKFGQRALDFYSIHVTKESTHPVKPLAQIAGNRYASTPVGKALSDACMGTIASFLSKYQDIIIEHQKVVKGNQKRLESLRELAGKENLEYPSVTLPPQPHTKEGVDAYNEVIARVRMWVNLNLWQKLKLSRDDAKPLLRLKGFPSFPLVERQANEVDWWDMVCNVKKLINEKKEDGKVFWQNLAGYKRQEALRPYLSSEEDRKKGKKFARYQLGDLLLHLEKKHGEDWGKVYDEAWERIDKKVEGLSKHIKLEEERRSEDAQSKAALTDWLRAKASFVIEGLKEADKDEFCRCELKLQKWYGDLRGKPFAIEAENSILDISGFSKQYNCAFIWQKDGVKKLNLYLIINYFKGGKLRFKKIKPEAFEANRFYTVINKKSGEIVIMEVNFNFDDPNLIILPLAFGKRQGREFIWNDLLSLETGSLKLANGRVIEKTLYNRRTRQDEPALFVALTFERREVLDSSNIKPMNLIGVDRGENIPAVIALTDPEGCPLSRFKDSLGNPTHILRIGESYKEKQRTIQAKKEVEQRRAGGYSRKYASKAKNLADDMVRNTARDLLYYAVTQDAMLIFENLSRGFGRQGKRTFMAERQYTRMEDWLTAKLAYEGLPSKTYLSKTLAQYTSKTCSNCGFTITSADYDRVLEKLKKTATGWMTTINGKELKVEGQITYYNRYKRQNVVKDLSVELDRLSEESVNNDISSWTKGRSGEALSLLKKRFSHRPVQEKFVCLNCGFETHADEQAALNIARSWLFLRSQEYKKYQTNKTTGNTDKRAFVETWQSFYRKKLKEVWKPAV

SEQ ID NO: 41286 - protein, 979 aa, synthetic construct
  REGION 1..979: note = engineered CasX variant
QEIGKRINKIRRRLVKDSNTKKAGKTGPMKTLLVRVMTPDLRERLENLRKKPENIPQPISNTSRANLNKLLTDYTEMKKAILHVYWEEFQKDPVGLMSRVAQPASKKIDQNKLKPEMDEKGNLTTAGFACSQCGQPLFVYKLEQVSEKGKAYTNYFGRCNVAEHEKLILLAQLKPEKDSDEAVTYSLGKFGQRALDFYSIHVTKESTHPVKPLAQIAGNRYASAPVGKALSDACMGTIASFLSKYQDIIIEHQKVVKGNQKRLESLRELAGKENLEYPSVTLPPQPHTKEGVDAYNEVIARVRMWVNLNLWQKLKLSRDDAKPLLRLKGFPSFPLVERQANEVDWWDMVCNVKKLINEKKEDGKVFWQNLAGYKRQEALRPYLSSEEDRKKGKKFARYQLGDLLLHLEKKHGEDWGKVYDEAWERIDKKVEGLSKHIKLEEERRSEDAQSKAALTDWLRAKASFVIEGLKEADKDEFCRCELKLQKWYGDLRGKPFAIEAENSILDISGFSKQYNCAFIWQKDGVKKLNLYLIINYFKGGKLRFKKIKPEAFEANRFYTVINKKSGEIVIMEVNFNFDDPNLIILPLAFGKRQGREFIWNDLLSLETGSLKLANGRVIEKTLYNRRTRQDEPALFVALTFERREVLDSSNIKPMNLIGVDRGENIPAVIALTDPEGCPLSRFKDSLGNPTHILRIGESYKEKQRTIQAKKEVEQRRAGGYSRKYASKAKNLADDMVRNTARDLLYYAVTQDAMLIFENLSRGFGRQGKRTFMAERQYTRMEDWLTAKLAYEGLPSKTYLSKTLAQYTSKTCSNCGFTITSADYDRVLEKLKKTATGWMTTINGKELKVEGQITYYNRYKRQNVVKDLSVELDRLSEESVNNDISSWTKGRSGEALSLLKKRFSHRPVQEKFVCLNCGFETHADEQAALNIARSWLFLRSQEYKKYQTNKTTGNTDKRAFVETWQSFYRKKLKEVWKPAV

SEQ ID NO: 41287 - protein, 979 aa, synthetic construct
  REGION 1..979: note = engineered CasX variant
QEIGKRINKIRRRLVKDSNTKKAGKTGPMKTLLVRVMTPDLRERLENLRKKPENIPQPISNTSRANLNKLLTDYTEMKKAILHVYWEEFQKDPVGLMSRVAQPASKKIDQNKLKPEMDEKGNLTTAGFACSQCGQPLFVYKLEQVSEKGKAYTNYFGRCNVAEHEKLILLAQLKPEKDSDEAVTYSLGKFGQRALDFYSIHVTKESTHPVKPLAQIAGNRYASVPVGKALSDACMGTIASFLSKYQDIIIEHQKVVKGNQKRLESLRELAGKENLEYPSVTLPPQPHTKEGVDAYNEVIARVRMWVNLNLWQKLKLSRDDAKPLLRLKGFPSFPLVERQANEVDWWDMVCNVKKLINEKKEDGKVFWQNLAGYKRQEALRPYLSSEEDRKKGKKFARYQLGDLLLHLEKKHGEDWGKVYDEAWERIDKKVEGLSKHIKLEEERRSEDAQSKAALTDWLRAKASFVIEGLKEADKDEFCRCELKLQKWYGDLRGKPFAIEAENSILDISGFSKQYNCAFIWQKDGVKKLNLYLIINYFKGGKLRFKKIKPEAFEANRFYTVINKKSGEIVIMEVNFNFDDPNLIILPLAFGKRQGREFIWNDLLSLETGSLKLANGRVIEKTLYNRRTRQDEPALFVALTFERREVLDSSNIKPMNLIGVDRGENIPAVIALTDPEGCPLSRFKDSLGNPTHILRIGESYKEKQRTIQAKKEVEQRRAGGYSRKYASKAKNLADDMVRNTARDLLYYAVTQDAMLIFENLSRGFGRQGKRTFMAERQYTRMEDWLTAKLAYEGLPSKTYLSKTLAQYTSKTCSNCGFTITSADYDRVLEKLKKTATGWMTTINGKELKVEGQITYYNRYKRQNVVKDLSVELDRLSEESVNNDISSWTKGRSGEALSLLKKRFSHRPVQEKFVCLNCGFETHADEQAALNIARSWLFLRSQEYKKYQTNKTTGNTDKRAFVETWQSFYRKKLKEVWKPAV

SEQ ID NO: 41288 - protein, 979 aa, synthetic construct
  REGION 1..979: note = engineered CasX variant
QEIGKRINKIRRRLVKDSNTKKAGKTGPMKTLLVRVMTPDLRERLENLRKKPENIPQPISNTSRANLNKLLTDYTEMKKAILHVYWEEFQKDPVGLMSRVAQPASKKIDQNKLKPEMDEKGNLTTAGFACSQCGQPLFVYKLEQVSEKGKAYTNYFGRCNVAEHEKLIKLAQLKPEKDSDEAVTYSLGKFGQRALDFYSIHVTKESTHPVKPLAQIAGNRYASGPVGKALSDACMGTIASFLSKYQDIIIEHQKVVKGNQKRLESLRELAGKENLEYPSVTLPPQPHTKEGVDAYNEVIARVRMWVNLNLWQKLKLSRDDAKPLLRLKGFPSFPLVERQANEVDWWDMVCNVKKLINEKKEDGKVFWQNLAGYKRQEALRPYLSSEEDRKKGKKFARYQLGDLLLHLEKKHGEDWGKVYDEAWERIDKKVEGLSKHIKLEEERRSEDAQSKAALTDWLRAKASFVIEGLKEADKDEFCRCELKLQKWYGDLRGKPFAIEAENSILDISGFSKQYNCAFIWQKDGVKKLNLYLIINYFKGGKLRFKKIKPEAFEANRFYTVINKKSGEIVIMEVNFNFDDPNLIILPLAFGKRQGREFIWNDLLSLETGSLKLANGRVIEKTLYNRRTRQDEPALFVALTFERREVLDSSNIKPMNLIGVDRGENIPAVIALTDPEGCPLSRFKDSLGNPTHILRIGESYKEKQRTIQAKKEVEQRRAGGYSRKYASKAKNLADDMVRNTARDLLYYAVTQDAMLIFENLSRGFGRQGKRTFMAERQYTRMEDWLTAKLAYEGLPSKTYLSKTLAQYTSKTCSNCGFTITSADYDRVLEKLKKTATGWMTTINGKELKVEGQITYYNRYKRQNVVKDLSVELDRLSEESVNNDISSWTKGRSGEALSLLKKRFSHRPVQEKFVCLNCGFETHADEQAALNIARSWLFLRSQEYKKYQTNKTTGNTDKRAFVETWQSFYRKKLKEVWKPAV

SEQ ID NO: 41289 - protein, 978 aa, synthetic construct
  REGION 1..978: note = engineered CasX variant
QEIGKRINKIRRRLVKDSNTKKAGKTGPMKTLLVRVMTPDLRERLENLRKKPENIPQPISNTSRANLNKLLTDYTEMKKAILHVYWEEFQKDPVGLMSRVAQPASKKIDQNKLKPEMDEKGNLTTAGFACSQCGQPLFVYKLEQVSEKGKAYTNYFGRCNVAEHEKLILLAQLKPEKDSDEAVTYSLGKFGQRALDFYSIHVTKESTHPVKPLAQIAGNRYASPVGKALSDACMGTIASFLSKYQDIIIEHQKVVKGNQKRLESLRELAGKENLEYPSVTLPPQPHTKEGVDAYNEVIARVRMWVNLNLWQKLKLSRDDAKPLLRLKGFPSFPLVERQANEVDWWDMVCNVKKLINEKKEDGKVFWQNLAGYKRQEALRPYLSSEEDRKKGKKFARYQLGDLLLHLEKKHGEDWGKVYDEAWERIDKKVEGLSKHIKLEEERRSEDAQSKAALTDWLRAKASFVIEGLKEADKDEFCRCELKLQKWYGDLRGKPFAIEAENSILDISGFSKQYNCAFIWQKDGVKKLNLYLIINYFKGGKLRFKKIKPEAFEANRFYTVINKKSGEIVIMEVNFNFDDPNLIILPLAFGKRQGREFIWNDLLSLETGSLKLANGRVIEKTLYNRRTRQDEPALFVALTFERREVLDSSNIKPMNLIGVDRGENIPAVIALTDPEGCPLSRFKDSLGNPTHILRIGESYKEKQRTIQAKKEVEQRRAGGYSRKYASKAKNLADDMVRNTARDLLYYAVTQDAMLIFENLSRGFGRQGKRTFMAERQYTRMEDWLTAKLAYEGLPSKTYLSKTLAQYTSKTCSNCGFTITSADYDRVLEKLKKTATGWMTTINGKELKVEGQITYYNRYKRQNVVKDLSVELDRLSEESVNNDISSWTKGRSGEALSLLKKRFSHRPVQEKFVCLNCGFETHADEQAALNIARSWLFLRSQEYKKYQTNKTTGNTDKRAFVETWQSFYRKKLKEVWKPAV

SEQ ID NO: 41290 - protein, 978 aa, synthetic construct
  REGION 1..978: note = engineered CasX variant
QEIGRINKIRRRLVKDSNTKKAGKTGPMKTLLVRVMTPDLRERLENLRKKPENIPQPISNTSRANLNKLLTDYTEMKKAILHVYWEEFQKDPVGLMSRVAQPASKKIDQNKLKPEMDEKGNLTTAGFACSQCGQPLFVYKLEQVSEKGKAYTNYFGRCNVAEHEKLILLAQLKPEKDSDEAVTYSLGKFGQRALDFYSIHVTKESTHPVKPLAQIAGNRYASYPVGKALSGACMGTIASFLSKYQDIIIEHQKVVKGNQKRLESLRELAGKENLEYPSVTLPPQPHTKEGVDAYNEVIARVRMWVNLNLWQKLKLSRDDAKPLLRLKGFPSFPLVERQANEVDWWDMVCNVKKLINEKKEDGKVFWQNLAGYKRQEALRPYLSSEEDRKKGKKFARYQLGDLLLHLEKKHGEDWGKVYDEAWERIDKKVEGLSKHIKLEEERRSEDAQSKAALTDWLRAKASFVIEGLKEADKDEFCRCELKLQKWYGDLRGKPFAIEAENSILDISGFSKQYNCAFIWQKDGVKKLNLYLIINYFKGGKLRFKKIKPEAFEANRFYTVINKKSGEIVPMEVNFNFDDPNLIILPLAFGKRQGREFIWNDLLSLETGSLKLANGRVIEKTLYNRRTRQDEPALFVALTFERREVLDSSNIKPMNLIGVDRGENIPAVIALTDPEGCPLSRFKDSLGNPTHILRIGESYKEKQRTIQAKKEVEQRRAGGYSRKYASKAKNLADDMVRNTARDLLYYAVTQDAMLIFENLSRGFGRQGKRTFMAERQYTRMEDWLTAKLAYEGLPSKTYLSKTLAQYTSKTCSNCGFTITSADYDRVLEKLKKTATGWMTTINGKELKVEGQITYYNRYKRQNVVKDLSVELDRLSEESVNNDISSWTKGRSGEALSLLKKRFSHRPVQEKFVCLNCGFETHADEQAALNIARSWLFLRSQEYKKYQTNKTTGNTDKRAFVETWQSFYRKKLKEVWKPAV

SEQ ID NO: 41291 - protein, 978 aa, synthetic construct
  REGION 1..978: note = engineered CasX variant
QEIGRINKIRRRLVKDSNTKKAGKTGPMKTLLVRVMTPDLRERLENLRKKPENIPQPISNTSRANLNKLLTDYTEMKKAILHVYWEEFQKDPVGLMSRVAQPASKKIDQNKLKPEMDEKGNLTTAGFACSQCGQPLFVYKLEQVSEKGKAYTNYFGRCNVAEHEKLILLAQLKPEKDSDEAVTYSLGKFGQRALDFYSIHVTKESTHPVKPLAQIAGNRYASHPVGKALSGACMGTIASFLSKYQDIIIEHQKVVKGNQKRLESLRELAGKENLEYPSVTLPPQPHTKEGVDAYNEVIARVRMWVNLNLWQKLKLSRDDAKPLLRLKGFPSFPLVERQANEVDWWDMVCNVKKLINEKKEDGKVFWQNLAGYKRQEALRPYLSSEEDRKKGKKFARYQLGDLLLHLEKKHGEDWGKVYDEAWERIDKKVEGLSKHIKLEEERRSEDAQSKAALTDWLRAKASFVIEGLKEADKDEFCRCELKLQKWYGDLRGKPFAIEAENSILDISGFSKQYNCAFIWQKDGVKKLNLYLIINYFKGGKLRFKKIKPEAFEANRFYTVINKKSGEIVPMEVNFNFDDPNLIILPLAFGKRQGREFIWNDLLSLETGSLKLANGRVIEKTLYNRRTRQDEPALFVALTFERREVLDSSNIKPMNLIGVDRGENIPAVIALTDPEGCPLSRFKDSLGNPTHILRIGESYKEKQRTIQAKKEVEQRRAGGYSRKYASKAKNLADDMVRNTARDLLYYAVTQDAMLIFENLSRGFGRQGKRTFMAERQYTRMEDWLTAKLAYEGLPSKTYLSKTLAQYTSKTCSNCGFTITSADYDRVLEKLKKTATGWMTTINGKELKVEGQITYYNRYKRQNVVKDLSVELDRLSEESVNNDISSWTKGRSGEALSLLKKRFSHRPVQEKFVCLNCGFETHADEQAALNIARSWLFLRSQEYKKYQTNKTTGNTDKRAFVETWQSFYRKKLKEVWKPAV

SEQ ID NO: 41292 - protein, 978 aa, synthetic construct
  REGION 1..978: note = engineered CasX variant
QEIGRINKIRRRLVKDSNTKKAGKTGPMKTLLVRVMTPDLRERLENLRKKPENIPQPISNTSRANLNKLLTDYTEMKKAILHVYWEEFQKDPVGLMSRVAQPASKKIDQNKLKPEMDEKGNLTTAGFACSQCGQPLFVYKLEQVSEKGKAYTNYFGRCNVAEHEKLILLAQLKPEKDSDEAVTYSLGKFGQRALDFYSIHVTKESTHPVKPLAQIAGNRYASSPVGKALSGACMGTIASFLSKYQDIIIEHQKVVKGNQKRLESLRELAGKENLEYPSVTLPPQPHTKEGVDAYNEVIARVRMWVNLNLWQKLKLSRDDAKPLLRLKGFPSFPLVERQANEVDWWDMVCNVKKLINEKKEDGKVFWQNLAGYKRQEALRPYLSSEEDRKKGKKFARYQLGDLLLHLEKKHGEDWGKVYDEAWERIDKKVEGLSKHIKLEEERRSEDAQSKAALTDWLRAKASFVIEGLKEADKDEFCRCELKLQKWYGDLRGKPFAIEAENSILDISGFSKQYNCAFIWQKDGVKKLNLYLIINYFKGGKLRFKKIKPEAFEANRFYTVINKKSGEIVPMEVNFNFDDPNLIILPLAFGKRQGREFIWNDLLSLETGSLKLANGRVIEKTLYNRRTRQDEPALFVALTFERREVLDSSNIKPMNLIGVDRGENIPAVIALTDPEGCPLSRFKDSLGNPTHILRIGESYKEKQRTIQAKKEVEQRRAGGYSRKYASKAKNLADDMVRNTARDLLYYAVTQDAMLIFENLSRGFGRQGKRTFMAERQYTRMEDWLTAKLAYEGLPSKTYLSKTLAQYTSKTCSNCGFTITSADYDRVLEKLKKTATGWMTTINGKELKVEGQITYYNRYKRQNVVKDLSVELDRLSEESVNNDISSWTKGRSGEALSLLKKRFSHRPVQEKFVCLNCGFETHADEQAALNIARSWLFLRSQEYKKYQTNKTTGNTDKRAFVETWQSFYRKKLKEVWKPAV

SEQ ID NO: 41293 - protein, 978 aa, synthetic construct
  REGION 1..978: note = engineered CasX variant
QEIGRINKIRRRLVKDSNTKKAGKTGPMKTLLVRVMTPDLRERLENLRKKPENIPQPISNTSRANLNKLLTDYTEMKKAILHVYWEEFQKDPVGLMSRVAQPASKKIDQNKLKPEMDEKGNLTTAGFACSQCGQPLFVYKLEQVSEKGKAYTNYFGRCNVAEHEKLILLAQLKPEKDSDEAVTYSLGKFGQRALDFYSIHVTKESTHPVKPLAQIAGNRYASTPVGKALSGACMGTIASFLSKYQDIIIEHQKVVKGNQKRLESLRELAGKENLEYPSVTLPPQPHTKEGVDAYNEVIARVRMWVNLNLWQKLKLSRDDAKPLLRLKGFPSFPLVERQANEVDWWDMVCNVKKLINEKKEDGKVFWQNLAGYKRQEALRPYLSSEEDRKKGKKFARYQLGDLLLHLEKKHGEDWGKVYDEAWERIDKKVEGLSKHIKLEEERRSEDAQSKAALTDWLRAKASFVIEGLKEADKDEFCRCELKLQKWYGDLRGKPFAIEAENSILDISGFSKQYNCAFIWQKDGVKKLNLYLIINYFKGGKLRFKKIKPEAFEANRFYTVINKKSGEIVPMEVNFNFDDPNLIILPLAFGKRQGREFIWNDLLSLETGSLKLANGRVIEKTLYNRRTRQDEPALFVALTFERREVLDSSNIKPMNLIGVDRGENIPAVIALTDPEGCPLSRFKDSLGNPTHILRIGESYKEKQRTIQAKKEVEQRRAGGYSRKYASKAKNLADDMVRNTARDLLYYAVTQDAMLIFENLSRGFGRQGKRTFMAERQYTRMEDWLTAKLAYEGLPSKTYLSKTLAQYTSKTCSNCGFTITSADYDRVLEKLKKTATGWMTTINGKELKVEGQITYYNRYKRQNVVKDLSVELDRLSEESVNNDISSWTKGRSGEALSLLKKRFSHRPVQEKFVCLNCGFETHADEQAALNIARSWLFLRSQEYKKYQTNKTTGNTDKRAFVETWQSFYRKKLKEVWKPAV

SEQ ID NO: 41294 - protein, 978 aa, synthetic construct
  REGION 1..978: note = engineered CasX variant
QEIGRINKIRRRLVKDSNTKKAGKTGPMKTLLVRVMTPDLRERLENLRKKPENIPQPISNTSRANLNKLLTDYTEMKKAILHVYWEEFQKDPVGLMSRVAQPASKKIDQNKLKPEMDEKGNLTTAGFACSQCGQPLFVYKLEQVSEKGKAYTNYFGRCNVAEHEKLILLAQLKPEKDSDEAVTYSLGKFGQRALDFYSIHVTKESTHPVKPLAQIAGNRYASAPVGKALSGACMGTIASFLSKYQDIIIEHQKVVKGNQKRLESLRELAGKENLEYPSVTLPPQPHTKEGVDAYNEVIARVRMWVNLNLWQKLKLSRDDAKPLLRLKGFPSFPLVERQANEVDWWDMVCNVKKLINEKKEDGKVFWQNLAGYKRQEALRPYLSSEEDRKKGKKFARYQLGDLLLHLEKKHGEDWGKVYDEAWERIDKKVEGLSKHIKLEEERRSEDAQSKAALTDWLRAKASFVIEGLKEADKDEFCRCELKLQKWYGDLRGKPFAIEAENSILDISGFSKQYNCAFIWQKDGVKKLNLYLIINYFKGGKLRFKKIKPEAFEANRFYTVINKKSGEIVPMEVNFNFDDPNLIILPLAFGKRQGREFIWNDLLSLETGSLKLANGRVIEKTLYNRRTRQDEPALFVALTFERREVLDSSNIKPMNLIGVDRGENIPAVIALTDPEGCPLSRFKDSLGNPTHILRIGESYKEKQRTIQAKKEVEQRRAGGYSRKYASKAKNLADDMVRNTARDLLYYAVTQDAMLIFENLSRGFGRQGKRTFMAERQYTRMEDWLTAKLAYEGLPSKTYLSKTLAQYTSKTCSNCGFTITSADYDRVLEKLKKTATGWMTTINGKELKVEGQITYYNRYKRQNVVKDLSVELDRLSEESVNNDISSWTKGRSGEALSLLKKRFSHRPVQEKFVCLNCGFETHADEQAALNIARSWLFLRSQEYKKYQTNKTTGNTDKRAFVETWQSFYRKKLKEVWKPAV

SEQ ID NO: 41295 - protein, 978 aa, synthetic construct
  REGION 1..978: note = engineered CasX variant
QEIGRINKIRRRLVKDSNTKKAGKTGPMKTLLVRVMTPDLRERLENLRKKPENIPQPISNTSRANLNKLLTDYTEMKKAILHVYWEEFQKDPVGLMSRVAQPASKKIDQNKLKPEMDEKGNLTTAGFACSQCGQPLFVYKLEQVSEKGKAYTNYFGRCNVAEHEKLILLAQLKPEKDSDEAVTYSLGKFGQRALDFYSIHVTKESTHPVKPLAQIAGNRYASVPVGKALSGACMGTIASFLSKYQDIIIEHQKVVKGNQKRLESLRELAGKENLEYPSVTLPPQPHTKEGVDAYNEVIARVRMWVNLNLWQKLKLSRDDAKPLLRLKGFPSFPLVERQANEVDWWDMVCNVKKLINEKKEDGKVFWQNLAGYKRQEALRPYLSSEEDRKKGKKFARYQLGDLLLHLEKKHGEDWGKVYDEAWERIDKKVEGLSKHIKLEEERRSEDAQSKAALTDWLRAKASFVIEGLKEADKDEFCRCELKLQKWYGDLRGKPFAIEAENSILDISGFSKQYNCAFIWQKDGVKKLNLYLIINYFKGGKLRFKKIKPEAFEANRFYTVINKKSGEIVPMEVNFNFDDPNLIILPLAFGKRQGREFIWNDLLSLETGSLKLANGRVIEKTLYNRRTRQDEPALFVALTFERREVLDSSNIKPMNLIGVDRGENIPAVIALTDPEGCPLSRFKDSLGNPTHILRIGESYKEKQRTIQAKKEVEQRRAGGYSRKYASKAKNLADDMVRNTARDLLYYAVTQDAMLIFENLSRGFGRQGKRTFMAERQYTRMEDWLTAKLAYEGLPSKTYLSKTLAQYTSKTCSNCGFTITSADYDRVLEKLKKTATGWMTTINGKELKVEGQITYYNRYKRQNVVKDLSVELDRLSEESVNNDISSWTKGRSGEALSLLKKRFSHRPVQEKFVCLNCGFETHADEQAALNIARSWLFLRSQEYKKYQTNKTTGNTDKRAFVETWQSFYRKKLKEVWKPAV

SEQ ID NO: 41296 - protein, 978 aa, synthetic construct
  REGION 1..978: note = engineered CasX variant
QEIGRINKIRRRLVKDSNTKKAGKTGPMKTLLVRVMTPDLRERLENLRKKPENIPQPISNTSRANLNKLLTDYTEMKKAILHVYWEEFQKDPVGLMSRVAQPASKKIDQNKLKPEMDEKGNLTTAGFACSQCGQPLFVYKLEQVSEKGKAYTNYFGRCNVAEHEKLIKLAQLKPEKDSDEAVTYSLGKFGQRALDFYSIHVTKESTHPVKPLAQIAGNRYASGPVGKALSGACMGTIASFLSKYQDIIIEHQKVVKGNQKRLESLRELAGKENLEYPSVTLPPQPHTKEGVDAYNEVIARVRMWVNLNLWQKLKLSRDDAKPLLRLKGFPSFPLVERQANEVDWWDMVCNVKKLINEKKEDGKVFWQNLAGYKRQEALRPYLSSEEDRKKGKKFARYQLGDLLLHLEKKHGEDWGKVYDEAWERIDKKVEGLSKHIKLEEERRSEDAQSKAALTDWLRAKASFVIEGLKEADKDEFCRCELKLQKWYGDLRGKPFAIEAENSILDISGFSKQYNCAFIWQKDGVKKLNLYLIINYFKGGKLRFKKIKPEAFEANRFYTVINKKSGEIVPMEVNFNFDDPNLIILPLAFGKRQGREFIWNDLLSLETGSLKLANGRVIEKTLYNRRTRQDEPALFVALTFERREVLDSSNIKPMNLIGVDRGENIPAVIALTDPEGCPLSRFKDSLGNPTHILRIGESYKEKQRTIQAKKEVEQRRAGGYSRKYASKAKNLADDMVRNTARDLLYYAVTQDAMLIFENLSRGFGRQGKRTFMAERQYTRMEDWLTAKLAYEGLPSKTYLSKTLAQYTSKTCSNCGFTITSADYDRVLEKLKKTATGWMTTINGKELKVEGQITYYNRYKRQNVVKDLSVELDRLSEESVNNDISSWTKGRSGEALSLLKKRFSHRPVQEKFVCLNCGFETHADEQAALNIARSWLFLRSQEYKKYQTNKTTGNTDKRAFVETWQSFYRKKLKEVWKPAV

SEQ ID NO: 41297 - protein, 977 aa, synthetic construct
  REGION 1..977: note = engineered CasX variant
QEIGRINKIRRRLVKDSNTKKAGKTGPMKTLLVRVMTPDLRERLENLRKKPENIPQPISNTSRANLNKLLTDYTEMKKAILHVYWEEFQKDPVGLMSRVAQPASKKIDQNKLKPEMDEKGNLTTAGFACSQCGQPLFVYKLEQVSEKGKAYTNYFGRCNVAEHEKLILLAQLKPEKDSDEAVTYSLGKFGQRALDFYSIHVTKESTHPVKPLAQIAGNRYASPVGKALSGACMGTIASFLSKYQDIIIEHQKVVKGNQKRLESLRELAGKENLEYPSVTLPPQPHTKEGVDAYNEVIARVRMWVNLNLWQKLKLSRDDAKPLLRLKGFPSFPLVERQANEVDWWDMVCNVKKLINEKKEDGKVFWQNLAGYKRQEALRPYLSSEEDRKKGKKFARYQLGDLLLHLEKKHGEDWGKVYDEAWERIDKKVEGLSKHIKLEEERRSEDAQSKAALTDWLRAKASFVIEGLKEADKDEFCRCELKLQKWYGDLRGKPFAIEAENSILDISGFSKQYNCAFIWQKDGVKKLNLYLIINYFKGGKLRFKKIKPEAFEANRFYTVINKKSGEIVPMEVNFNFDDPNLIILPLAFGKRQGREFIWNDLLSLETGSLKLANGRVIEKTLYNRRTRQDEPALFVALTFERREVLDSSNIKPMNLIGVDRGENIPAVIALTDPEGCPLSRFKDSLGNPTHILRIGESYKEKQRTIQAKKEVEQRRAGGYSRKYASKAKNLADDMVRNTARDLLYYAVTQDAMLIFENLSRGFGRQGKRTFMAERQYTRMEDWLTAKLAYEGLPSKTYLSKTLAQYTSKTCSNCGFTITSADYDRVLEKLKKTATGWMTTINGKELKVEGQITYYNRYKRQNVVKDLSVELDRLSEESVNNDISSWTKGRSGEALSLLKKRFSHRPVQEKFVCLNCGFETHADEQAALNIARSWLFLRSQEYKKYQTNKTTGNTDKRAFVETWQSFYRKKLKEVWKPAV

SEQ ID NO: 41298 - protein, 978 aa, synthetic construct
  REGION 1..978: note = engineered CasX variant
QEIGRINKIRRRLVKDSNTKKAGKTGPMKTLLVRVMTPDLRERLENLRKKPENIPQPISNTSRANLNKLLTDYTEMKKAILHVYWEEFQKDPVGLMSRVAQPASKKIDQNKLKPEMDEKGNLTTAGFACSQCGQPLFVYKLEQVSEKGKAYTNYFGRCNVAEHEKLILLAQLKPEKDSDEAVTYSLGKFGQRALDFYSIHVTKESTHPVKPLAQIAGNRYASYPVGKALSDACMGTIASFLSKYQDIIIEHQKVVKGNQKRLESLRELAGKENLEYPSVTLPPQPHTKEGVDAYNEVIARVRMWVNLNLWQKLKLSRDDAKPLLRLKNFPSFPLVERQANEVDWWDMVCNVKKLINEKKEDGKVFWQNLAGYKRQEALRPYLSSEEDRKKGKKFARYQLGDLLLHLEKKHGEDWGKVYDEAWERIDKKVEGLSKHIKLEEERRSEDAQSKAALTDWLRAKASFVIEGLKEADKDEFCRCELKLQKWYGDLRGKPFAIEAENSILDISGFSKQYNCAFIWQKDGVKKLNLYLIINYFKGGKLRFKKIKPEAFEANRFYTVINKKSGEIVPMEVNFNFDDPNLIILPLAFGKRQGREFIWNDLLSLETGSLKLANGRVIEKTLYNRRTRQDEPALFVALTFERREVLDSSNIKPMNLIGVDRGENIPAVIALTDPEGCPLSRFKDSLGNPTHILRIGESYKEKQRTIQAKKEVEQRRAGGYSRKYASKAKNLADDMVRNTARDLLYYAVTQDAMLIFENLSRGFGRQGKRTFMAERQYTRMEDWLTAKLAYEGLPSKTYLSKTLAQYTSKTCSNCGFTITSADYDRVLEKLKKTATGWMTTINGKELKVEGQITYYNRYKRQNVVKDLSVELDRLSEESVNNDISSWTKGRSGEALSLLKKRFSHRPVQEKFVCLNCGFETHADEQAALNIARSWLFLRSQEYKKYQTNKTTGNTDKRAFVETWQSFYRKKLKEVWKPAV

SEQ ID NO: 41299 - protein, 978 aa, synthetic construct
  REGION 1..978: note = engineered CasX variant
QEIGRINKIRRRLVKDSNTKKAGKTGPMKTLLVRVMTPDLRERLENLRKKPENIPQPISNTSRANLNKLLTDYTEMKKAILHVYWEEFQKDPVGLMSRVAQPASKKIDQNKLKPEMDEKGNLTTAGFACSQCGQPLFVYKLEQVSEKGKAYTNYFGRCNVAEHEKLILLAQLKPEKDSDEAVTYSLGKFGQRALDFYSIHVTKESTHPVKPLAQIAGNRYASHPVGKALSDACMGTIASFLSKYQDIIIEHQKVVKGNQKRLESLRELAGKENLEYPSVTLPPQPHTKEGVDAYNEVIARVRMWVNLNLWQKLKLSRDDAKPLLRLKNFPSFPLVERQANEVDWWDMVCNVKKLINEKKEDGKVFWQNLAGYKRQEALRPYLSSEEDRKKGKKFARYQLGDLLLHLEKKHGEDWGKVYDEAWERIDKKVEGLSKHIKLEEERRSEDAQSKAALTDWLRAKASFVIEGLKEADKDEFCRCELKLQKWYGDLRGKPFAIEAENSILDISGFSKQYNCAFIWQKDGVKKLNLYLIINYFKGGKLRFKKIKPEAFEANRFYTVINKKSGEIVPMEVNFNFDDPNLIILPLAFGKRQGREFIWNDLLSLETGSLKLANGRVIEKTLYNRRTRQDEPALFVALTFERREVLDSSNIKPMNLIGVDRGENIPAVIALTDPEGCPLSRFKDSLGNPTHILRIGESYKEKQRTIQAKKEVEQRRAGGYSRKYASKAKNLADDMVRNTARDLLYYAVTQDAMLIFENLSRGFGRQGKRTFMAERQYTRMEDWLTAKLAYEGLPSKTYLSKTLAQYTSKTCSNCGFTITSADYDRVLEKLKKTATGWMTTINGKELKVEGQITYYNRYKRQNVVKDLSVELDRLSEESVNNDISSWTKGRSGEALSLLKKRFSHRPVQEKFVCLNCGFETHADEQAALNIARSWLFLRSQEYKKYQTNKTTGNTDKRAFVETWQSFYRKKLKEVWKPAV

SEQ ID NO: 41300 - protein, 978 aa, synthetic construct
  REGION 1..978: note = engineered CasX variant
QEIGRINKIRRRLVKDSNTKKAGKTGPMKTLLVRVMTPDLRERLENLRKKPENIPQPISNTSRANLNKLLTDYTEMKKAILHVYWEEFQKDPVGLMSRVAQPASKKIDQNKLKPEMDEKGNLTTAGFACSQCGQPLFVYKLEQVSEKGKAYTNYFGRCNVAEHEKLILLAQLKPEKDSDEAVTYSLGKFGQRALDFYSIHVTKESTHPVKPLAQIAGNRYASSPVGKALSDACMGTIASFLSKYQDIIIEHQKVVKGNQKRLESLRELAGKENLEYPSVTLPPQPHTKEGVDAYNEVIARVRMWVNLNLWQKLKLSRDDAKPLLRLKNFPSFPLVERQANEVDWWDMVCNVKKLINEKKEDGKVFWQNLAGYKRQEALRPYLSSEEDRKKGKKFARYQLGDLLLHLEKKHGEDWGKVYDEAWERIDKKVEGLSKHIKLEEERRSEDAQSKAALTDWLRAKASFVIEGLKEADKDEFCRCELKLQKWYGDLRGKPFAIEAENSILDISGFSKQYNCAFIWQKDGVKKLNLYLIINYFKGGKLRFKKIKPEAFEANRFYTVINKKSGEIVPMEVNFNFDDPNLIILPLAFGKRQGREFIWNDLLSLETGSLKLANGRVIEKTLYNRRTRQDEPALFVALTFERREVLDSSNIKPMNLIGVDRGENIPAVIALTDPEGCPLSRFKDSLGNPTHILRIGESYKEKQRTIQAKKEVEQRRAGGYSRKYASKAKNLADDMVRNTARDLLYYAVTQDAMLIFENLSRGFGRQGKRTFMAERQYTRMEDWLTAKLAYEGLPSKTYLSKTLAQYTSKTCSNCGFTITSADYDRVLEKLKKTATGWMTTINGKELKVEGQITYYNRYKRQNVVKDLSVELDRLSEESVNNDISSWTKGRSGEALSLLKKRFSHRPVQEKFVCLNCGFETHADEQAALNIARSWLFLRSQEYKKYQTNKTTGNTDKRAFVETWQSFYRKKLKEVWKPAV

SEQ ID NO: 41301 - protein, 978 aa, synthetic construct
  REGION 1..978: note = engineered CasX variant
QEIGRINKIRRRLVKDSNTKKAGKTGPMKTLLVRVMTPDLRERLENLRKKPENIPQPISNTSRANLNKLLTDYTEMKKAILHVYWEEFQKDPVGLMSRVAQPASKKIDQNKLKPEMDEKGNLTTAGFACSQCGQPLFVYKLEQVSEKGKAYTNYFGRCNVAEHEKLILLAQLKPEKDSDEAVTYSLGKFGQRALDFYSIHVTKESTHPVKPLAQIAGNRYASTPVGKALSDACMGTIASFLSKYQDIIIEHQKVVKGNQKRLESLRELAGKENLEYPSVTLPPQPHTKEGVDAYNEVIARVRMWVNLNLWQKLKLSRDDAKPLLRLKNFPSFPLVERQANEVDWWDMVCNVKKLINEKKEDGKVFWQNLAGYKRQEALRPYLSSEEDRKKGKKFARYQLGDLLLHLEKKHGEDWGKVYDEAWERIDKKVEGLSKHIKLEEERRSEDAQSKAALTDWLRAKASFVIEGLKEADKDEFCRCELKLQKWYGDLRGKPFAIEAENSILDISGFSKQYNCAFIWQKDGVKKLNLYLIINYFKGGKLRFKKIKPEAFEANRFYTVINKKSGEIVPMEVNFNFDDPNLIILPLAFGKRQGREFIWNDLLSLETGSLKLANGRVIEKTLYNRRTRQDEPALFVALTFERREVLDSSNIKPMNLIGVDRGENIPAVIALTDPEGCPLSRFKDSLGNPTHILRIGESYKEKQRTIQAKKEVEQRRAGGYSRKYASKAKNLADDMVRNTARDLLYYAVTQDAMLIFENLSRGFGRQGKRTFMAERQYTRMEDWLTAKLAYEGLPSKTYLSKTLAQYTSKTCSNCGFTITSADYDRVLEKLKKTATGWMTTINGKELKVEGQITYYNRYKRQNVVKDLSVELDRLSEESVNNDISSWTKGRSGEALSLLKKRFSHRPVQEKFVCLNCGFETHADEQAALNIARSWLFLRSQEYKKYQTNKTTGNTDKRAFVETWQSFYRKKLKEVWKPAV

SEQ ID NO: 41302 - protein, 978 aa, synthetic construct
  REGION 1..978: note = engineered CasX variant
QEIGRINKIRRRLVKDSNTKKAGKTGPMKTLLVRVMTPDLRERLENLRKKPENIPQPISNTSRANLNKLLTDYTEMKKAILHVYWEEFQKDPVGLMSRVAQPASKKIDQNKLKPEMDEKGNLTTAGFACSQCGQPLFVYKLEQVSEKGKAYTNYFGRCNVAEHEKLILLAQLKPEKDSDEAVTYSLGKFGQRALDFYSIHVTKESTHPVKPLAQIAGNRYASAPVGKALSDACMGTIASFLSKYQDIIIEHQKVVKGNQKRLESLRELAGKENLEYPSVTLPPQPHTKEGVDAYNEVIARVRMWVNLNLWQKLKLSRDDAKPLLRLKNFPSFPLVERQANEVDWWDMVCNVKKLINEKKEDGKVFWQNLAGYKRQEALRPYLSSEEDRKKGKKFARYQLGDLLLHLEKKHGEDWGKVYDEAWERIDKKVEGLSKHIKLEEERRSEDAQSKAALTDWLRAKASFVIEGLKEADKDEFCRCELKLQKWYGDLRGKPFAIEAENSILDISGFSKQYNCAFIWQKDGVKKLNLYLIINYFKGGKLRFKKIKPEAFEANRFYTVINKKSGEIVPMEVNFNFDDPNLIILPLAFGKRQGREFIWNDLLSLETGSLKLANGRVIEKTLYNRRTRQDEPALFVALTFERREVLDSSNIKPMNLIGVDRGENIPAVIALTDPEGCPLSRFKDSLGNPTHILRIGESYKEKQRTIQAKKEVEQRRAGGYSRKYASKAKNLADDMVRNTARDLLYYAVTQDAMLIFENLSRGFGRQGKRTFMAERQYTRMEDWLTAKLAYEGLPSKTYLSKTLAQYTSKTCSNCGFTITSADYDRVLEKLKKTATGWMTTINGKELKVEGQITYYNRYKRQNVVKDLSVELDRLSEESVNNDISSWTKGRSGEALSLLKKRFSHRPVQEKFVCLNCGFETHADEQAALNIARSWLFLRSQEYKKYQTNKTTGNTDKRAFVETWQSFYRKKLKEVWKPAV

SEQ ID NO: 41303 - protein, 978 aa, synthetic construct
  REGION 1..978: note = engineered CasX variant
QEIGRINKIRRRLVKDSNTKKAGKTGPMKTLLVRVMTPDLRERLENLRKKPENIPQPISNTSRANLNKLLTDYTEMKKAILHVYWEEFQKDPVGLMSRVAQPASKKIDQNKLKPEMDEKGNLTTAGFACSQCGQPLFVYKLEQVSEKGKAYTNYFGRCNVAEHEKLILLAQLKPEKDSDEAVTYSLGKFGQRALDFYSIHVTKESTHPVKPLAQIAGNRYASVPVGKALSDACMGTIASFLSKYQDIIIEHQKVVKGNQKRLESLRELAGKENLEYPSVTLPPQPHTKEGVDAYNEVIARVRMWVNLNLWQKLKLSRDDAKPLLRLKNFPSFPLVERQANEVDWWDMVCNVKKLINEKKEDGKVFWQNLAGYKRQEALRPYLSSEEDRKKGKKFARYQLGDLLLHLEKKHGEDWGKVYDEAWERIDKKVEGLSKHIKLEEERRSEDAQSKAALTDWLRAKASFVIEGLKEADKDEFCRCELKLQKWYGDLRGKPFAIEAENSILDISGFSKQYNCAFIWQKDGVKKLNLYLIINYFKGGKLRFKKIKPEAFEANRFYTVINKKSGEIVPMEVNFNFDDPNLIILPLAFGKRQGREFIWNDLLSLETGSLKLANGRVIEKTLYNRRTRQDEPALFVALTFERREVLDSSNIKPMNLIGVDRGENIPAVIALTDPEGCPLSRFKDSLGNPTHILRIGESYKEKQRTIQAKKEVEQRRAGGYSRKYASKAKNLADDMVRNTARDLLYYAVTQDAMLIFENLSRGFGRQGKRTFMAERQYTRMEDWLTAKLAYEGLPSKTYLSKTLAQYTSKTCSNCGFTITSADYDRVLEKLKKTATGWMTTINGKELKVEGQITYYNRYKRQNVVKDLSVELDRLSEESVNNDISSWTKGRSGEALSLLKKRFSHRPVQEKFVCLNCGFETHADEQAALNIARSWLFLRSQEYKKYQTNKTTGNTDKRAFVETWQSFYRKKLKEVWKPAV

SEQ ID NO: 41304 - protein, 978 aa, synthetic construct
  REGION 1..978: note = engineered CasX variant
QEIGRINKIRRRLVKDSNTKKAGKTGPMKTLLVRVMTPDLRERLENLRKKPENIPQPISNTSRANLNKLLTDYTEMKKAILHVYWEEFQKDPVGLMSRVAQPASKKIDQNKLKPEMDEKGNLTTAGFACSQCGQPLFVYKLEQVSEKGKAYTNYFGRCNVAEHEKLIKLAQLKPEKDSDEAVTYSLGKFGQRALDFYSIHVTKESTHPVKPLAQIAGNRYASGPVGKALSDACMGTIASFLSKYQDIIIEHQKVVKGNQKRLESLRELAGKENLEYPSVTLPPQPHTKEGVDAYNEVIARVRMWVNLNLWQKLKLSRDDAKPLLRLKNFPSFPLVERQANEVDWWDMVCNVKKLINEKKEDGKVFWQNLAGYKRQEALRPYLSSEEDRKKGKKFARYQLGDLLLHLEKKHGEDWGKVYDEAWERIDKKVEGLSKHIKLEEERRSEDAQSKAALTDWLRAKASFVIEGLKEADKDEFCRCELKLQKWYGDLRGKPFAIEAENSILDISGFSKQYNCAFIWQKDGVKKLNLYLIINYFKGGKLRFKKIKPEAFEANRFYTVINKKSGEIVPMEVNFNFDDPNLIILPLAFGKRQGREFIWNDLLSLETGSLKLANGRVIEKTLYNRRTRQDEPALFVALTFERREVLDSSNIKPMNLIGVDRGENIPAVIALTDPEGCPLSRFKDSLGNPTHILRIGESYKEKQRTIQAKKEVEQRRAGGYSRKYASKAKNLADDMVRNTARDLLYYAVTQDAMLIFENLSRGFGRQGKRTFMAERQYTRMEDWLTAKLAYEGLPSKTYLSKTLAQYTSKTCSNCGFTITSADYDRVLEKLKKTATGWMTTINGKELKVEGQITYYNRYKRQNVVKDLSVELDRLSEESVNNDISSWTKGRSGEALSLLKKRFSHRPVQEKFVCLNCGFETHADEQAALNIARSWLFLRSQEYKKYQTNKTTGNTDKRAFVETWQSFYRKKLKEVWKPAV

SEQ ID NO: 41305 - protein, 977 aa, synthetic construct
  REGION 1..977: note = engineered CasX variant
QEIGRINKIRRRLVKDSNTKKAGKTGPMKTLLVRVMTPDLRERLENLRKKPENIPQPISNTSRANLNKLLTDYTEMKKAILHVYWEEFQKDPVGLMSRVAQPASKKIDQNKLKPEMDEKGNLTTAGFACSQCGQPLFVYKLEQVSEKGKAYTNYFGRCNVAEHEKLILLAQLKPEKDSDEAVTYSLGKFGQRALDFYSIHVTKESTHPVKPLAQIAGNRYASPVGKALSDACMGTIASFLSKYQDIIIEHQKVVKGNQKRLESLRELAGKENLEYPSVTLPPQPHTKEGVDAYNEVIARVRMWVNLNLWQKLKLSRDDAKPLLRLKNFPSFPLVERQANEVDWWDMVCNVKKLINEKKEDGKVFWQNLAGYKRQEALRPYLSSEEDRKKGKKFARYQLGDLLLHLEKKHGEDWGKVYDEAWERIDKKVEGLSKHIKLEEERRSEDAQSKAALTDWLRAKASFVIEGLKEADKDEFCRCELKLQKWYGDLRGKPFAIEAENSILDISGFSKQYNCAFIWQKDGVKKLNLYLIINYFKGGKLRFKKIKPEAFEANRFYTVINKKSGEIVPMEVNFNFDDPNLIILPLAFGKRQGREFIWNDLLSLETGSLKLANGRVIEKTLYNRRTRQDEPALFVALTFERREVLDSSNIKPMNLIGVDRGENIPAVIALTDPEGCPLSRFKDSLGNPTHILRIGESYKEKQRTIQAKKEVEQRRAGGYSRKYASKAKNLADDMVRNTARDLLYYAVTQDAMLIFENLSRGFGRQGKRTFMAERQYTRMEDWLTAKLAYEGLPSKTYLSKTLAQYTSKTCSNCGFTITSADYDRVLEKLKKTATGWMTTINGKELKVEGQITYYNRYKRQNVVKDLSVELDRLSEESVNNDISSWTKGRSGEALSLLKKRFSHRPVQEKFVCLNCGFETHADEQAALNIARSWLFLRSQEYKKYQTNKTTGNTDKRAFVETWQSFYRKKLKEVWKPAV

SEQ ID NO: 41306 - protein, 978 aa, synthetic construct
  REGION 1..978: note = engineered CasX variant
QEIGRINKIRRRLVKDSNTKKAGKTGPMKTLLVRVMTPDLRERLENLRKKPENIPQPISNTSRANLNKLLTDYTEMKKAILHVYWEEFQKDPVGLMSRVAQPASKKIDQNKLKPEMDEKGNLTTAGFACSQCGQPLFVYKLEQVSEKGKAYTNYFGRCNVAEHEKLILLAQLKPEKDSDEAVTYSLGKFGQRALDFYSIHVTKESTHPVKPLAQIAGNRYASYPVGKALSDACMGTIASFLSKYQDIIIEHQKVVKGNQKRLESLRELAGKENLEYPSVTLPPQPHTKEGVDAYNEVIARVRMWVNLNLWQKLKLSRDDAKPLLRLKGFPSFPLVERQANEVDWWDMVCNVKKLINEKKEDGKVFWQNLAGYKRQEALRPYLSSEEDRKKGKKFARYQLGDLLNHLEKKHGEDWGKVYDEAWERIDKKVEGLSKHIKLEEERRSEDAQSKAALTDWLRAKASFVIEGLKEADKDEFCRCELKLQKWYGDLRGKPFAIEAENSILDISGFSKQYNCAFIWQKDGVKKLNLYLIINYFKGGKLRFKKIKPEAFEANRFYTVINKKSGEIVPMEVNFNFDDPNLIILPLAFGKRQGREFIWNDLLSLETGSLKLANGRVIEKTLYNRRTRQDEPALFVALTFERREVLDSSNIKPMNLIGVDRGENIPAVIALTDPEGCPLSRFKDSLGNPTHILRIGESYKEKQRTIQAKKEVEQRRAGGYSRKYASKAKNLADDMVRNTARDLLYYAVTQDAMLIFENLSRGFGRQGKRTFMAERQYTRMEDWLTAKLAYEGLPSKTYLSKTLAQYTSKTCSNCGFTITSADYDRVLEKLKKTATGWMTTINGKELKVEGQITYYNRYKRQNVVKDLSVELDRLSEESVNNDISSWTKGRSGEALSLLKKRFSHRPVQEKFVCLNCGFETHADEQAALNIARSWLFLRSQEYKKYQTNKTTGNTDKRAFVETWQSFYRKKLKEVWKPAV

SEQ ID NO: 41307 - protein, 978 aa, synthetic construct
  REGION 1..978: note = engineered CasX variant
QEIGRINKIRRRLVKDSNTKKAGKTGPMKTLLVRVMTPDLRERLENLRKKPENIPQPISNTSRANLNKLLTDYTEMKKAILHVYWEEFQKDPVGLMSRVAQPASKKIDQNKLKPEMDEKGNLTTAGFACSQCGQPLFVYKLEQVSEKGKAYTNYFGRCNVAEHEKLILLAQLKPEKDSDEAVTYSLGKFGQRALDFYSIHVTKESTHPVKPLAQIAGNRYASHPVGKALSDACMGTIASFLSKYQDIIIEHQKVVKGNQKRLESLRELAGKENLEYPSVTLPPQPHTKEGVDAYNEVIARVRMWVNLNLWQKLKLSRDDAKPLLRLKGFPSFPLVERQANEVDWWDMVCNVKKLINEKKEDGKVFWQNLAGYKRQEALRPYLSSEEDRKKGKKFARYQLGDLLNHLEKKHGEDWGKVYDEAWERIDKKVEGLSKHIKLEEERRSEDAQSKAALTDWLRAKASFVIEGLKEADKDEFCRCELKLQKWYGDLRGKPFAIEAENSILDISGFSKQYNCAFIWQKDGVKKLNLYLIINYFKGGKLRFKKIKPEAFEANRFYTVINKKSGEIVPMEVNFNFDDPNLIILPLAFGKRQGREFIWNDLLSLETGSLKLANGRVIEKTLYNRRTRQDEPALFVALTFERREVLDSSNIKPMNLIGVDRGENIPAVIALTDPEGCPLSRFKDSLGNPTHILRIGESYKEKQRTIQAKKEVEQRRAGGYSRKYASKAKNLADDMVRNTARDLLYYAVTQDAMLIFENLSRGFGRQGKRTFMAERQYTRMEDWLTAKLAYEGLPSKTYLSKTLAQYTSKTCSNCGFTITSADYDRVLEKLKKTATGWMTTINGKELKVEGQITYYNRYKRQNVVKDLSVELDRLSEESVNNDISSWTKGRSGEALSLLKKRFSHRPVQEKFVCLNCGFETHADEQAALNIARSWLFLRSQEYKKYQTNKTTGNTDKRAFVETWQSFYRKKLKEVWKPAV

SEQ ID NO: 41308 - protein, 978 aa, synthetic construct
  REGION 1..978: note = engineered CasX variant
QEIGRINKIRRRLVKDSNTKKAGKTGPMKTLLVRVMTPDLRERLENLRKKPENIPQPISNTSRANLNKLLTDYTEMKKAILHVYWEEFQKDPVGLMSRVAQPASKKIDQNKLKPEMDEKGNLTTAGFACSQCGQPLFVYKLEQVSEKGKAYTNYFGRCNVAEHEKLILLAQLKPEKDSDEAVTYSLGKFGQRALDFYSIHVTKESTHPVKPLAQIAGNRYASSPVGKALSDACMGTIASFLSKYQDIIIEHQKVVKGNQKRLESLRELAGKENLEYPSVTLPPQPHTKEGVDAYNEVIARVRMWVNLNLWQKLKLSRDDAKPLLRLKGFPSFPLVERQANEVDWWDMVCNVKKLINEKKEDGKVFWQNLAGYKRQEALRPYLSSEEDRKKGKKFARYQLGDLLNHLEKKHGEDWGKVYDEAWERIDKKVEGLSKHIKLEEERRSEDAQSKAALTDWLRAKASFVIEGLKEADKDEFCRCELKLQKWYGDLRGKPFAIEAENSILDISGFSKQYNCAFIWQKDGVKKLNLYLIINYFKGGKLRFKKIKPEAFEANRFYTVINKKSGEIVPMEVNFNFDDPNLIILPLAFGKRQGREFIWNDLLSLETGSLKLANGRVIEKTLYNRRTRQDEPALFVALTFERREVLDSSNIKPMNLIGVDRGENIPAVIALTDPEGCPLSRFKDSLGNPTHILRIGESYKEKQRTIQAKKEVEQRRAGGYSRKYASKAKNLADDMVRNTARDLLYYAVTQDAMLIFENLSRGFGRQGKRTFMAERQYTRMEDWLTAKLAYEGLPSKTYLSKTLAQYTSKTCSNCGFTITSADYDRVLEKLKKTATGWMTTINGKELKVEGQITYYNRYKRQNVVKDLSVELDRLSEESVNNDISSWTKGRSGEALSLLKKRFSHRPVQEKFVCLNCGFETHADEQAALNIARSWLFLRSQEYKKYQTNKTTGNTDKRAFVETWQSFYRKKLKEVWKPAV

SEQ ID NO: 41309 - protein, 978 aa, synthetic construct
  REGION 1..978: note = engineered CasX variant
QEIGRINKIRRRLVKDSNTKKAGKTGPMKTLLVRVMTPDLRERLENLRKKPENIPQPISNTSRANLNKLLTDYTEMKKAILHVYWEEFQKDPVGLMSRVAQPASKKIDQNKLKPEMDEKGNLTTAGFACSQCGQPLFVYKLEQVSEKGKAYTNYFGRCNVAEHEKLILLAQLKPEKDSDEAVTYSLGKFGQRALDFYSIHVTKESTHPVKPLAQIAGNRYASTPVGKALSDACMGTIASFLSKYQDIIIEHQKVVKGNQKRLESLRELAGKENLEYPSVTLPPQPHTKEGVDAYNEVIARVRMWVNLNLWQKLKLSRDDAKPLLRLKGFPSFPLVERQANEVDWWDMVCNVKKLINEKKEDGKVFWQNLAGYKRQEALRPYLSSEEDRKKGKKFARYQLGDLLNHLEKKHGEDWGKVYDEAWERIDKKVEGLSKHIKLEEERRSEDAQSKAALTDWLRAKASFVIEGLKEADKDEFCRCELKLQKWYGDLRGKPFAIEAENSILDISGFSKQYNCAFIWQKDGVKKLNLYLIINYFKGGKLRFKKIKPEAFEANRFYTVINKKSGEIVPMEVNFNFDDPNLIILPLAFGKRQGREFIWNDLLSLETGSLKLANGRVIEKTLYNRRTRQDEPALFVALTFERREVLDSSNIKPMNLIGVDRGENIPAVIALTDPEGCPLSRFKDSLGNPTHILRIGESYKEKQRTIQAKKEVEQRRAGGYSRKYASKAKNLADDMVRNTARDLLYYAVTQDAMLIFENLSRGFGRQGKRTFMAERQYTRMEDWLTAKLAYEGLPSKTYLSKTLAQYTSKTCSNCGFTITSADYDRVLEKLKKTATGWMTTINGKELKVEGQITYYNRYKRQNVVKDLSVELDRLSEESVNNDISSWTKGRSGEALSLLKKRFSHRPVQEKFVCLNCGFETHADEQAALNIARSWLFLRSQEYKKYQTNKTTGNTDKRAFVETWQSFYRKKLKEVWKPAV

SEQ ID NO: 41310 - protein, 978 aa, synthetic construct
  REGION 1..978: note = engineered CasX variant
QEIGRINKIRRRLVKDSNTKKAGKTGPMKTLLVRVMTPDLRERLENLRKKPENIPQPISNTSRANLNKLLTDYTEMKKAILHVYWEEFQKDPVGLMSRVAQPASKKIDQNKLKPEMDEKGNLTTAGFACSQCGQPLFVYKLEQVSEKGKAYTNYFGRCNVAEHEKLILLAQLKPEKDSDEAVTYSLGKFGQRALDFYSIHVTKESTHPVKPLAQIAGNRYASAPVGKALSDACMGTIASFLSKYQDIIIEHQKVVKGNQKRLESLRELAGKENLEYPSVTLPPQPHTKEGVDAYNEVIARVRMWVNLNLWQKLKLSRDDAKPLLRLKGFPSFPLVERQANEVDWWDMVCNVKKLINEKKEDGKVFWQNLAGYKRQEALRPYLSSEEDRKKGKKFARYQLGDLLNHLEKKHGEDWGKVYDEAWERIDKKVEGLSKHIKLEEERRSEDAQSKAALTDWLRAKASFVIEGLKEADKDEFCRCELKLQKWYGDLRGKPFAIEAENSILDISGFSKQYNCAFIWQKDGVKKLNLYLIINYFKGGKLRFKKIKPEAFEANRFYTVINKKSGEIVPMEVNFNFDDPNLIILPLAFGKRQGREFIWNDLLSLETGSLKLANGRVIEKTLYNRRTRQDEPALFVALTFERREVLDSSNIKPMNLIGVDRGENIPAVIALTDPEGCPLSRFKDSLGNPTHILRIGESYKEKQRTIQAKKEVEQRRAGGYSRKYASKAKNLADDMVRNTARDLLYYAVTQDAMLIFENLSRGFGRQGKRTFMAERQYTRMEDWLTAKLAYEGLPSKTYLSKTLAQYTSKTCSNCGFTITSADYDRVLEKLKKTATGWMTTINGKELKVEGQITYYNRYKRQNVVKDLSVELDRLSEESVNNDISSWTKGRSGEALSLLKKRFSHRPVQEKFVCLNCGFETHADEQAALNIARSWLFLRSQEYKKYQTNKTTGNTDKRAFVETWQSFYRKKLKEVWKPAV

SEQ ID NO: 41311 - protein, 978 aa, synthetic construct
  REGION 1..978: note = engineered CasX variant
QEIGRINKIRRRLVKDSNTKKAGKTGPMKTLLVRVMTPDLRERLENLRKKPENIPQPISNTSRANLNKLLTDYTEMKKAILHVYWEEFQKDPVGLMSRVAQPASKKIDQNKLKPEMDEKGNLTTAGFACSQCGQPLFVYKLEQVSEKGKAYTNYFGRCNVAEHEKLILLAQLKPEKDSDEAVTYSLGKFGQRALDFYSIHVTKESTHPVKPLAQIAGNRYASVPVGKALSDACMGTIASFLSKYQDIIIEHQKVVKGNQKRLESLRELAGKENLEYPSVTLPPQPHTKEGVDAYNEVIARVRMWVNLNLWQKLKLSRDDAKPLLRLKGFPSFPLVERQANEVDWWDMVCNVKKLINEKKEDGKVFWQNLAGYKRQEALRPYLSSEEDRKKGKKFARYQLGDLLNHLEKKHGEDWGKVYDEAWERIDKKVEGLSKHIKLEEERRSEDAQSKAALTDWLRAKASFVIEGLKEADKDEFCRCELKLQKWYGDLRGKPFAIEAENSILDISGFSKQYNCAFIWQKDGVKKLNLYLIINYFKGGKLRFKKIKPEAFEANRFYTVINKKSGEIVPMEVNFNFDDPNLIILPLAFGKRQGREFIWNDLLSLETGSLKLANGRVIEKTLYNRRTRQDEPALFVALTFERREVLDSSNIKPMNLIGVDRGENIPAVIALTDPEGCPLSRFKDSLGNPTHILRIGESYKEKQRTIQAKKEVEQRRAGGYSRKYASKAKNLADDMVRNTARDLLYYAVTQDAMLIFENLSRGFGRQGKRTFMAERQYTRMEDWLTAKLAYEGLPSKTYLSKTLAQYTSKTCSNCGFTITSADYDRVLEKLKKTATGWMTTINGKELKVEGQITYYNRYKRQNVVKDLSVELDRLSEESVNNDISSWTKGRSGEALSLLKKRFSHRPVQEKFVCLNCGFETHADEQAALNIARSWLFLRSQEYKKYQTNKTTGNTDKRAFVETWQSFYRKKLKEVWKPAV

SEQ ID NO: 41312 - protein, 978 aa, synthetic construct
  REGION 1..978: note = engineered CasX variant
QEIGRINKIRRRLVKDSNTKKAGKTGPMKTLLVRVMTPDLRERLENLRKKPENIPQPISNTSRANLNKLLTDYTEMKKAILHVYWEEFQKDPVGLMSRVAQPASKKIDQNKLKPEMDEKGNLTTAGFACSQCGQPLFVYKLEQVSEKGKAYTNYFGRCNVAEHEKLIKLAQLKPEKDSDEAVTYSLGKFGQRALDFYSIHVTKESTHPVKPLAQIAGNRYASGPVGKALSDACMGTIASFLSKYQDIIIEHQKVVKGNQKRLESLRELAGKENLEYPSVTLPPQPHTKEGVDAYNEVIARVRMWVNLNLWQKLKLSRDDAKPLLRLKGFPSFPLVERQANEVDWWDMVCNVKKLINEKKEDGKVFWQNLAGYKRQEALRPYLSSEEDRKKGKKFARYQLGDLLNHLEKKHGEDWGKVYDEAWERIDKKVEGLSKHIKLEEERRSEDAQSKAALTDWLRAKASFVIEGLKEADKDEFCRCELKLQKWYGDLRGKPFAIEAENSILDISGFSKQYNCAFIWQKDGVKKLNLYLIINYFKGGKLRFKKIKPEAFEANRFYTVINKKSGEIVPMEVNFNFDDPNLIILPLAFGKRQGREFIWNDLLSLETGSLKLANGRVIEKTLYNRRTRQDEPALFVALTFERREVLDSSNIKPMNLIGVDRGENIPAVIALTDPEGCPLSRFKDSLGNPTHILRIGESYKEKQRTIQAKKEVEQRRAGGYSRKYASKAKNLADDMVRNTARDLLYYAVTQDAMLIFENLSRGFGRQGKRTFMAERQYTRMEDWLTAKLAYEGLPSKTYLSKTLAQYTSKTCSNCGFTITSADYDRVLEKLKKTATGWMTTINGKELKVEGQITYYNRYKRQNVVKDLSVELDRLSEESVNNDISSWTKGRSGEALSLLKKRFSHRPVQEKFVCLNCGFETHADEQAALNIARSWLFLRSQEYKKYQTNKTTGNTDKRAFVETWQSFYRKKLKEVWKPAV

SEQ ID NO: 41313 - protein, 977 aa, synthetic construct
  REGION 1..977: note = engineered CasX variant
QEIGRINKIRRRLVKDSNTKKAGKTGPMKTLLVRVMTPDLRERLENLRKKPENIPQPISNTSRANLNKLLTDYTEMKKAILHVYWEEFQKDPVGLMSRVAQPASKKIDQNKLKPEMDEKGNLTTAGFACSQCGQPLFVYKLEQVSEKGKAYTNYFGRCNVAEHEKLILLAQLKPEKDSDEAVTYSLGKFGQRALDFYSIHVTKESTHPVKPLAQIAGNRYASPVGKALSDACMGTIASFLSKYQDIIIEHQKVVKGNQKRLESLRELAGKENLEYPSVTLPPQPHTKEGVDAYNEVIARVRMWVNLNLWQKLKLSRDDAKPLLRLKGFPSFPLVERQANEVDWWDMVCNVKKLINEKKEDGKVFWQNLAGYKRQEALRPYLSSEEDRKKGKKFARYQLGDLLNHLEKKHGEDWGKVYDEAWERIDKKVEGLSKHIKLEEERRSEDAQSKAALTDWLRAKASFVIEGLKEADKDEFCRCELKLQKWYGDLRGKPFAIEAENSILDISGFSKQYNCAFIWQKDGVKKLNLYLIINYFKGGKLRFKKIKPEAFEANRFYTVINKKSGEIVPMEVNFNFDDPNLIILPLAFGKRQGREFIWNDLLSLETGSLKLANGRVIEKTLYNRRTRQDEPALFVALTFERREVLDSSNIKPMNLIGVDRGENIPAVIALTDPEGCPLSRFKDSLGNPTHILRIGESYKEKQRTIQAKKEVEQRRAGGYSRKYASKAKNLADDMVRNTARDLLYYAVTQDAMLIFENLSRGFGRQGKRTFMAERQYTRMEDWLTAKLAYEGLPSKTYLSKTLAQYTSKTCSNCGFTITSADYDRVLEKLKKTATGWMTTINGKELKVEGQITYYNRYKRQNVVKDLSVELDRLSEESVNNDISSWTKGRSGEALSLLKKRFSHRPVQEKFVCLNCGFETHADEQAALNIARSWLFLRSQEYKKYQTNKTTGNTDKRAFVETWQSFYRKKLKEVWKPAV

SEQ ID NO: 41314 - protein, 978 aa, synthetic construct
  REGION 1..978: note = engineered CasX variant
QEIGRINKIRRRLVKDSNTKKAGKTGPMKTLLVRVMTPDLRERLENLRKKPENIPQPISNTSRANLNKLLTDYTEMKKAILHVYWEEFQKDPVGLMSRVAQPASKKIDQNKLKPEMDEKGNLTTAGFACSQCGQPLFVYKLEQVSEKGKAYTNYFGRCNVAEHEKLILLAQLKPEKDSDEAVTYSLGKFGQRALDFYSIHVTKESTHPVKPLAQIAGNRYASYPVGKALSDACMGTIASFLSKYQDIIIEHQKVVKGNQKRLESLRELAGKENLEYPSVTLPPQPHTKEGVDAYNEVIARVRMWVNLNLWQKLKLSRDDAKPLLRLKGFPSFPLVERQANEVDWWDMVCNVKKLINEKKEDGKVFWQNLAGYKRQEALRPYLSSEEDRKKGKKFARYQLGDLLWHLEKKHGEDWGKVYDEAWERIDKKVEGLSKHIKLEEERRSEDAQSKAALTDWLRAKASFVIEGLKEADKDEFCRCELKLQKWYGDLRGKPFAIEAENSILDISGFSKQYNCAFIWQKDGVKKLNLYLIINYFKGGKLRFKKIKPEAFEANRFYTVINKKSGEIVPMEVNFNFDDPNLIILPLAFGKRQGREFIWNDLLSLETGSLKLANGRVIEKTLYNRRTRQDEPALFVALTFERREVLDSSNIKPMNLIGVDRGENIPAVIALTDPEGCPLSRFKDSLGNPTHILRIGESYKEKQRTIQAKKEVEQRRAGGYSRKYASKAKNLADDMVRNTARDLLYYAVTQDAMLIFENLSRGFGRQGKRTFMAERQYTRMEDWLTAKLAYEGLPSKTYLSKTLAQYTSKTCSNCGFTITSADYDRVLEKLKKTATGWMTTINGKELKVEGQITYYNRYKRQNVVKDLSVELDRLSEESVNNDISSWTKGRSGEALSLLKKRFSHRPVQEKFVCLNCGFETHADEQAALNIARSWLFLRSQEYKKYQTNKTTGNTDKRAFVETWQSFYRKKLKEVWKPAV

SEQ ID NO: 41315 - protein, 978 aa, synthetic construct
  REGION 1..978: note = engineered CasX variant
QEIGRINKIRRRLVKDSNTKKAGKTGPMKTLLVRVMTPDLRERLENLRKKPENIPQPISNTSRANLNKLLTDYTEMKKAILHVYWEEFQKDPVGLMSRVAQPASKKIDQNKLKPEMDEKGNLTTAGFACSQCGQPLFVYKLEQVSEKGKAYTNYFGRCNVAEHEKLILLAQLKPEKDSDEAVTYSLGKFGQRALDFYSIHVTKESTHPVKPLAQIAGNRYASHPVGKALSDACMGTIASFLSKYQDIIIEHQKVVKGNQKRLESLRELAGKENLEYPSVTLPPQPHTKEGVDAYNEVIARVRMWVNLNLWQKLKLSRDDAKPLLRLKGFPSFPLVERQANEVDWWDMVCNVKKLINEKKEDGKVFWQNLAGYKRQEALRPYLSSEEDRKKGKKFARYQLGDLLWHLEKKHGEDWGKVYDEAWERIDKKVEGLSKHIKLEEERRSEDAQSKAALTDWLRAKASFVIEGLKEADKDEFCRCELKLQKWYGDLRGKPFAIEAENSILDISGFSKQYNCAFIWQKDGVKKLNLYLIINYFKGGKLRFKKIKPEAFEANRFYTVINKKSGEIVPMEVNFNFDDPNLIILPLAFGKRQGREFIWNDLLSLETGSLKLANGRVIEKTLYNRRTRQDEPALFVALTFERREVLDSSNIKPMNLIGVDRGENIPAVIALTDPEGCPLSRFKDSLGNPTHILRIGESYKEKQRTIQAKKEVEQRRAGGYSRKYASKAKNLADDMVRNTARDLLYYAVTQDAMLIFENLSRGFGRQGKRTFMAERQYTRMEDWLTAKLAYEGLPSKTYLSKTLAQYTSKTCSNCGFTITSADYDRVLEKLKKTATGWMTTINGKELKVEGQITYYNRYKRQNVVKDLSVELDRLSEESVNNDISSWTKGRSGEALSLLKKRFSHRPVQEKFVCLNCGFETHADEQAALNIARSWLFLRSQEYKKYQTNKTTGNTDKRAFVETWQSFYRKKLKEVWKPAV

SEQ ID NO: 41316 - protein, 978 aa, synthetic construct
  REGION 1..978: note = engineered CasX variant
QEIGRINKIRRRLVKDSNTKKAGKTGPMKTLLVRVMTPDLRERLENLRKKPENIPQPISNTSRANLNKLLTDYTEMKKAILHVYWEEFQKDPVGLMSRVAQPASKKIDQNKLKPEMDEKGNLTTAGFACSQCGQPLFVYKLEQVSEKGKAYTNYFGRCNVAEHEKLILLAQLKPEKDSDEAVTYSLGKFGQRALDFYSIHVTKESTHPVKPLAQIAGNRYASSPVGKALSDACMGTIASFLSKYQDIIIEHQKVVKGNQKRLESLRELAGKENLEYPSVTLPPQPHTKEGVDAYNEVIARVRMWVNLNLWQKLKLSRDDAKPLLRLKGFPSFPLVERQANEVDWWDMVCNVKKLINEKKEDGKVFWQNLAGYKRQEALRPYLSSEEDRKKGKKFARYQLGDLLWHLEKKHGEDWGKVYDEAWERIDKKVEGLSKHIKLEEERRSEDAQSKAALTDWLRAKASFVIEGLKEADKDEFCRCELKLQKWYGDLRGKPFAIEAENSILDISGFSKQYNCAFIWQKDGVKKLNLYLIINYFKGGKLRFKKIKPEAFEANRFYTVINKKSGEIVPMEVNFNFDDPNLIILPLAFGKRQGREFIWNDLLSLETGSLKLANGRVIEKTLYNRRTRQDEPALFVALTFERREVLDSSNIKPMNLIGVDRGENIPAVIALTDPEGCPLSRFKDSLGNPTHILRIGESYKEKQRTIQAKKEVEQRRAGGYSRKYASKAKNLADDMVRNTARDLLYYAVTQDAMLIFENLSRGFGRQGKRTFMAERQYTRMEDWLTAKLAYEGLPSKTYLSKTLAQYTSKTCSNCGFTITSADYDRVLEKLKKTATGWMTTINGKELKVEGQITYYNRYKRQNVVKDLSVELDRLSEESVNNDISSWTKGRSGEALSLLKKRFSHRPVQEKFVCLNCGFETHADEQAALNIARSWLFLRSQEYKKYQTNKTTGNTDKRAFVETWQSFYRKKLKEVWKPAV

SEQ ID NO: 41317 - protein, 978 aa, synthetic construct
  REGION 1..978: note = engineered CasX variant
QEIGRINKIRRRLVKDSNTKKAGKTGPMKTLLVRVMTPDLRERLENLRKKPENIPQPISNTSRANLNKLLTDYTEMKKAILHVYWEEFQKDPVGLMSRVAQPASKKIDQNKLKPEMDEKGNLTTAGFACSQCGQPLFVYKLEQVSEKGKAYTNYFGRCNVAEHEKLILLAQLKPEKDSDEAVTYSLGKFGQRALDFYSIHVTKESTHPVKPLAQIAGNRYASTPVGKALSDACMGTIASFLSKYQDIIIEHQKVVKGNQKRLESLRELAGKENLEYPSVTLPPQPHTKEGVDAYNEVIARVRMWVNLNLWQKLKLSRDDAKPLLRLKGFPSFPLVERQANEVDWWDMVCNVKKLINEKKEDGKVFWQNLAGYKRQEALRPYLSSEEDRKKGKKFARYQLGDLLWHLEKKHGEDWGKVYDEAWERIDKKVEGLSKHIKLEEERRSEDAQSKAALTDWLRAKASFVIEGLKEADKDEFCRCELKLQKWYGDLRGKPFAIEAENSILDISGFSKQYNCAFIWQKDGVKKLNLYLIINYFKGGKLRFKKIKPEAFEANRFYTVINKKSGEIVPMEVNFNFDDPNLIILPLAFGKRQGREFIWNDLLSLETGSLKLANGRVIEKTLYNRRTRQDEPALFVALTFERREVLDSSNIKPMNLIGVDRGENIPAVIALTDPEGCPLSRFKDSLGNPTHILRIGESYKEKQRTIQAKKEVEQRRAGGYSRKYASKAKNLADDMVRNTARDLLYYAVTQDAMLIFENLSRGFGRQGKRTFMAERQYTRMEDWLTAKLAYEGLPSKTYLSKTLAQYTSKTCSNCGFTITSADYDRVLEKLKKTATGWMTTINGKELKVEGQITYYNRYKRQNVVKDLSVELDRLSEESVNNDISSWTKGRSGEALSLLKKRFSHRPVQEKFVCLNCGFETHADEQAALNIARSWLFLRSQEYKKYQTNKTTGNTDKRAFVETWQSFYRKKLKEVWKPAV

SEQ ID NO: 41318 - protein, 978 aa, synthetic construct
  REGION 1..978: note = engineered CasX variant
QEIGRINKIRRRLVKDSNTKKAGKTGPMKTLLVRVMTPDLRERLENLRKKPENIPQPISNTSRANLNKLLTDYTEMKKAILHVYWEEFQKDPVGLMSRVAQPASKKIDQNKLKPEMDEKGNLTTAGFACSQCGQPLFVYKLEQVSEKGKAYTNYFGRCNVAEHEKLILLAQLKPEKDSDEAVTYSLGKFGQRALDFYSIHVTKESTHPVKPLAQIAGNRYASAPVGKALSDACMGTIASFLSKYQDIIIEHQKVVKGNQKRLESLRELAGKENLEYPSVTLPPQPHTKEGVDAYNEVIARVRMWVNLNLWQKLKLSRDDAKPLLRLKGFPSFPLVERQANEVDWWDMVCNVKKLINEKKEDGKVFWQNLAGYKRQEALRPYLSSEEDRKKGKKFARYQLGDLLWHLEKKHGEDWGKVYDEAWERIDKKVEGLSKHIKLEEERRSEDAQSKAALTDWLRAKASFVIEGLKEADKDEFCRCELKLQKWYGDLRGKPFAIEAENSILDISGFSKQYNCAFIWQKDGVKKLNLYLIINYFKGGKLRFKKIKPEAFEANRFYTVINKKSGEIVPMEVNFNFDDPNLIILPLAFGKRQGREFIWNDLLSLETGSLKLANGRVIEKTLYNRRTRQDEPALFVALTFERREVLDSSNIKPMNLIGVDRGENIPAVIALTDPEGCPLSRFKDSLGNPTHILRIGESYKEKQRTIQAKKEVEQRRAGGYSRKYASKAKNLADDMVRNTARDLLYYAVTQDAMLIFENLSRGFGRQGKRTFMAERQYTRMEDWLTAKLAYEGLPSKTYLSKTLAQYTSKTCSNCGFTITSADYDRVLEKLKKTATGWMTTINGKELKVEGQITYYNRYKRQNVVKDLSVELDRLSEESVNNDISSWTKGRSGEALSLLKKRFSHRPVQEKFVCLNCGFETHADEQAALNIARSWLFLRSQEYKKYQTNKTTGNTDKRAFVETWQSFYRKKLKEVWKPAV

SEQ ID NO: 41319 - protein, 978 aa, synthetic construct
  REGION 1..978: note = engineered CasX variant
QEIGRINKIRRRLVKDSNTKKAGKTGPMKTLLVRVMTPDLRERLENLRKKPENIPQPISNTSRANLNKLLTDYTEMKKAILHVYWEEFQKDPVGLMSRVAQPASKKIDQNKLKPEMDEKGNLTTAGFACSQCGQPLFVYKLEQVSEKGKAYTNYFGRCNVAEHEKLILLAQLKPEKDSDEAVTYSLGKFGQRALDFYSIHVTKESTHPVKPLAQIAGNRYASVPVGKALSDACMGTIASFLSKYQDIIIEHQKVVKGNQKRLESLRELAGKENLEYPSVTLPPQPHTKEGVDAYNEVIARVRMWVNLNLWQKLKLSRDDAKPLLRLKGFPSFPLVERQANEVDWWDMVCNVKKLINEKKEDGKVFWQNLAGYKRQEALRPYLSSEEDRKKGKKFARYQLGDLLWHLEKKHGEDWGKVYDEAWERIDKKVEGLSKHIKLEEERRSEDAQSKAALTDWLRAKASFVIEGLKEADKDEFCRCELKLQKWYGDLRGKPFAIEAENSILDISGFSKQYNCAFIWQKDGVKKLNLYLIINYFKGGKLRFKKIKPEAFEANRFYTVINKKSGEIVPMEVNFNFDDPNLIILPLAFGKRQGREFIWNDLLSLETGSLKLANGRVIEKTLYNRRTRQDEPALFVALTFERREVLDSSNIKPMNLIGVDRGENIPAVIALTDPEGCPLSRFKDSLGNPTHILRIGESYKEKQRTIQAKKEVEQRRAGGYSRKYASKAKNLADDMVRNTARDLLYYAVTQDAMLIFENLSRGFGRQGKRTFMAERQYTRMEDWLTAKLAYEGLPSKTYLSKTLAQYTSKTCSNCGFTITSADYDRVLEKLKKTATGWMTTINGKELKVEGQITYYNRYKRQNVVKDLSVELDRLSEESVNNDISSWTKGRSGEALSLLKKRFSHRPVQEKFVCLNCGFETHADEQAALNIARSWLFLRSQEYKKYQTNKTTGNTDKRAFVETWQSFYRKKLKEVWKPAV

SEQ ID NO: 41320 - protein, 978 aa, synthetic construct
  REGION 1..978: note = engineered CasX variant
QEIGRINKIRRRLVKDSNTKKAGKTGPMKTLLVRVMTPDLRERLENLRKKPENIPQPISNTSRANLNKLLTDYTEMKKAILHVYWEEFQKDPVGLMSRVAQPASKKIDQNKLKPEMDEKGNLTTAGFACSQCGQPLFVYKLEQVSEKGKAYTNYFGRCNVAEHEKLIKLAQLKPEKDSDEAVTYSLGKFGQRALDFYSIHVTKESTHPVKPLAQIAGNRYASGPVGKALSDACMGTIASFLSKYQDIIIEHQKVVKGNQKRLESLRELAGKENLEYPSVTLPPQPHTKEGVDAYNEVIARVRMWVNLNLWQKLKLSRDDAKPLLRLKGFPSFPLVERQANEVDWWDMVCNVKKLINEKKEDGKVFWQNLAGYKRQEALRPYLSSEEDRKKGKKFARYQLGDLLWHLEKKHGEDWGKVYDEAWERIDKKVEGLSKHIKLEEERRSEDAQSKAALTDWLRAKASFVIEGLKEADKDEFCRCELKLQKWYGDLRGKPFAIEAENSILDISGFSKQYNCAFIWQKDGVKKLNLYLIINYFKGGKLRFKKIKPEAFEANRFYTVINKKSGEIVPMEVNFNFDDPNLIILPLAFGKRQGREFIWNDLLSLETGSLKLANGRVIEKTLYNRRTRQDEPALFVALTFERREVLDSSNIKPMNLIGVDRGENIPAVIALTDPEGCPLSRFKDSLGNPTHILRIGESYKEKQRTIQAKKEVEQRRAGGYSRKYASKAKNLADDMVRNTARDLLYYAVTQDAMLIFENLSRGFGRQGKRTFMAERQYTRMEDWLTAKLAYEGLPSKTYLSKTLAQYTSKTCSNCGFTITSADYDRVLEKLKKTATGWMTTINGKELKVEGQITYYNRYKRQNVVKDLSVELDRLSEESVNNDISSWTKGRSGEALSLLKKRFSHRPVQEKFVCLNCGFETHADEQAALNIARSWLFLRSQEYKKYQTNKTTGNTDKRAFVETWQSFYRKKLKEVWKPAV

SEQ ID NO: 41321 - protein, 977 aa, synthetic construct
  REGION 1..977: note = engineered CasX variant
QEIGRINKIRRRLVKDSNTKKAGKTGPMKTLLVRVMTPDLRERLENLRKKPENIPQPISNTSRANLNKLLTDYTEMKKAILHVYWEEFQKDPVGLMSRVAQPASKKIDQNKLKPEMDEKGNLTTAGFACSQCGQPLFVYKLEQVSEKGKAYTNYFGRCNVAEHEKLILLAQLKPEKDSDEAVTYSLGKFGQRALDFYSIHVTKESTHPVKPLAQIAGNRYASPVGKALSDACMGTIASFLSKYQDIIIEHQKVVKGNQKRLESLRELAGKENLEYPSVTLPPQPHTKEGVDAYNEVIARVRMWVNLNLWQKLKLSRDDAKPLLRLKGFPSFPLVERQANEVDWWDMVCNVKKLINEKKEDGKVFWQNLAGYKRQEALRPYLSSEEDRKKGKKFARYQLGDLLWHLEKKHGEDWGKVYDEAWERIDKKVEGLSKHIKLEEERRSEDAQSKAALTDWLRAKASFVIEGLKEADKDEFCRCELKLQKWYGDLRGKPFAIEAENSILDISGFSKQYNCAFIWQKDGVKKLNLYLIINYFKGGKLRFKKIKPEAFEANRFYTVINKKSGEIVPMEVNFNFDDPNLIILPLAFGKRQGREFIWNDLLSLETGSLKLANGRVIEKTLYNRRTRQDEPALFVALTFERREVLDSSNIKPMNLIGVDRGENIPAVIALTDPEGCPLSRFKDSLGNPTHILRIGESYKEKQRTIQAKKEVEQRRAGGYSRKYASKAKNLADDMVRNTARDLLYYAVTQDAMLIFENLSRGFGRQGKRTFMAERQYTRMEDWLTAKLAYEGLPSKTYLSKTLAQYTSKTCSNCGFTITSADYDRVLEKLKKTATGWMTTINGKELKVEGQITYYNRYKRQNVVKDLSVELDRLSEESVNNDISSWTKGRSGEALSLLKKRFSHRPVQEKFVCLNCGFETHADEQAALNIARSWLFLRSQEYKKYQTNKTTGNTDKRAFVETWQSFYRKKLKEVWKPAV

SEQ ID NO: 41322 - protein, 978 aa, synthetic construct
  REGION 1..978: note = engineered CasX variant
QEIGRINKIRRRLVKDSNTKKAGKTGPMKTLLVRVMTPDLRERLENLRKKPENIPQPISNTSRANLNKLLTDYTEMKKAILHVYWEEFQKDPVGLMSRVAQPASKKIDQNKLKPEMDEKGNLTTAGFACSQCGQPLFVYKLEQVSEKGKAYTNYFGRCNVAEHEKLILLAQLKPEKDSDEAVTYSLGKFGQRALDFYSIHVTKESTHPVKPLAQIAGNRYASYPVGKALSDACMGTIASFLSKYQDIIIEHQKVVKGNQKRLESLRELAGKENLEYPSVTLPPQPHTKEGVDAYNEVIARVRMWVNLNLWQKLKLSRDDAKPLLRLKGFPSFPLVERQANEVDWWDMVCNVKKLINEKKEDGKVFWQNLAGYKRQEALRPYLSSEEDRKKGKKFARYQLGDLLLHLYKKHGEDWGKVYDEAWERIDKKVEGLSKHIKLEEERRSEDAQSKAALTDWLRAKASFVIEGLKEADKDEFCRCELKLQKWYGDLRGKPFAIEAENSILDISGFSKQYNCAFIWQKDGVKKLNLYLIINYFKGGKLRFKKIKPEAFEANRFYTVINKKSGEIVPMEVNFNFDDPNLIILPLAFGKRQGREFIWNDLLSLETGSLKLANGRVIEKTLYNRRTRQDEPALFVALTFERREVLDSSNIKPMNLIGVDRGENIPAVIALTDPEGCPLSRFKDSLGNPTHILRIGESYKEKQRTIQAKKEVEQRRAGGYSRKYASKAKNLADDMVRNTARDLLYYAVTQDAMLIFENLSRGFGRQGKRTFMAERQYTRMEDWLTAKLAYEGLPSKTYLSKTLAQYTSKTCSNCGFTITSADYDRVLEKLKKTATGWMTTINGKELKVEGQITYYNRYKRQNVVKDLSVELDRLSEESVNNDISSWTKGRSGEALSLLKKRFSHRPVQEKFVCLNCGFETHADEQAALNIARSWLFLRSQEYKKYQTNKTTGNTDKRAFVETWQSFYRKKLKEVWKPAV

SEQ ID NO: 41323 - protein, 978 aa, synthetic construct
  REGION 1..978: note = engineered CasX variant
QEIGRINKIRRRLVKDSNTKKAGKTGPMKTLLVRVMTPDLRERLENLRKKPENIPQPISNTSRANLNKLLTDYTEMKKAILHVYWEEFQKDPVGLMSRVAQPASKKIDQNKLKPEMDEKGNLTTAGFACSQCGQPLFVYKLEQVSEKGKAYTNYFGRCNVAEHEKLILLAQLKPEKDSDEAVTYSLGKFGQRALDFYSIHVTKESTHPVKPLAQIAGNRYASHPVGKALSDACMGTIASFLSKYQDIIIEHQKVVKGNQKRLESLRELAGKENLEYPSVTLPPQPHTKEGVDAYNEVIARVRMWVNLNLWQKLKLSRDDAKPLLRLKGFPSFPLVERQANEVDWWDMVCNVKKLINEKKEDGKVFWQNLAGYKRQEALRPYLSSEEDRKKGKKFARYQLGDLLLHLYKKHGEDWGKVYDEAWERIDKKVEGLSKHIKLEEERRSEDAQSKAALTDWLRAKASFVIEGLKEADKDEFCRCELKLQKWYGDLRGKPFAIEAENSILDISGFSKQYNCAFIWQKDGVKKLNLYLIINYFKGGKLRFKKIKPEAFEANRFYTVINKKSGEIVPMEVNFNFDDPNLIILPLAFGKRQGREFIWNDLLSLETGSLKLANGRVIEKTLYNRRTRQDEPALFVALTFERREVLDSSNIKPMNLIGVDRGENIPAVIALTDPEGCPLSRFKDSLGNPTHILRIGESYKEKQRTIQAKKEVEQRRAGGYSRKYASKAKNLADDMVRNTARDLLYYAVTQDAMLIFENLSRGFGRQGKRTFMAERQYTRMEDWLTAKLAYEGLPSKTYLSKTLAQYTSKTCSNCGFTITSADYDRVLEKLKKTATGWMTTINGKELKVEGQITYYNRYKRQNVVKDLSVELDRLSEESVNNDISSWTKGRSGEALSLLKKRFSHRPVQEKFVCLNCGFETHADEQAALNIARSWLFLRSQEYKKYQTNKTTGNTDKRAFVETWQSFYRKKLKEVWKPAV

SEQ ID NO: 41324 - protein, 978 aa, synthetic construct
  REGION 1..978: note = engineered CasX variant
QEIGRINKIRRRLVKDSNTKKAGKTGPMKTLLVRVMTPDLRERLENLRKKPENIPQPISNTSRANLNKLLTDYTEMKKAILHVYWEEFQKDPVGLMSRVAQPASKKIDQNKLKPEMDEKGNLTTAGFACSQCGQPLFVYKLEQVSEKGKAYTNYFGRCNVAEHEKLILLAQLKPEKDSDEAVTYSLGKFGQRALDFYSIHVTKESTHPVKPLAQIAGNRYASSPVGKALSDACMGTIASFLSKYQDIIIEHQKVVKGNQKRLESLRELAGKENLEYPSVTLPPQPHTKEGVDAYNEVIARVRMWVNLNLWQKLKLSRDDAKPLLRLKGFPSFPLVERQANEVDWWDMVCNVKKLINEKKEDGKVFWQNLAGYKRQEALRPYLSSEEDRKKGKKFARYQLGDLLLHLYKKHGEDWGKVYDEAWERIDKKVEGLSKHIKLEEERRSEDAQSKAALTDWLRAKASFVIEGLKEADKDEFCRCELKLQKWYGDLRGKPFAIEAENSILDISGFSKQYNCAFIWQKDGVKKLNLYLIINYFKGGKLRFKKIKPEAFEANRFYTVINKKSGEIVPMEVNFNFDDPNLIILPLAFGKRQGREFIWNDLLSLETGSLKLANGRVIEKTLYNRRTRQDEPALFVALTFERREVLDSSNIKPMNLIGVDRGENIPAVIALTDPEGCPLSRFKDSLGNPTHILRIGESYKEKQRTIQAKKEVEQRRAGGYSRKYASKAKNLADDMVRNTARDLLYYAVTQDAMLIFENLSRGFGRQGKRTFMAERQYTRMEDWLTAKLAYEGLPSKTYLSKTLAQYTSKTCSNCGFTITSADYDRVLEKLKKTATGWMTTINGKELKVEGQITYYNRYKRQNVVKDLSVELDRLSEESVNNDISSWTKGRSGEALSLLKKRFSHRPVQEKFVCLNCGFETHADEQAALNIARSWLFLRSQEYKKYQTNKTTGNTDKRAFVETWQSFYRKKLKEVWKPAV

SEQ ID NO: 41325 - protein, 978 aa, synthetic construct
  REGION 1..978: note = engineered CasX variant
QEIGRINKIRRRLVKDSNTKKAGKTGPMKTLLVRVMTPDLRERLENLRKKPENIPQPISNTSRANLNKLLTDYTEMKKAILHVYWEEFQKDPVGLMSRVAQPASKKIDQNKLKPEMDEKGNLTTAGFACSQCGQPLFVYKLEQVSEKGKAYTNYFGRCNVAEHEKLILLAQLKPEKDSDEAVTYSLGKFGQRALDFYSIHVTKESTHPVKPLAQIAGNRYASTPVGKALSDACMGTIASFLSKYQDIIIEHQKVVKGNQKRLESLRELAGKENLEYPSVTLPPQPHTKEGVDAYNEVIARVRMWVNLNLWQKLKLSRDDAKPLLRLKGFPSFPLVERQANEVDWWDMVCNVKKLINEKKEDGKVFWQNLAGYKRQEALRPYLSSEEDRKKGKKFARYQLGDLLLHLYKKHGEDWGKVYDEAWERIDKKVEGLSKHIKLEEERRSEDAQSKAALTDWLRAKASFVIEGLKEADKDEFCRCELKLQKWYGDLRGKPFAIEAENSILDISGFSKQYNCAFIWQKDGVKKLNLYLIINYFKGGKLRFKKIKPEAFEANRFYTVINKKSGEIVPMEVNFNFDDPNLIILPLAFGKRQGREFIWNDLLSLETGSLKLANGRVIEKTLYNRRTRQDEPALFVALTFERREVLDSSNIKPMNLIGVDRGENIPAVIALTDPEGCPLSRFKDSLGNPTHILRIGESYKEKQRTIQAKKEVEQRRAGGYSRKYASKAKNLADDMVRNTARDLLYYAVTQDAMLIFENLSRGFGRQGKRTFMAERQYTRMEDWLTAKLAYEGLPSKTYLSKTLAQYTSKTCSNCGFTITSADYDRVLEKLKKTATGWMTTINGKELKVEGQITYYNRYKRQNVVKDLSVELDRLSEESVNNDISSWTKGRSGEALSLLKKRFSHRPVQEKFVCLNCGFETHADEQAALNIARSWLFLRSQEYKKYQTNKTTGNTDKRAFVETWQSFYRKKLKEVWKPAV

SEQ ID NO: 41326 - protein, 978 aa, synthetic construct
  REGION 1..978: note = engineered CasX variant
QEIGRINKIRRRLVKDSNTKKAGKTGPMKTLLVRVMTPDLRERLENLRKKPENIPQPISNTSRANLNKLLTDYTEMKKAILHVYWEEFQKDPVGLMSRVAQPASKKIDQNKLKPEMDEKGNLTTAGFACSQCGQPLFVYKLEQVSEKGKAYTNYFGRCNVAEHEKLILLAQLKPEKDSDEAVTYSLGKFGQRALDFYSIHVTKESTHPVKPLAQIAGNRYASAPVGKALSDACMGTIASFLSKYQDIIIEHQKVVKGNQKRLESLRELAGKENLEYPSVTLPPQPHTKEGVDAYNEVIARVRMWVNLNLWQKLKLSRDDAKPLLRLKGFPSFPLVERQANEVDWWDMVCNVKKLINEKKEDGKVFWQNLAGYKRQEALRPYLSSEEDRKKGKKFARYQLGDLLLHLYKKHGEDWGKVYDEAWERIDKKVEGLSKHIKLEEERRSEDAQSKAALTDWLRAKASFVIEGLKEADKDEFCRCELKLQKWYGDLRGKPFAIEAENSILDISGFSKQYNCAFIWQKDGVKKLNLYLIINYFKGGKLRFKKIKPEAFEANRFYTVINKKSGEIVPMEVNFNFDDPNLIILPLAFGKRQGREFIWNDLLSLETGSLKLANGRVIEKTLYNRRTRQDEPALFVALTFERREVLDSSNIKPMNLIGVDRGENIPAVIALTDPEGCPLSRFKDSLGNPTHILRIGESYKEKQRTIQAKKEVEQRRAGGYSRKYASKAKNLADDMVRNTARDLLYYAVTQDAMLIFENLSRGFGRQGKRTFMAERQYTRMEDWLTAKLAYEGLPSKTYLSKTLAQYTSKTCSNCGFTITSADYDRVLEKLKKTATGWMTTINGKELKVEGQITYYNRYKRQNVVKDLSVELDRLSEESVNNDISSWTKGRSGEALSLLKKRFSHRPVQEKFVCLNCGFETHADEQAALNIARSWLFLRSQEYKKYQTNKTTGNTDKRAFVETWQSFYRKKLKEVWKPAV

SEQ ID NO: 41327 - protein, 978 aa, synthetic construct
  REGION 1..978: note = engineered CasX variant
QEIGRINKIRRRLVKDSNTKKAGKTGPMKTLLVRVMTPDLRERLENLRKKPENIPQPISNTSRANLNKLLTDYTEMKKAILHVYWEEFQKDPVGLMSRVAQPASKKIDQNKLKPEMDEKGNLTTAGFACSQCGQPLFVYKLEQVSEKGKAYTNYFGRCNVAEHEKLILLAQLKPEKDSDEAVTYSLGKFGQRALDFYSIHVTKESTHPVKPLAQIAGNRYASVPVGKALSDACMGTIASFLSKYQDIIIEHQKVVKGNQKRLESLRELAGKENLEYPSVTLPPQPHTKEGVDAYNEVIARVRMWVNLNLWQKLKLSRDDAKPLLRLKGFPSFPLVERQANEVDWWDMVCNVKKLINEKKEDGKVFWQNLAGYKRQEALRPYLSSEEDRKKGKKFARYQLGDLLLHLYKKHGEDWGKVYDEAWERIDKKVEGLSKHIKLEEERRSEDAQSKAALTDWLRAKASFVIEGLKEADKDEFCRCELKLQKWYGDLRGKPFAIEAENSILDISGFSKQYNCAFIWQKDGVKKLNLYLIINYFKGGKLRFKKIKPEAFEANRFYTVINKKSGEIVPMEVNFNFDDPNLIILPLAFGKRQGREFIWNDLLSLETGSLKLANGRVIEKTLYNRRTRQDEPALFVALTFERREVLDSSNIKPMNLIGVDRGENIPAVIALTDPEGCPLSRFKDSLGNPTHILRIGESYKEKQRTIQAKKEVEQRRAGGYSRKYASKAKNLADDMVRNTARDLLYYAVTQDAMLIFENLSRGFGRQGKRTFMAERQYTRMEDWLTAKLAYEGLPSKTYLSKTLAQYTSKTCSNCGFTITSADYDRVLEKLKKTATGWMTTINGKELKVEGQITYYNRYKRQNVVKDLSVELDRLSEESVNNDISSWTKGRSGEALSLLKKRFSHRPVQEKFVCLNCGFETHADEQAALNIARSWLFLRSQEYKKYQTNKTTGNTDKRAFVETWQSFYRKKLKEVWKPAV

SEQ ID NO: 41328 - protein, 978 aa, synthetic construct
  REGION 1..978: note = engineered CasX variant
QEIGRINKIRRRLVKDSNTKKAGKTGPMKTLLVRVMTPDLRERLENLRKKPENIPQPISNTSRANLNKLLTDYTEMKKAILHVYWEEFQKDPVGLMSRVAQPASKKIDQNKLKPEMDEKGNLTTAGFACSQCGQPLFVYKLEQVSEKGKAYTNYFGRCNVAEHEKLIKLAQLKPEKDSDEAVTYSLGKFGQRALDFYSIHVTKESTHPVKPLAQIAGNRYASGPVGKALSDACMGTIASFLSKYQDIIIEHQKVVKGNQKRLESLRELAGKENLEYPSVTLPPQPHTKEGVDAYNEVIARVRMWVNLNLWQKLKLSRDDAKPLLRLKGFPSFPLVERQANEVDWWDMVCNVKKLINEKKEDGKVFWQNLAGYKRQEALRPYLSSEEDRKKGKKFARYQLGDLLLHLYKKHGEDWGKVYDEAWERIDKKVEGLSKHIKLEEERRSEDAQSKAALTDWLRAKASFVIEGLKEADKDEFCRCELKLQKWYGDLRGKPFAIEAENSILDISGFSKQYNCAFIWQKDGVKKLNLYLIINYFKGGKLRFKKIKPEAFEANRFYTVINKKSGEIVPMEVNFNFDDPNLIILPLAFGKRQGREFIWNDLLSLETGSLKLANGRVIEKTLYNRRTRQDEPALFVALTFERREVLDSSNIKPMNLIGVDRGENIPAVIALTDPEGCPLSRFKDSLGNPTHILRIGESYKEKQRTIQAKKEVEQRRAGGYSRKYASKAKNLADDMVRNTARDLLYYAVTQDAMLIFENLSRGFGRQGKRTFMAERQYTRMEDWLTAKLAYEGLPSKTYLSKTLAQYTSKTCSNCGFTITSADYDRVLEKLKKTATGWMTTINGKELKVEGQITYYNRYKRQNVVKDLSVELDRLSEESVNNDISSWTKGRSGEALSLLKKRFSHRPVQEKFVCLNCGFETHADEQAALNIARSWLFLRSQEYKKYQTNKTTGNTDKRAFVETWQSFYRKKLKEVWKPAV

SEQ ID NO: 41329 - protein, 977 aa, synthetic construct
  REGION 1..977: note = engineered CasX variant
QEIGRINKIRRRLVKDSNTKKAGKTGPMKTLLVRVMTPDLRERLENLRKKPENIPQPISNTSRANLNKLLTDYTEMKKAILHVYWEEFQKDPVGLMSRVAQPASKKIDQNKLKPEMDEKGNLTTAGFACSQCGQPLFVYKLEQVSEKGKAYTNYFGRCNVAEHEKLILLAQLKPEKDSDEAVTYSLGKFGQRALDFYSIHVTKESTHPVKPLAQIAGNRYASPVGKALSDACMGTIASFLSKYQDIIIEHQKVVKGNQKRLESLRELAGKENLEYPSVTLPPQPHTKEGVDAYNEVIARVRMWVNLNLWQKLKLSRDDAKPLLRLKGFPSFPLVERQANEVDWWDMVCNVKKLINEKKEDGKVFWQNLAGYKRQEALRPYLSSEEDRKKGKKFARYQLGDLLLHLYKKHGEDWGKVYDEAWERIDKKVEGLSKHIKLEEERRSEDAQSKAALTDWLRAKASFVIEGLKEADKDEFCRCELKLQKWYGDLRGKPFAIEAENSILDISGFSKQYNCAFIWQKDGVKKLNLYLIINYFKGGKLRFKKIKPEAFEANRFYTVINKKSGEIVPMEVNFNFDDPNLIILPLAFGKRQGREFIWNDLLSLETGSLKLANGRVIEKTLYNRRTRQDEPALFVALTFERREVLDSSNIKPMNLIGVDRGENIPAVIALTDPEGCPLSRFKDSLGNPTHILRIGESYKEKQRTIQAKKEVEQRRAGGYSRKYASKAKNLADDMVRNTARDLLYYAVTQDAMLIFENLSRGFGRQGKRTFMAERQYTRMEDWLTAKLAYEGLPSKTYLSKTLAQYTSKTCSNCGFTITSADYDRVLEKLKKTATGWMTTINGKELKVEGQITYYNRYKRQNVVKDLSVELDRLSEESVNNDISSWTKGRSGEALSLLKKRFSHRPVQEKFVCLNCGFETHADEQAALNIARSWLFLRSQEYKKYQTNKTTGNTDKRAFVETWQSFYRKKLKEVWKPAV

SEQ ID NO: 41330 - protein, 978 aa, synthetic construct
  REGION 1..978: note = engineered CasX variant
QEIGRINKIRRRLVKDSNTKKAGKTGPMKTLLVRVMTPDLRERLENLRKKPENIPQPISNTSRANLNKLLTDYTEMKKAILHVYWEEFQKDPVGLMSRVAQPASKKIDQNKLKPEMDEKGNLTTAGFACSQCGQPLFVYKLEQVSEKGKAYTNYFGRCNVAEHEKLILLAQLKPEKDSDEAVTYSLGKFGQRALDFYSIHVTKESTHPVKPLAQIAGNRYASYPVGKALSDACMGTIASFLSKYQDIIIEHQKVVKGNQKRLESLRELAGKENLEYPSVTLPPQPHTKEGVDAYNEVIARVRMWVNLNLWQKLKLSRDDAKPLLRLKGFPSFPLVERQANEVDWWDMVCNVKKLINEKKEDGKVFWQNLAGYKRQEALRPYLSSEEDRKKGKKFARYQLGDLLLHLEKKHPEDWGKVYDEAWERIDKKVEGLSKHIKLEEERRSEDAQSKAALTDWLRAKASFVIEGLKEADKDEFCRCELKLQKWYGDLRGKPFAIEAENSILDISGFSKQYNCAFIWQKDGVKKLNLYLIINYFKGGKLRFKKIKPEAFEANRFYTVINKKSGEIVPMEVNFNFDDPNLIILPLAFGKRQGREFIWNDLLSLETGSLKLANGRVIEKTLYNRRTRQDEPALFVALTFERREVLDSSNIKPMNLIGVDRGENIPAVIALTDPEGCPLSRFKDSLGNPTHILRIGESYKEKQRTIQAKKEVEQRRAGGYSRKYASKAKNLADDMVRNTARDLLYYAVTQDAMLIFENLSRGFGRQGKRTFMAERQYTRMEDWLTAKLAYEGLPSKTYLSKTLAQYTSKTCSNCGFTITSADYDRVLEKLKKTATGWMTTINGKELKVEGQITYYNRYKRQNVVKDLSVELDRLSEESVNNDISSWTKGRSGEALSLLKKRFSHRPVQEKFVCLNCGFETHADEQAALNIARSWLFLRSQEYKKYQTNKTTGNTDKRAFVETWQSFYRKKLKEVWKPAV

SEQ ID NO: 41331 - protein, 978 aa, synthetic construct
  REGION 1..978: note = engineered CasX variant
QEIGRINKIRRRLVKDSNTKKAGKTGPMKTLLVRVMTPDLRERLENLRKKPENIPQPISNTSRANLNKLLTDYTEMKKAILHVYWEEFQKDPVGLMSRVAQPASKKIDQNKLKPEMDEKGNLTTAGFACSQCGQPLFVYKLEQVSEKGKAYTNYFGRCNVAEHEKLILLAQLKPEKDSDEAVTYSLGKFGQRALDFYSIHVTKESTHPVKPLAQIAGNRYASHPVGKALSDACMGTIASFLSKYQDIIIEHQKVVKGNQKRLESLRELAGKENLEYPSVTLPPQPHTKEGVDAYNEVIARVRMWVNLNLWQKLKLSRDDAKPLLRLKGFPSFPLVERQANEVDWWDMVCNVKKLINEKKEDGKVFWQNLAGYKRQEALRPYLSSEEDRKKGKKFARYQLGDLLLHLEKKHPEDWGKVYDEAWERIDKKVEGLSKHIKLEEERRSEDAQSKAALTDWLRAKASFVIEGLKEADKDEFCRCELKLQKWYGDLRGKPFAIEAENSILDISGFSKQYNCAFIWQKDGVKKLNLYLIINYFKGGKLRFKKIKPEAFEANRFYTVINKKSGEIVPMEVNFNFDDPNLIILPLAFGKRQGREFIWNDLLSLETGSLKLANGRVIEKTLYNRRTRQDEPALFVALTFERREVLDSSNIKPMNLIGVDRGENIPAVIALTDPEGCPLSRFKDSLGNPTHILRIGESYKEKQRTIQAKKEVEQRRAGGYSRKYASKAKNLADDMVRNTARDLLYYAVTQDAMLIFENLSRGFGRQGKRTFMAERQYTRMEDWLTAKLAYEGLPSKTYLSKTLAQYTSKTCSNCGFTITSADYDRVLEKLKKTATGWMTTINGKELKVEGQITYYNRYKRQNVVKDLSVELDRLSEESVNNDISSWTKGRSGEALSLLKKRFSHRPVQEKFVCLNCGFETHADEQAALNIARSWLFLRSQEYKKYQTNKTTGNTDKRAFVETWQSFYRKKLKEVWKPAV

SEQ ID NO: 41332 - protein, 978 aa, synthetic construct
  REGION 1..978: note = engineered CasX variant
QEIGRINKIRRRLVKDSNTKKAGKTGPMKTLLVRVMTPDLRERLENLRKKPENIPQPISNTSRANLNKLLTDYTEMKKAILHVYWEEFQKDPVGLMSRVAQPASKKIDQNKLKPEMDEKGNLTTAGFACSQCGQPLFVYKLEQVSEKGKAYTNYFGRCNVAEHEKLILLAQLKPEKDSDEAVTYSLGKFGQRALDFYSIHVTKESTHPVKPLAQIAGNRYASSPVGKALSDACMGTIASFLSKYQDIIIEHQKVVKGNQKRLESLRELAGKENLEYPSVTLPPQPHTKEGVDAYNEVIARVRMWVNLNLWQKLKLSRDDAKPLLRLKGFPSFPLVERQANEVDWWDMVCNVKKLINEKKEDGKVFWQNLAGYKRQEALRPYLSSEEDRKKGKKFARYQLGDLLLHLEKKHPEDWGKVYDEAWERIDKKVEGLSKHIKLEEERRSEDAQSKAALTDWLRAKASFVIEGLKEADKDEFCRCELKLQKWYGDLRGKPFAIEAENSILDISGFSKQYNCAFIWQKDGVKKLNLYLIINYFKGGKLRFKKIKPEAFEANRFYTVINKKSGEIVPMEVNFNFDDPNLIILPLAFGKRQGREFIWNDLLSLETGSLKLANGRVIEKTLYNRRTRQDEPALFVALTFERREVLDSSNIKPMNLIGVDRGENIPAVIALTDPEGCPLSRFKDSLGNPTHILRIGESYKEKQRTIQAKKEVEQRRAGGYSRKYASKAKNLADDMVRNTARDLLYYAVTQDAMLIFENLSRGFGRQGKRTFMAERQYTRMEDWLTAKLAYEGLPSKTYLSKTLAQYTSKTCSNCGFTITSADYDRVLEKLKKTATGWMTTINGKELKVEGQITYYNRYKRQNVVKDLSVELDRLSEESVNNDISSWTKGRSGEALSLLKKRFSHRPVQEKFVCLNCGFETHADEQAALNIARSWLFLRSQEYKKYQTNKTTGNTDKRAFVETWQSFYRKKLKEVWKPAV

SEQ ID NO: 41333 - protein, 978 aa, synthetic construct
  REGION 1..978: note = engineered CasX variant
QEIGRINKIRRRLVKDSNTKKAGKTGPMKTLLVRVMTPDLRERLENLRKKPENIPQPISNTSRANLNKLLTDYTEMKKAILHVYWEEFQKDPVGLMSRVAQPASKKIDQNKLKPEMDEKGNLTTAGFACSQCGQPLFVYKLEQVSEKGKAYTNYFGRCNVAEHEKLILLAQLKPEKDSDEAVTYSLGKFGQRALDFYSIHVTKESTHPVKPLAQIAGNRYASTPVGKALSDACMGTIASFLSKYQDIIIEHQKVVKGNQKRLESLRELAGKENLEYPSVTLPPQPHTKEGVDAYNEVIARVRMWVNLNLWQKLKLSRDDAKPLLRLKGFPSFPLVERQANEVDWWDMVCNVKKLINEKKEDGKVFWQNLAGYKRQEALRPYLSSEEDRKKGKKFARYQLGDLLLHLEKKHPEDWGKVYDEAWERIDKKVEGLSKHIKLEEERRSEDAQSKAALTDWLRAKASFVIEGLKEADKDEFCRCELKLQKWYGDLRGKPFAIEAENSILDISGFSKQYNCAFIWQKDGVKKLNLYLIINYFKGGKLRFKKIKPEAFEANRFYTVINKKSGEIVPMEVNFNFDDPNLIILPLAFGKRQGREFIWNDLLSLETGSLKLANGRVIEKTLYNRRTRQDEPALFVALTFERREVLDSSNIKPMNLIGVDRGENIPAVIALTDPEGCPLSRFKDSLGNPTHILRIGESYKEKQRTIQAKKEVEQRRAGGYSRKYASKAKNLADDMVRNTARDLLYYAVTQDAMLIFENLSRGFGRQGKRTFMAERQYTRMEDWLTAKLAYEGLPSKTYLSKTLAQYTSKTCSNCGFTITSADYDRVLEKLKKTATGWMTTINGKELKVEGQITYYNRYKRQNVVKDLSVELDRLSEESVNNDISSWTKGRSGEALSLLKKRFSHRPVQEKFVCLNCGFETHADEQAALNIARSWLFLRSQEYKKYQTNKTTGNTDKRAFVETWQSFYRKKLKEVWKPAV

SEQ ID NO: 41334 - protein, 978 aa, synthetic construct
  REGION 1..978: note = engineered CasX variant
QEIGRINKIRRRLVKDSNTKKAGKTGPMKTLLVRVMTPDLRERLENLRKKPENIPQPISNTSRANLNKLLTDYTEMKKAILHVYWEEFQKDPVGLMSRVAQPASKKIDQNKLKPEMDEKGNLTTAGFACSQCGQPLFVYKLEQVSEKGKAYTNYFGRCNVAEHEKLILLAQLKPEKDSDEAVTYSLGKFGQRALDFYSIHVTKESTHPVKPLAQIAGNRYASAPVGKALSDACMGTIASFLSKYQDIIIEHQKVVKGNQKRLESLRELAGKENLEYPSVTLPPQPHTKEGVDAYNEVIARVRMWVNLNLWQKLKLSRDDAKPLLRLKGFPSFPLVERQANEVDWWDMVCNVKKLINEKKEDGKVFWQNLAGYKRQEALRPYLSSEEDRKKGKKFARYQLGDLLLHLEKKHPEDWGKVYDEAWERIDKKVEGLSKHIKLEEERRSEDAQSKAALTDWLRAKASFVIEGLKEADKDEFCRCELKLQKWYGDLRGKPFAIEAENSILDISGFSKQYNCAFIWQKDGVKKLNLYLIINYFKGGKLRFKKIKPEAFEANRFYTVINKKSGEIVPMEVNFNFDDPNLIILPLAFGKRQGREFIWNDLLSLETGSLKLANGRVIEKTLYNRRTRQDEPALFVALTFERREVLDSSNIKPMNLIGVDRGENIPAVIALTDPEGCPLSRFKDSLGNPTHILRIGESYKEKQRTIQAKKEVEQRRAGGYSRKYASKAKNLADDMVRNTARDLLYYAVTQDAMLIFENLSRGFGRQGKRTFMAERQYTRMEDWLTAKLAYEGLPSKTYLSKTLAQYTSKTCSNCGFTITSADYDRVLEKLKKTATGWMTTINGKELKVEGQITYYNRYKRQNVVKDLSVELDRLSEESVNNDISSWTKGRSGEALSLLKKRFSHRPVQEKFVCLNCGFETHADEQAALNIARSWLFLRSQEYKKYQTNKTTGNTDKRAFVETWQSFYRKKLKEVWKPAV

SEQ ID NO: 41335 - protein, 978 aa, synthetic construct
  REGION 1..978: note = engineered CasX variant
QEIGRINKIRRRLVKDSNTKKAGKTGPMKTLLVRVMTPDLRERLENLRKKPENIPQPISNTSRANLNKLLTDYTEMKKAILHVYWEEFQKDPVGLMSRVAQPASKKIDQNKLKPEMDEKGNLTTAGFACSQCGQPLFVYKLEQVSEKGKAYTNYFGRCNVAEHEKLILLAQLKPEKDSDEAVTYSLGKFGQRALDFYSIHVTKESTHPVKPLAQIAGNRYASVPVGKALSDACMGTIASFLSKYQDIIIEHQKVVKGNQKRLESLRELAGKENLEYPSVTLPPQPHTKEGVDAYNEVIARVRMWVNLNLWQKLKLSRDDAKPLLRLKGFPSFPLVERQANEVDWWDMVCNVKKLINEKKEDGKVFWQNLAGYKRQEALRPYLSSEEDRKKGKKFARYQLGDLLLHLEKKHPEDWGKVYDEAWERIDKKVEGLSKHIKLEEERRSEDAQSKAALTDWLRAKASFVIEGLKEADKDEFCRCELKLQKWYGDLRGKPFAIEAENSILDISGFSKQYNCAFIWQKDGVKKLNLYLIINYFKGGKLRFKKIKPEAFEANRFYTVINKKSGEIVPMEVNFNFDDPNLIILPLAFGKRQGREFIWNDLLSLETGSLKLANGRVIEKTLYNRRTRQDEPALFVALTFERREVLDSSNIKPMNLIGVDRGENIPAVIALTDPEGCPLSRFKDSLGNPTHILRIGESYKEKQRTIQAKKEVEQRRAGGYSRKYASKAKNLADDMVRNTARDLLYYAVTQDAMLIFENLSRGFGRQGKRTFMAERQYTRMEDWLTAKLAYEGLPSKTYLSKTLAQYTSKTCSNCGFTITSADYDRVLEKLKKTATGWMTTINGKELKVEGQITYYNRYKRQNVVKDLSVELDRLSEESVNNDISSWTKGRSGEALSLLKKRFSHRPVQEKFVCLNCGFETHADEQAALNIARSWLFLRSQEYKKYQTNKTTGNTDKRAFVETWQSFYRKKLKEVWKPAV

SEQ ID NO: 41336 - protein, 978 aa, synthetic construct
  REGION 1..978: note = engineered CasX variant
QEIGRINKIRRRLVKDSNTKKAGKTGPMKTLLVRVMTPDLRERLENLRKKPENIPQPISNTSRANLNKLLTDYTEMKKAILHVYWEEFQKDPVGLMSRVAQPASKKIDQNKLKPEMDEKGNLTTAGFACSQCGQPLFVYKLEQVSEKGKAYTNYFGRCNVAEHEKLIKLAQLKPEKDSDEAVTYSLGKFGQRALDFYSIHVTKESTHPVKPLAQIAGNRYASGPVGKALSDACMGTIASFLSKYQDIIIEHQKVVKGNQKRLESLRELAGKENLEYPSVTLPPQPHTKEGVDAYNEVIARVRMWVNLNLWQKLKLSRDDAKPLLRLKGFPSFPLVERQANEVDWWDMVCNVKKLINEKKEDGKVFWQNLAGYKRQEALRPYLSSEEDRKKGKKFARYQLGDLLLHLEKKHPEDWGKVYDEAWERIDKKVEGLSKHIKLEEERRSEDAQSKAALTDWLRAKASFVIEGLKEADKDEFCRCELKLQKWYGDLRGKPFAIEAENSILDISGFSKQYNCAFIWQKDGVKKLNLYLIINYFKGGKLRFKKIKPEAFEANRFYTVINKKSGEIVPMEVNFNFDDPNLIILPLAFGKRQGREFIWNDLLSLETGSLKLANGRVIEKTLYNRRTRQDEPALFVALTFERREVLDSSNIKPMNLIGVDRGENIPAVIALTDPEGCPLSRFKDSLGNPTHILRIGESYKEKQRTIQAKKEVEQRRAGGYSRKYASKAKNLADDMVRNTARDLLYYAVTQDAMLIFENLSRGFGRQGKRTFMAERQYTRMEDWLTAKLAYEGLPSKTYLSKTLAQYTSKTCSNCGFTITSADYDRVLEKLKKTATGWMTTINGKELKVEGQITYYNRYKRQNVVKDLSVELDRLSEESVNNDISSWTKGRSGEALSLLKKRFSHRPVQEKFVCLNCGFETHADEQAALNIARSWLFLRSQEYKKYQTNKTTGNTDKRAFVETWQSFYRKKLKEVWKPAV

SEQ ID NO: 41337 - protein, 977 aa, synthetic construct
  REGION 1..977: note = engineered CasX variant
QEIGRINKIRRRLVKDSNTKKAGKTGPMKTLLVRVMTPDLRERLENLRKKPENIPQPISNTSRANLNKLLTDYTEMKKAILHVYWEEFQKDPVGLMSRVAQPASKKIDQNKLKPEMDEKGNLTTAGFACSQCGQPLFVYKLEQVSEKGKAYTNYFGRCNVAEHEKLILLAQLKPEKDSDEAVTYSLGKFGQRALDFYSIHVTKESTHPVKPLAQIAGNRYASPVGKALSDACMGTIASFLSKYQDIIIEHQKVVKGNQKRLESLRELAGKENLEYPSVTLPPQPHTKEGVDAYNEVIARVRMWVNLNLWQKLKLSRDDAKPLLRLKGFPSFPLVERQANEVDWWDMVCNVKKLINEKKEDGKVFWQNLAGYKRQEALRPYLSSEEDRKKGKKFARYQLGDLLLHLEKKHPEDWGKVYDEAWERIDKKVEGLSKHIKLEEERRSEDAQSKAALTDWLRAKASFVIEGLKEADKDEFCRCELKLQKWYGDLRGKPFAIEAENSILDISGFSKQYNCAFIWQKDGVKKLNLYLIINYFKGGKLRFKKIKPEAFEANRFYTVINKKSGEIVPMEVNFNFDDPNLIILPLAFGKRQGREFIWNDLLSLETGSLKLANGRVIEKTLYNRRTRQDEPALFVALTFERREVLDSSNIKPMNLIGVDRGENIPAVIALTDPEGCPLSRFKDSLGNPTHILRIGESYKEKQRTIQAKKEVEQRRAGGYSRKYASKAKNLADDMVRNTARDLLYYAVTQDAMLIFENLSRGFGRQGKRTFMAERQYTRMEDWLTAKLAYEGLPSKTYLSKTLAQYTSKTCSNCGFTITSADYDRVLEKLKKTATGWMTTINGKELKVEGQITYYNRYKRQNVVKDLSVELDRLSEESVNNDISSWTKGRSGEALSLLKKRFSHRPVQEKFVCLNCGFETHADEQAALNIARSWLFLRSQEYKKYQTNKTTGNTDKRAFVETWQSFYRKKLKEVWKPAV

SEQ ID NO: 41338 - protein, 979 aa, synthetic construct
  REGION 1..979: note = engineered CasX variant
QEIGRINKIRRRLVKDSNTKKAGKTGPMKTLLVRVMTPDLRERLENLRKKPENIPQPISNTSRANLNKLLTDYTEMKKAILHVYWEEFQKDPVGLMSRVAQPASKKIDQNKLKPEMDEKGNLTTAGFACSQCGQPLFVYKLEQVSEKGKAYTNYFGRCNVAEHEKLILLAQLKPEKDSDEAVTYSLGKFGQRALDFYSIHVTKESTHPVKPLAQIAGNRYASYPVGKALSDACMGTIASFLSKYQDIIIEHQKVVKGNQKRLESLRELAGKENLEYPSVTLPPQPHTKEGVDAYNEVIARVRMWVNLNLWQKLKLSRDDAKPLLRLKGFPSFPLVERQANEVDWWDMVCNVKKLINEKKEDGKVFWQNLAGYKRQEALRPYLSSEEDRKKGKKFARYQLGDLLLHLEKKHGERDWGKVYDEAWERIDKKVEGLSKHIKLEEERRSEDAQSKAALTDWLRAKASFVIEGLKEADKDEFCRCELKLQKWYGDLRGKPFAIEAENSILDISGFSKQYNCAFIWQKDGVKKLNLYLIINYFKGGKLRFKKIKPEAFEANRFYTVINKKSGEIVPMEVNFNFDDPNLIILPLAFGKRQGREFIWNDLLSLETGSLKLANGRVIEKTLYNRRTRQDEPALFVALTFERREVLDSSNIKPMNLIGVDRGENIPAVIALTDPEGCPLSRFKDSLGNPTHILRIGESYKEKQRTIQAKKEVEQRRAGGYSRKYASKAKNLADDMVRNTARDLLYYAVTQDAMLIFENLSRGFGRQGKRTFMAERQYTRMEDWLTAKLAYEGLPSKTYLSKTLAQYTSKTCSNCGFTITSADYDRVLEKLKKTATGWMTTINGKELKVEGQITYYNRYKRQNVVKDLSVELDRLSEESVNNDISSWTKGRSGEALSLLKKRFSHRPVQEKFVCLNCGFETHADEQAALNIARSWLFLRSQEYKKYQTNKTTGNTDKRAFVETWQSFYRKKLKEVWKPAV

SEQ ID NO: 41339 - protein, 979 aa, synthetic construct
  REGION 1..979: note = engineered CasX variant
QEIGRINKIRRRLVKDSNTKKAGKTGPMKTLLVRVMTPDLRERLENLRKKPENIPQPISNTSRANLNKLLTDYTEMKKAILHVYWEEFQKDPVGLMSRVAQPASKKIDQNKLKPEMDEKGNLTTAGFACSQCGQPLFVYKLEQVSEKGKAYTNYFGRCNVAEHEKLILLAQLKPEKDSDEAVTYSLGKFGQRALDFYSIHVTKESTHPVKPLAQIAGNRYASHPVGKALSDACMGTIASFLSKYQDIIIEHQKVVKGNQKRLESLRELAGKENLEYPSVTLPPQPHTKEGVDAYNEVIARVRMWVNLNLWQKLKLSRDDAKPLLRLKGFPSFPLVERQANEVDWWDMVCNVKKLINEKKEDGKVFWQNLAGYKRQEALRPYLSSEEDRKKGKKFARYQLGDLLLHLEKKHGERDWGKVYDEAWERIDKKVEGLSKHIKLEEERRSEDAQSKAALTDWLRAKASFVIEGLKEADKDEFCRCELKLQKWYGDLRGKPFAIEAENSILDISGFSKQYNCAFIWQKDGVKKLNLYLIINYFKGGKLRFKKIKPEAFEANRFYTVINKKSGEIVPMEVNFNFDDPNLIILPLAFGKRQGREFIWNDLLSLETGSLKLANGRVIEKTLYNRRTRQDEPALFVALTFERREVLDSSNIKPMNLIGVDRGENIPAVIALTDPEGCPLSRFKDSLGNPTHILRIGESYKEKQRTIQAKKEVEQRRAGGYSRKYASKAKNLADDMVRNTARDLLYYAVTQDAMLIFENLSRGFGRQGKRTFMAERQYTRMEDWLTAKLAYEGLPSKTYLSKTLAQYTSKTCSNCGFTITSADYDRVLEKLKKTATGWMTTINGKELKVEGQITYYNRYKRQNVVKDLSVELDRLSEESVNNDISSWTKGRSGEALSLLKKRFSHRPVQEKFVCLNCGFETHADEQAALNIARSWLFLRSQEYKKYQTNKTTGNTDKRAFVETWQSFYRKKLKEVWKPAV

SEQ ID NO: 41340 - protein, 979 aa, synthetic construct
  REGION 1..979: note = engineered CasX variant
QEIGRINKIRRRLVKDSNTKKAGKTGPMKTLLVRVMTPDLRERLENLRKKPENIPQPISNTSRANLNKLLTDYTEMKKAILHVYWEEFQKDPVGLMSRVAQPASKKIDQNKLKPEMDEKGNLTTAGFACSQCGQPLFVYKLEQVSEKGKAYTNYFGRCNVAEHEKLILLAQLKPEKDSDEAVTYSLGKFGQRALDFYSIHVTKESTHPVKPLAQIAGNRYASSPVGKALSDACMGTIASFLSKYQDIIIEHQKVVKGNQKRLESLRELAGKENLEYPSVTLPPQPHTKEGVDAYNEVIARVRMWVNLNLWQKLKLSRDDAKPLLRLKGFPSFPLVERQANEVDWWDMVCNVKKLINEKKEDGKVFWQNLAGYKRQEALRPYLSSEEDRKKGKKFARYQLGDLLLHLEKKHGERDWGKVYDEAWERIDKKVEGLSKHIKLEEERRSEDAQSKAALTDWLRAKASFVIEGLKEADKDEFCRCELKLQKWYGDLRGKPFAIEAENSILDISGFSKQYNCAFIWQKDGVKKLNLYLIINYFKGGKLRFKKIKPEAFEANRFYTVINKKSGEIVPMEVNFNFDDPNLIILPLAFGKRQGREFIWNDLLSLETGSLKLANGRVIEKTLYNRRTRQDEPALFVALTFERREVLDSSNIKPMNLIGVDRGENIPAVIALTDPEGCPLSRFKDSLGNPTHILRIGESYKEKQRTIQAKKEVEQRRAGGYSRKYASKAKNLADDMVRNTARDLLYYAVTQDAMLIFENLSRGFGRQGKRTFMAERQYTRMEDWLTAKLAYEGLPSKTYLSKTLAQYTSKTCSNCGFTITSADYDRVLEKLKKTATGWMTTINGKELKVEGQITYYNRYKRQNVVKDLSVELDRLSEESVNNDISSWTKGRSGEALSLLKKRFSHRPVQEKFVCLNCGFETHADEQAALNIARSWLFLRSQEYKKYQTNKTTGNTDKRAFVETWQSFYRKKLKEVWKPAV

SEQ ID NO: 41341 - protein, 979 aa, synthetic construct
  REGION 1..979: note = engineered CasX variant
QEIGRINKIRRRLVKDSNTKKAGKTGPMKTLLVRVMTPDLRERLENLRKKPENIPQPISNTSRANLNKLLTDYTEMKKAILHVYWEEFQKDPVGLMSRVAQPASKKIDQNKLKPEMDEKGNLTTAGFACSQCGQPLFVYKLEQVSEKGKAYTNYFGRCNVAEHEKLILLAQLKPEKDSDEAVTYSLGKFGQRALDFYSIHVTKESTHPVKPLAQIAGNRYASTPVGKALSDACMGTIASFLSKYQDIIIEHQKVVKGNQKRLESLRELAGKENLEYPSVTLPPQPHTKEGVDAYNEVIARVRMWVNLNLWQKLKLSRDDAKPLLRLKGFPSFPLVERQANEVDWWDMVCNVKKLINEKKEDGKVFWQNLAGYKRQEALRPYLSSEEDRKKGKKFARYQLGDLLLHLEKKHGERDWGKVYDEAWERIDKKVEGLSKHIKLEEERRSEDAQSKAALTDWLRAKASFVIEGLKEADKDEFCRCELKLQKWYGDLRGKPFAIEAENSILDISGFSKQYNCAFIWQKDGVKKLNLYLIINYFKGGKLRFKKIKPEAFEANRFYTVINKKSGEIVPMEVNFNFDDPNLIILPLAFGKRQGREFIWNDLLSLETGSLKLANGRVIEKTLYNRRTRQDEPALFVALTFERREVLDSSNIKPMNLIGVDRGENIPAVIALTDPEGCPLSRFKDSLGNPTHILRIGESYKEKQRTIQAKKEVEQRRAGGYSRKYASKAKNLADDMVRNTARDLLYYAVTQDAMLIFENLSRGFGRQGKRTFMAERQYTRMEDWLTAKLAYEGLPSKTYLSKTLAQYTSKTCSNCGFTITSADYDRVLEKLKKTATGWMTTINGKELKVEGQITYYNRYKRQNVVKDLSVELDRLSEESVNNDISSWTKGRSGEALSLLKKRFSHRPVQEKFVCLNCGFETHADEQAALNIARSWLFLRSQEYKKYQTNKTTGNTDKRAFVETWQSFYRKKLKEVWKPAV

SEQ ID NO: 41342 - protein, 979 aa, synthetic construct
  REGION 1..979: note = engineered CasX variant
QEIGRINKIRRRLVKDSNTKKAGKTGPMKTLLVRVMTPDLRERLENLRKKPENIPQPISNTSRANLNKLLTDYTEMKKAILHVYWEEFQKDPVGLMSRVAQPASKKIDQNKLKPEMDEKGNLTTAGFACSQCGQPLFVYKLEQVSEKGKAYTNYFGRCNVAEHEKLILLAQLKPEKDSDEAVTYSLGKFGQRALDFYSIHVTKESTHPVKPLAQIAGNRYASAPVGKALSDACMGTIASFLSKYQDIIIEHQKVVKGNQKRLESLRELAGKENLEYPSVTLPPQPHTKEGVDAYNEVIARVRMWVNLNLWQKLKLSRDDAKPLLRLKGFPSFPLVERQANEVDWWDMVCNVKKLINEKKEDGKVFWQNLAGYKRQEALRPYLSSEEDRKKGKKFARYQLGDLLLHLEKKHGERDWGKVYDEAWERIDKKVEGLSKHIKLEEERRSEDAQSKAALTDWLRAKASFVIEGLKEADKDEFCRCELKLQKWYGDLRGKPFAIEAENSILDISGFSKQYNCAFIWQKDGVKKLNLYLIINYFKGGKLRFKKIKPEAFEANRFYTVINKKSGEIVPMEVNFNFDDPNLIILPLAFGKRQGREFIWNDLLSLETGSLKLANGRVIEKTLYNRRTRQDEPALFVALTFERREVLDSSNIKPMNLIGVDRGENIPAVIALTDPEGCPLSRFKDSLGNPTHILRIGESYKEKQRTIQAKKEVEQRRAGGYSRKYASKAKNLADDMVRNTARDLLYYAVTQDAMLIFENLSRGFGRQGKRTFMAERQYTRMEDWLTAKLAYEGLPSKTYLSKTLAQYTSKTCSNCGFTITSADYDRVLEKLKKTATGWMTTINGKELKVEGQITYYNRYKRQNVVKDLSVELDRLSEESVNNDISSWTKGRSGEALSLLKKRFSHRPVQEKFVCLNCGFETHADEQAALNIARSWLFLRSQEYKKYQTNKTTGNTDKRAFVETWQSFYRKKLKEVWKPAV

SEQ ID NO: 41343 - protein, 979 aa, synthetic construct
  REGION 1..979: note = engineered CasX variant
QEIGRINKIRRRLVKDSNTKKAGKTGPMKTLLVRVMTPDLRERLENLRKKPENIPQPISNTSRANLNKLLTDYTEMKKAILHVYWEEFQKDPVGLMSRVAQPASKKIDQNKLKPEMDEKGNLTTAGFACSQCGQPLFVYKLEQVSEKGKAYTNYFGRCNVAEHEKLILLAQLKPEKDSDEAVTYSLGKFGQRALDFYSIHVTKESTHPVKPLAQIAGNRYASVPVGKALSDACMGTIASFLSKYQDIIIEHQKVVKGNQKRLESLRELAGKENLEYPSVTLPPQPHTKEGVDAYNEVIARVRMWVNLNLWQKLKLSRDDAKPLLRLKGFPSFPLVERQANEVDWWDMVCNVKKLINEKKEDGKVFWQNLAGYKRQEALRPYLSSEEDRKKGKKFARYQLGDLLLHLEKKHGERDWGKVYDEAWERIDKKVEGLSKHIKLEEERRSEDAQSKAALTDWLRAKASFVIEGLKEADKDEFCRCELKLQKWYGDLRGKPFAIEAENSILDISGFSKQYNCAFIWQKDGVKKLNLYLIINYFKGGKLRFKKIKPEAFEANRFYTVINKKSGEIVPMEVNFNFDDPNLIILPLAFGKRQGREFIWNDLLSLETGSLKLANGRVIEKTLYNRRTRQDEPALFVALTFERREVLDSSNIKPMNLIGVDRGENIPAVIALTDPEGCPLSRFKDSLGNPTHILRIGESYKEKQRTIQAKKEVEQRRAGGYSRKYASKAKNLADDMVRNTARDLLYYAVTQDAMLIFENLSRGFGRQGKRTFMAERQYTRMEDWLTAKLAYEGLPSKTYLSKTLAQYTSKTCSNCGFTITSADYDRVLEKLKKTATGWMTTINGKELKVEGQITYYNRYKRQNVVKDLSVELDRLSEESVNNDISSWTKGRSGEALSLLKKRFSHRPVQEKFVCLNCGFETHADEQAALNIARSWLFLRSQEYKKYQTNKTTGNTDKRAFVETWQSFYRKKLKEVWKPAV

SEQ ID NO: 41344 - protein, 979 aa, synthetic construct
  REGION 1..979: note = engineered CasX variant
QEIGRINKIRRRLVKDSNTKKAGKTGPMKTLLVRVMTPDLRERLENLRKKPENIPQPISNTSRANLNKLLTDYTEMKKAILHVYWEEFQKDPVGLMSRVAQPASKKIDQNKLKPEMDEKGNLTTAGFACSQCGQPLFVYKLEQVSEKGKAYTNYFGRCNVAEHEKLIKLAQLKPEKDSDEAVTYSLGKFGQRALDFYSIHVTKESTHPVKPLAQIAGNRYASGPVGKALSDACMGTIASFLSKYQDIIIEHQKVVKGNQKRLESLRELAGKENLEYPSVTLPPQPHTKEGVDAYNEVIARVRMWVNLNLWQKLKLSRDDAKPLLRLKGFPSFPLVERQANEVDWWDMVCNVKKLINEKKEDGKVFWQNLAGYKRQEALRPYLSSEEDRKKGKKFARYQLGDLLLHLEKKHGERDWGKVYDEAWERIDKKVEGLSKHIKLEEERRSEDAQSKAALTDWLRAKASFVIEGLKEADKDEFCRCELKLQKWYGDLRGKPFAIEAENSILDISGFSKQYNCAFIWQKDGVKKLNLYLIINYFKGGKLRFKKIKPEAFEANRFYTVINKKSGEIVPMEVNFNFDDPNLIILPLAFGKRQGREFIWNDLLSLETGSLKLANGRVIEKTLYNRRTRQDEPALFVALTFERREVLDSSNIKPMNLIGVDRGENIPAVIALTDPEGCPLSRFKDSLGNPTHILRIGESYKEKQRTIQAKKEVEQRRAGGYSRKYASKAKNLADDMVRNTARDLLYYAVTQDAMLIFENLSRGFGRQGKRTFMAERQYTRMEDWLTAKLAYEGLPSKTYLSKTLAQYTSKTCSNCGFTITSADYDRVLEKLKKTATGWMTTINGKELKVEGQITYYNRYKRQNVVKDLSVELDRLSEESVNNDISSWTKGRSGEALSLLKKRFSHRPVQEKFVCLNCGFETHADEQAALNIARSWLFLRSQEYKKYQTNKTTGNTDKRAFVETWQSFYRKKLKEVWKPAV

SEQ ID NO: 41345 - protein, 978 aa, synthetic construct
  REGION 1..978: note = engineered CasX variant
QEIGRINKIRRRLVKDSNTKKAGKTGPMKTLLVRVMTPDLRERLENLRKKPENIPQPISNTSRANLNKLLTDYTEMKKAILHVYWEEFQKDPVGLMSRVAQPASKKIDQNKLKPEMDEKGNLTTAGFACSQCGQPLFVYKLEQVSEKGKAYTNYFGRCNVAEHEKLILLAQLKPEKDSDEAVTYSLGKFGQRALDFYSIHVTKESTHPVKPLAQIAGNRYASPVGKALSDACMGTIASFLSKYQDIIIEHQKVVKGNQKRLESLRELAGKENLEYPSVTLPPQPHTKEGVDAYNEVIARVRMWVNLNLWQKLKLSRDDAKPLLRLKGFPSFPLVERQANEVDWWDMVCNVKKLINEKKEDGKVFWQNLAGYKRQEALRPYLSSEEDRKKGKKFARYQLGDLLLHLEKKHGERDWGKVYDEAWERIDKKVEGLSKHIKLEEERRSEDAQSKAALTDWLRAKASFVIEGLKEADKDEFCRCELKLQKWYGDLRGKPFAIEAENSILDISGFSKQYNCAFIWQKDGVKKLNLYLIINYFKGGKLRFKKIKPEAFEANRFYTVINKKSGEIVPMEVNFNFDDPNLIILPLAFGKRQGREFIWNDLLSLETGSLKLANGRVIEKTLYNRRTRQDEPALFVALTFERREVLDSSNIKPMNLIGVDRGENIPAVIALTDPEGCPLSRFKDSLGNPTHILRIGESYKEKQRTIQAKKEVEQRRAGGYSRKYASKAKNLADDMVRNTARDLLYYAVTQDAMLIFENLSRGFGRQGKRTFMAERQYTRMEDWLTAKLAYEGLPSKTYLSKTLAQYTSKTCSNCGFTITSADYDRVLEKLKKTATGWMTTINGKELKVEGQITYYNRYKRQNVVKDLSVELDRLSEESVNNDISSWTKGRSGEALSLLKKRFSHRPVQEKFVCLNCGFETHADEQAALNIARSWLFLRSQEYKKYQTNKTTGNTDKRAFVETWQSFYRKKLKEVWKPAV

SEQ ID NO: 41346 - protein, 979 aa, synthetic construct
  REGION 1..979: note = engineered CasX variant
QEIGRINKIRRRLVKDSNTKKAGKTGPMKTLLVRVMTPDLRERLENLRKKPENIPQPISNTSRANLNKLLTDYTEMKKAILHVYWEEFQKDPVGLMSRVAQPASKKIDQNKLKPEMDEKGNLTTAGFACSQCGQPLFVYKLEQVSEKGKAYTNYFGRCNVAEHEKLILLAQLKPEKDSDEAVTYSLGKFGQRALDFYSIHVTKESTHPVKPLAQIAGNRYASYPVGKALSDACMGTIASFLSKYQDIIIEHQKVVKGNQKRLESLRELAGKENLEYPSVTLPPQPHTKEGVDAYNEVIARVRMWVNLNLWQKLKLSRDDAKPLLRLKGFPSFPLVERQANEVDWWDMVCNVKKLINEKKEDGKVFWQNLAGYKRQEALRPYLSSEEDRKKGKKFARYQLGDLLLHLEKKHGEYDWGKVYDEAWERIDKKVEGLSKHIKLEEERRSEDAQSKAALTDWLRAKASFVIEGLKEADKDEFCRCELKLQKWYGDLRGKPFAIEAENSILDISGFSKQYNCAFIWQKDGVKKLNLYLIINYFKGGKLRFKKIKPEAFEANRFYTVINKKSGEIVPMEVNFNFDDPNLIILPLAFGKRQGREFIWNDLLSLETGSLKLANGRVIEKTLYNRRTRQDEPALFVALTFERREVLDSSNIKPMNLIGVDRGENIPAVIALTDPEGCPLSRFKDSLGNPTHILRIGESYKEKQRTIQAKKEVEQRRAGGYSRKYASKAKNLADDMVRNTARDLLYYAVTQDAMLIFENLSRGFGRQGKRTFMAERQYTRMEDWLTAKLAYEGLPSKTYLSKTLAQYTSKTCSNCGFTITSADYDRVLEKLKKTATGWMTTINGKELKVEGQITYYNRYKRQNVVKDLSVELDRLSEESVNNDISSWTKGRSGEALSLLKKRFSHRPVQEKFVCLNCGFETHADEQAALNIARSWLFLRSQEYKKYQTNKTTGNTDKRAFVETWQSFYRKKLKEVWKPAV

SEQ ID NO: 41347 - protein, 979 aa, synthetic construct
  REGION 1..979: note = engineered CasX variant
QEIGRINKIRRRLVKDSNTKKAGKTGPMKTLLVRVMTPDLRERLENLRKKPENIPQPISNTSRANLNKLLTDYTEMKKAILHVYWEEFQKDPVGLMSRVAQPASKKIDQNKLKPEMDEKGNLTTAGFACSQCGQPLFVYKLEQVSEKGKAYTNYFGRCNVAEHEKLILLAQLKPEKDSDEAVTYSLGKFGQRALDFYSIHVTKESTHPVKPLAQIAGNRYASHPVGKALSDACMGTIASFLSKYQDIIIEHQKVVKGNQKRLESLRELAGKENLEYPSVTLPPQPHTKEGVDAYNEVIARVRMWVNLNLWQKLKLSRDDAKPLLRLKGFPSFPLVERQANEVDWWDMVCNVKKLINEKKEDGKVFWQNLAGYKRQEALRPYLSSEEDRKKGKKFARYQLGDLLLHLEKKHGEYDWGKVYDEAWERIDKKVEGLSKHIKLEEERRSEDAQSKAALTDWLRAKASFVIEGLKEADKDEFCRCELKLQKWYGDLRGKPFAIEAENSILDISGFSKQYNCAFIWQKDGVKKLNLYLIINYFKGGKLRFKKIKPEAFEANRFYTVINKKSGEIVPMEVNFNFDDPNLIILPLAFGKRQGREFIWNDLLSLETGSLKLANGRVIEKTLYNRRTRQDEPALFVALTFERREVLDSSNIKPMNLIGVDRGENIPAVIALTDPEGCPLSRFKDSLGNPTHILRIGESYKEKQRTIQAKKEVEQRRAGGYSRKYASKAKNLADDMVRNTARDLLYYAVTQDAMLIFENLSRGFGRQGKRTFMAERQYTRMEDWLTAKLAYEGLPSKTYLSKTLAQYTSKTCSNCGFTITSADYDRVLEKLKKTATGWMTTINGKELKVEGQITYYNRYKRQNVVKDLSVELDRLSEESVNNDISSWTKGRSGEALSLLKKRFSHRPVQEKFVCLNCGFETHADEQAALNIARSWLFLRSQEYKKYQTNKTTGNTDKRAFVETWQSFYRKKLKEVWKPAV

SEQ ID NO: 41348 - protein, 979 aa, synthetic construct
  REGION 1..979: note = engineered CasX variant
QEIGRINKIRRRLVKDSNTKKAGKTGPMKTLLVRVMTPDLRERLENLRKKPENIPQPISNTSRANLNKLLTDYTEMKKAILHVYWEEFQKDPVGLMSRVAQPASKKIDQNKLKPEMDEKGNLTTAGFACSQCGQPLFVYKLEQVSEKGKAYTNYFGRCNVAEHEKLILLAQLKPEKDSDEAVTYSLGKFGQRALDFYSIHVTKESTHPVKPLAQIAGNRYASSPVGKALSDACMGTIASFLSKYQDIIIEHQKVVKGNQKRLESLRELAGKENLEYPSVTLPPQPHTKEGVDAYNEVIARVRMWVNLNLWQKLKLSRDDAKPLLRLKGFPSFPLVERQANEVDWWDMVCNVKKLINEKKEDGKVFWQNLAGYKRQEALRPYLSSEEDRKKGKKFARYQLGDLLLHLEKKHGEYDWGKVYDEAWERIDKKVEGLSKHIKLEEERRSEDAQSKAALTDWLRAKASFVIEGLKEADKDEFCRCELKLQKWYGDLRGKPFAIEAENSILDISGFSKQYNCAFIWQKDGVKKLNLYLIINYFKGGKLRFKKIKPEAFEANRFYTVINKKSGEIVPMEVNFNFDDPNLIILPLAFGKRQGREFIWNDLLSLETGSLKLANGRVIEKTLYNRRTRQDEPALFVALTFERREVLDSSNIKPMNLIGVDRGENIPAVIALTDPEGCPLSRFKDSLGNPTHILRIGESYKEKQRTIQAKKEVEQRRAGGYSRKYASKAKNLADDMVRNTARDLLYYAVTQDAMLIFENLSRGFGRQGKRTFMAERQYTRMEDWLTAKLAYEGLPSKTYLSKTLAQYTSKTCSNCGFTITSADYDRVLEKLKKTATGWMTTINGKELKVEGQITYYNRYKRQNVVKDLSVELDRLSEESVNNDISSWTKGRSGEALSLLKKRFSHRPVQEKFVCLNCGFETHADEQAALNIARSWLFLRSQEYKKYQTNKTTGNTDKRAFVETWQSFYRKKLKEVWKPAV

SEQ ID NO: 41349 - protein, 979 aa, synthetic construct
  REGION 1..979: note = engineered CasX variant
QEIGRINKIRRRLVKDSNTKKAGKTGPMKTLLVRVMTPDLRERLENLRKKPENIPQPISNTSRANLNKLLTDYTEMKKAILHVYWEEFQKDPVGLMSRVAQPASKKIDQNKLKPEMDEKGNLTTAGFACSQCGQPLFVYKLEQVSEKGKAYTNYFGRCNVAEHEKLILLAQLKPEKDSDEAVTYSLGKFGQRALDFYSIHVTKESTHPVKPLAQIAGNRYASTPVGKALSDACMGTIASFLSKYQDIIIEHQKVVKGNQKRLESLRELAGKENLEYPSVTLPPQPHTKEGVDAYNEVIARVRMWVNLNLWQKLKLSRDDAKPLLRLKGFPSFPLVERQANEVDWWDMVCNVKKLINEKKEDGKVFWQNLAGYKRQEALRPYLSSEEDRKKGKKFARYQLGDLLLHLEKKHGEYDWGKVYDEAWERIDKKVEGLSKHIKLEEERRSEDAQSKAALTDWLRAKASFVIEGLKEADKDEFCRCELKLQKWYGDLRGKPFAIEAENSILDISGFSKQYNCAFIWQKDGVKKLNLYLIINYFKGGKLRFKKIKPEAFEANRFYTVINKKSGEIVPMEVNFNFDDPNLIILPLAFGKRQGREFIWNDLLSLETGSLKLANGRVIEKTLYNRRTRQDEPALFVALTFERREVLDSSNIKPMNLIGVDRGENIPAVIALTDPEGCPLSRFKDSLGNPTHILRIGESYKEKQRTIQAKKEVEQRRAGGYSRKYASKAKNLADDMVRNTARDLLYYAVTQDAMLIFENLSRGFGRQGKRTFMAERQYTRMEDWLTAKLAYEGLPSKTYLSKTLAQYTSKTCSNCGFTITSADYDRVLEKLKKTATGWMTTINGKELKVEGQITYYNRYKRQNVVKDLSVELDRLSEESVNNDISSWTKGRSGEALSLLKKRFSHRPVQEKFVCLNCGFETHADEQAALNIARSWLFLRSQEYKKYQTNKTTGNTDKRAFVETWQSFYRKKLKEVWKPAV

SEQ ID NO: 41350 - protein, 979 aa, synthetic construct
  REGION 1..979: note = engineered CasX variant
QEIGRINKIRRRLVKDSNTKKAGKTGPMKTLLVRVMTPDLRERLENLRKKPENIPQPISNTSRANLNKLLTDYTEMKKAILHVYWEEFQKDPVGLMSRVAQPASKKIDQNKLKPEMDEKGNLTTAGFACSQCGQPLFVYKLEQVSEKGKAYTNYFGRCNVAEHEKLILLAQLKPEKDSDEAVTYSLGKFGQRALDFYSIHVTKESTHPVKPLAQIAGNRYASAPVGKALSDACMGTIASFLSKYQDIIIEHQKVVKGNQKRLESLRELAGKENLEYPSVTLPPQPHTKEGVDAYNEVIARVRMWVNLNLWQKLKLSRDDAKPLLRLKGFPSFPLVERQANEVDWWDMVCNVKKLINEKKEDGKVFWQNLAGYKRQEALRPYLSSEEDRKKGKKFARYQLGDLLLHLEKKHGEYDWGKVYDEAWERIDKKVEGLSKHIKLEEERRSEDAQSKAALTDWLRAKASFVIEGLKEADKDEFCRCELKLQKWYGDLRGKPFAIEAENSILDISGFSKQYNCAFIWQKDGVKKLNLYLIINYFKGGKLRFKKIKPEAFEANRFYTVINKKSGEIVPMEVNFNFDDPNLIILPLAFGKRQGREFIWNDLLSLETGSLKLANGRVIEKTLYNRRTRQDEPALFVALTFERREVLDSSNIKPMNLIGVDRGENIPAVIALTDPEGCPLSRFKDSLGNPTHILRIGESYKEKQRTIQAKKEVEQRRAGGYSRKYASKAKNLADDMVRNTARDLLYYAVTQDAMLIFENLSRGFGRQGKRTFMAERQYTRMEDWLTAKLAYEGLPSKTYLSKTLAQYTSKTCSNCGFTITSADYDRVLEKLKKTATGWMTTINGKELKVEGQITYYNRYKRQNVVKDLSVELDRLSEESVNNDISSWTKGRSGEALSLLKKRFSHRPVQEKFVCLNCGFETHADEQAALNIARSWLFLRSQEYKKYQTNKTTGNTDKRAFVETWQSFYRKKLKEVWKPAV

SEQ ID NO: 41351 - protein, 979 aa, synthetic construct
  REGION 1..979: note = engineered CasX variant
QEIGRINKIRRRLVKDSNTKKAGKTGPMKTLLVRVMTPDLRERLENLRKKPENIPQPISNTSRANLNKLLTDYTEMKKAILHVYWEEFQKDPVGLMSRVAQPASKKIDQNKLKPEMDEKGNLTTAGFACSQCGQPLFVYKLEQVSEKGKAYTNYFGRCNVAEHEKLILLAQLKPEKDSDEAVTYSLGKFGQRALDFYSIHVTKESTHPVKPLAQIAGNRYASVPVGKALSDACMGTIASFLSKYQDIIIEHQKVVKGNQKRLESLRELAGKENLEYPSVTLPPQPHTKEGVDAYNEVIARVRMWVNLNLWQKLKLSRDDAKPLLRLKGFPSFPLVERQANEVDWWDMVCNVKKLINEKKEDGKVFWQNLAGYKRQEALRPYLSSEEDRKKGKKFARYQLGDLLLHLEKKHGEYDWGKVYDEAWERIDKKVEGLSKHIKLEEERRSEDAQSKAALTDWLRAKASFVIEGLKEADKDEFCRCELKLQKWYGDLRGKPFAIEAENSILDISGFSKQYNCAFIWQKDGVKKLNLYLIINYFKGGKLRFKKIKPEAFEANRFYTVINKKSGEIVPMEVNFNFDDPNLIILPLAFGKRQGREFIWNDLLSLETGSLKLANGRVIEKTLYNRRTRQDEPALFVALTFERREVLDSSNIKPMNLIGVDRGENIPAVIALTDPEGCPLSRFKDSLGNPTHILRIGESYKEKQRTIQAKKEVEQRRAGGYSRKYASKAKNLADDMVRNTARDLLYYAVTQDAMLIFENLSRGFGRQGKRTFMAERQYTRMEDWLTAKLAYEGLPSKTYLSKTLAQYTSKTCSNCGFTITSADYDRVLEKLKKTATGWMTTINGKELKVEGQITYYNRYKRQNVVKDLSVELDRLSEESVNNDISSWTKGRSGEALSLLKKRFSHRPVQEKFVCLNCGFETHADEQAALNIARSWLFLRSQEYKKYQTNKTTGNTDKRAFVETWQSFYRKKLKEVWKPAV

SEQ ID NO: 41352 - protein, 979 aa, synthetic construct
  REGION 1..979: note = engineered CasX variant
QEIGRINKIRRRLVKDSNTKKAGKTGPMKTLLVRVMTPDLRERLENLRKKPENIPQPISNTSRANLNKLLTDYTEMKKAILHVYWEEFQKDPVGLMSRVAQPASKKIDQNKLKPEMDEKGNLTTAGFACSQCGQPLFVYKLEQVSEKGKAYTNYFGRCNVAEHEKLIKLAQLKPEKDSDEAVTYSLGKFGQRALDFYSIHVTKESTHPVKPLAQIAGNRYASGPVGKALSDACMGTIASFLSKYQDIIIEHQKVVKGNQKRLESLRELAGKENLEYPSVTLPPQPHTKEGVDAYNEVIARVRMWVNLNLWQKLKLSRDDAKPLLRLKGFPSFPLVERQANEVDWWDMVCNVKKLINEKKEDGKVFWQNLAGYKRQEALRPYLSSEEDRKKGKKFARYQLGDLLLHLEKKHGEYDWGKVYDEAWERIDKKVEGLSKHIKLEEERRSEDAQSKAALTDWLRAKASFVIEGLKEADKDEFCRCELKLQKWYGDLRGKPFAIEAENSILDISGFSKQYNCAFIWQKDGVKKLNLYLIINYFKGGKLRFKKIKPEAFEANRFYTVINKKSGEIVPMEVNFNFDDPNLIILPLAFGKRQGREFIWNDLLSLETGSLKLANGRVIEKTLYNRRTRQDEPALFVALTFERREVLDSSNIKPMNLIGVDRGENIPAVIALTDPEGCPLSRFKDSLGNPTHILRIGESYKEKQRTIQAKKEVEQRRAGGYSRKYASKAKNLADDMVRNTARDLLYYAVTQDAMLIFENLSRGFGRQGKRTFMAERQYTRMEDWLTAKLAYEGLPSKTYLSKTLAQYTSKTCSNCGFTITSADYDRVLEKLKKTATGWMTTINGKELKVEGQITYYNRYKRQNVVKDLSVELDRLSEESVNNDISSWTKGRSGEALSLLKKRFSHRPVQEKFVCLNCGFETHADEQAALNIARSWLFLRSQEYKKYQTNKTTGNTDKRAFVETWQSFYRKKLKEVWKPAV

SEQ ID NO: 41353 - protein, 978 aa, synthetic construct
  REGION 1..978: note = engineered CasX variant
QEIGRINKIRRRLVKDSNTKKAGKTGPMKTLLVRVMTPDLRERLENLRKKPENIPQPISNTSRANLNKLLTDYTEMKKAILHVYWEEFQKDPVGLMSRVAQPASKKIDQNKLKPEMDEKGNLTTAGFACSQCGQPLFVYKLEQVSEKGKAYTNYFGRCNVAEHEKLILLAQLKPEKDSDEAVTYSLGKFGQRALDFYSIHVTKESTHPVKPLAQIAGNRYASPVGKALSDACMGTIASFLSKYQDIIIEHQKVVKGNQKRLESLRELAGKENLEYPSVTLPPQPHTKEGVDAYNEVIARVRMWVNLNLWQKLKLSRDDAKPLLRLKGFPSFPLVERQANEVDWWDMVCNVKKLINEKKEDGKVFWQNLAGYKRQEALRPYLSSEEDRKKGKKFARYQLGDLLLHLEKKHGEYDWGKVYDEAWERIDKKVEGLSKHIKLEEERRSEDAQSKAALTDWLRAKASFVIEGLKEADKDEFCRCELKLQKWYGDLRGKPFAIEAENSILDISGFSKQYNCAFIWQKDGVKKLNLYLIINYFKGGKLRFKKIKPEAFEANRFYTVINKKSGEIVPMEVNFNFDDPNLIILPLAFGKRQGREFIWNDLLSLETGSLKLANGRVIEKTLYNRRTRQDEPALFVALTFERREVLDSSNIKPMNLIGVDRGENIPAVIALTDPEGCPLSRFKDSLGNPTHILRIGESYKEKQRTIQAKKEVEQRRAGGYSRKYASKAKNLADDMVRNTARDLLYYAVTQDAMLIFENLSRGFGRQGKRTFMAERQYTRMEDWLTAKLAYEGLPSKTYLSKTLAQYTSKTCSNCGFTITSADYDRVLEKLKKTATGWMTTINGKELKVEGQITYYNRYKRQNVVKDLSVELDRLSEESVNNDISSWTKGRSGEALSLLKKRFSHRPVQEKFVCLNCGFETHADEQAALNIARSWLFLRSQEYKKYQTNKTTGNTDKRAFVETWQSFYRKKLKEVWKPAV

SEQ ID NO: 41354 - protein, 978 aa, synthetic construct
  REGION 1..978: note = engineered CasX variant
QEIGRINKIRRRLVKDSNTKKAGKTGPMKTLLVRVMTPDLRERLENLRKKPENIPQPISNTSRANLNKLLTDYTEMKKAILHVYWEEFQKDPVGLMSRVAQPASKKIDQNKLKPEMDEKGNLTTAGFACSQCGQPLFVYKLEQVSEKGKAYTNYFGRCNVAEHEKLILLAQLKPEKDSDEAVTYSLGKFGQRALDFYSIHVTKESTHPVKPLAQIAGNRYASYPVGKALSDACMGTIASFLSKYQDIIIEHQKVVKGNQKRLESLRELAGKENLEYPSVTLPPQPHTKEGVDAYNEVIARVRMWVNLNLWQKLKLSRDDAKPLLRLKGFPSFPLVERQANEVDWWDMVCNVKKLINEKKEDGKVFWQNLAGYKRQEALRPYLSSEEDRKKGKKFARYQLGDLLLHLEKKHGEDWGDVYDEAWERIDKKVEGLSKHIKLEEERRSEDAQSKAALTDWLRAKASFVIEGLKEADKDEFCRCELKLQKWYGDLRGKPFAIEAENSILDISGFSKQYNCAFIWQKDGVKKLNLYLIINYFKGGKLRFKKIKPEAFEANRFYTVINKKSGEIVPMEVNFNFDDPNLIILPLAFGKRQGREFIWNDLLSLETGSLKLANGRVIEKTLYNRRTRQDEPALFVALTFERREVLDSSNIKPMNLIGVDRGENIPAVIALTDPEGCPLSRFKDSLGNPTHILRIGESYKEKQRTIQAKKEVEQRRAGGYSRKYASKAKNLADDMVRNTARDLLYYAVTQDAMLIFENLSRGFGRQGKRTFMAERQYTRMEDWLTAKLAYEGLPSKTYLSKTLAQYTSKTCSNCGFTITSADYDRVLEKLKKTATGWMTTINGKELKVEGQITYYNRYKRQNVVKDLSVELDRLSEESVNNDISSWTKGRSGEALSLLKKRFSHRPVQEKFVCLNCGFETHADEQAALNIARSWLFLRSQEYKKYQTNKTTGNTDKRAFVETWQSFYRKKLKEVWKPAV

SEQ ID NO: 41355 - protein, 978 aa, synthetic construct
  REGION 1..978: note = engineered CasX variant
QEIGRINKIRRRLVKDSNTKKAGKTGPMKTLLVRVMTPDLRERLENLRKKPENIPQPISNTSRANLNKLLTDYTEMKKAILHVYWEEFQKDPVGLMSRVAQPASKKIDQNKLKPEMDEKGNLTTAGFACSQCGQPLFVYKLEQVSEKGKAYTNYFGRCNVAEHEKLILLAQLKPEKDSDEAVTYSLGKFGQRALDFYSIHVTKESTHPVKPLAQIAGNRYASHPVGKALSDACMGTIASFLSKYQDIIIEHQKVVKGNQKRLESLRELAGKENLEYPSVTLPPQPHTKEGVDAYNEVIARVRMWVNLNLWQKLKLSRDDAKPLLRLKGFPSFPLVERQANEVDWWDMVCNVKKLINEKKEDGKVFWQNLAGYKRQEALRPYLSSEEDRKKGKKFARYQLGDLLLHLEKKHGEDWGDVYDEAWERIDKKVEGLSKHIKLEEERRSEDAQSKAALTDWLRAKASFVIEGLKEADKDEFCRCELKLQKWYGDLRGKPFAIEAENSILDISGFSKQYNCAFIWQKDGVKKLNLYLIINYFKGGKLRFKKIKPEAFEANRFYTVINKKSGEIVPMEVNFNFDDPNLIILPLAFGKRQGREFIWNDLLSLETGSLKLANGRVIEKTLYNRRTRQDEPALFVALTFERREVLDSSNIKPMNLIGVDRGENIPAVIALTDPEGCPLSRFKDSLGNPTHILRIGESYKEKQRTIQAKKEVEQRRAGGYSRKYASKAKNLADDMVRNTARDLLYYAVTQDAMLIFENLSRGFGRQGKRTFMAERQYTRMEDWLTAKLAYEGLPSKTYLSKTLAQYTSKTCSNCGFTITSADYDRVLEKLKKTATGWMTTINGKELKVEGQITYYNRYKRQNVVKDLSVELDRLSEESVNNDISSWTKGRSGEALSLLKKRFSHRPVQEKFVCLNCGFETHADEQAALNIARSWLFLRSQEYKKYQTNKTTGNTDKRAFVETWQSFYRKKLKEVWKPAV

SEQ ID NO: 41356 - protein, 978 aa, synthetic construct
  REGION 1..978: note = engineered CasX variant
QEIGRINKIRRRLVKDSNTKKAGKTGPMKTLLVRVMTPDLRERLENLRKKPENIPQPISNTSRANLNKLLTDYTEMKKAILHVYWEEFQKDPVGLMSRVAQPASKKIDQNKLKPEMDEKGNLTTAGFACSQCGQPLFVYKLEQVSEKGKAYTNYFGRCNVAEHEKLILLAQLKPEKDSDEAVTYSLGKFGQRALDFYSIHVTKESTHPVKPLAQIAGNRYASSPVGKALSDACMGTIASFLSKYQDIIIEHQKVVKGNQKRLESLRELAGKENLEYPSVTLPPQPHTKEGVDAYNEVIARVRMWVNLNLWQKLKLSRDDAKPLLRLKGFPSFPLVERQANEVDWWDMVCNVKKLINEKKEDGKVFWQNLAGYKRQEALRPYLSSEEDRKKGKKFARYQLGDLLLHLEKKHGEDWGDVYDEAWERIDKKVEGLSKHIKLEEERRSEDAQSKAALTDWLRAKASFVIEGLKEADKDEFCRCELKLQKWYGDLRGKPFAIEAENSILDISGFSKQYNCAFIWQKDGVKKLNLYLIINYFKGGKLRFKKIKPEAFEANRFYTVINKKSGEIVPMEVNFNFDDPNLIILPLAFGKRQGREFIWNDLLSLETGSLKLANGRVIEKTLYNRRTRQDEPALFVALTFERREVLDSSNIKPMNLIGVDRGENIPAVIALTDPEGCPLSRFKDSLGNPTHILRIGESYKEKQRTIQAKKEVEQRRAGGYSRKYASKAKNLADDMVRNTARDLLYYAVTQDAMLIFENLSRGFGRQGKRTFMAERQYTRMEDWLTAKLAYEGLPSKTYLSKTLAQYTSKTCSNCGFTITSADYDRVLEKLKKTATGWMTTINGKELKVEGQITYYNRYKRQNVVKDLSVELDRLSEESVNNDISSWTKGRSGEALSLLKKRFSHRPVQEKFVCLNCGFETHADEQAALNIARSWLFLRSQEYKKYQTNKTTGNTDKRAFVETWQSFYRKKLKEVWKPAV

SEQ ID NO: 41357 - protein, 978 aa, synthetic construct
  REGION 1..978: note = engineered CasX variant
QEIGRINKIRRRLVKDSNTKKAGKTGPMKTLLVRVMTPDLRERLENLRKKPENIPQPISNTSRANLNKLLTDYTEMKKAILHVYWEEFQKDPVGLMSRVAQPASKKIDQNKLKPEMDEKGNLTTAGFACSQCGQPLFVYKLEQVSEKGKAYTNYFGRCNVAEHEKLILLAQLKPEKDSDEAVTYSLGKFGQRALDFYSIHVTKESTHPVKPLAQIAGNRYASTPVGKALSDACMGTIASFLSKYQDIIIEHQKVVKGNQKRLESLRELAGKENLEYPSVTLPPQPHTKEGVDAYNEVIARVRMWVNLNLWQKLKLSRDDAKPLLRLKGFPSFPLVERQANEVDWWDMVCNVKKLINEKKEDGKVFWQNLAGYKRQEALRPYLSSEEDRKKGKKFARYQLGDLLLHLEKKHGEDWGDVYDEAWERIDKKVEGLSKHIKLEEERRSEDAQSKAALTDWLRAKASFVIEGLKEADKDEFCRCELKLQKWYGDLRGKPFAIEAENSILDISGFSKQYNCAFIWQKDGVKKLNLYLIINYFKGGKLRFKKIKPEAFEANRFYTVINKKSGEIVPMEVNFNFDDPNLIILPLAFGKRQGREFIWNDLLSLETGSLKLANGRVIEKTLYNRRTRQDEPALFVALTFERREVLDSSNIKPMNLIGVDRGENIPAVIALTDPEGCPLSRFKDSLGNPTHILRIGESYKEKQRTIQAKKEVEQRRAGGYSRKYASKAKNLADDMVRNTARDLLYYAVTQDAMLIFENLSRGFGRQGKRTFMAERQYTRMEDWLTAKLAYEGLPSKTYLSKTLAQYTSKTCSNCGFTITSADYDRVLEKLKKTATGWMTTINGKELKVEGQITYYNRYKRQNVVKDLSVELDRLSEESVNNDISSWTKGRSGEALSLLKKRFSHRPVQEKFVCLNCGFETHADEQAALNIARSWLFLRSQEYKKYQTNKTTGNTDKRAFVETWQSFYRKKLKEVWKPAV

SEQ ID NO: 41358 - protein, 978 aa, synthetic construct
  REGION 1..978: note = engineered CasX variant
QEIGRINKIRRRLVKDSNTKKAGKTGPMKTLLVRVMTPDLRERLENLRKKPENIPQPISNTSRANLNKLLTDYTEMKKAILHVYWEEFQKDPVGLMSRVAQPASKKIDQNKLKPEMDEKGNLTTAGFACSQCGQPLFVYKLEQVSEKGKAYTNYFGRCNVAEHEKLILLAQLKPEKDSDEAVTYSLGKFGQRALDFYSIHVTKESTHPVKPLAQIAGNRYASAPVGKALSDACMGTIASFLSKYQDIIIEHQKVVKGNQKRLESLRELAGKENLEYPSVTLPPQPHTKEGVDAYNEVIARVRMWVNLNLWQKLKLSRDDAKPLLRLKGFPSFPLVERQANEVDWWDMVCNVKKLINEKKEDGKVFWQNLAGYKRQEALRPYLSSEEDRKKGKKFARYQLGDLLLHLEKKHGEDWGDVYDEAWERIDKKVEGLSKHIKLEEERRSEDAQSKAALTDWLRAKASFVIEGLKEADKDEFCRCELKLQKWYGDLRGKPFAIEAENSILDISGFSKQYNCAFIWQKDGVKKLNLYLIINYFKGGKLRFKKIKPEAFEANRFYTVINKKSGEIVPMEVNFNFDDPNLIILPLAFGKRQGREFIWNDLLSLETGSLKLANGRVIEKTLYNRRTRQDEPALFVALTFERREVLDSSNIKPMNLIGVDRGENIPAVIALTDPEGCPLSRFKDSLGNPTHILRIGESYKEKQRTIQAKKEVEQRRAGGYSRKYASKAKNLADDMVRNTARDLLYYAVTQDAMLIFENLSRGFGRQGKRTFMAERQYTRMEDWLTAKLAYEGLPSKTYLSKTLAQYTSKTCSNCGFTITSADYDRVLEKLKKTATGWMTTINGKELKVEGQITYYNRYKRQNVVKDLSVELDRLSEESVNNDISSWTKGRSGEALSLLKKRFSHRPVQEKFVCLNCGFETHADEQAALNIARSWLFLRSQEYKKYQTNKTTGNTDKRAFVETWQSFYRKKLKEVWKPAV

SEQ ID NO: 41359 - protein, 978 aa, synthetic construct
  REGION 1..978: note = engineered CasX variant
QEIGRINKIRRRLVKDSNTKKAGKTGPMKTLLVRVMTPDLRERLENLRKKPENIPQPISNTSRANLNKLLTDYTEMKKAILHVYWEEFQKDPVGLMSRVAQPASKKIDQNKLKPEMDEKGNLTTAGFACSQCGQPLFVYKLEQVSEKGKAYTNYFGRCNVAEHEKLILLAQLKPEKDSDEAVTYSLGKFGQRALDFYSIHVTKESTHPVKPLAQIAGNRYASVPVGKALSDACMGTIASFLSKYQDIIIEHQKVVKGNQKRLESLRELAGKENLEYPSVTLPPQPHTKEGVDAYNEVIARVRMWVNLNLWQKLKLSRDDAKPLLRLKGFPSFPLVERQANEVDWWDMVCNVKKLINEKKEDGKVFWQNLAGYKRQEALRPYLSSEEDRKKGKKFARYQLGDLLLHLEKKHGEDWGDVYDEAWERIDKKVEGLSKHIKLEEERRSEDAQSKAALTDWLRAKASFVIEGLKEADKDEFCRCELKLQKWYGDLRGKPFAIEAENSILDISGFSKQYNCAFIWQKDGVKKLNLYLIINYFKGGKLRFKKIKPEAFEANRFYTVINKKSGEIVPMEVNFNFDDPNLIILPLAFGKRQGREFIWNDLLSLETGSLKLANGRVIEKTLYNRRTRQDEPALFVALTFERREVLDSSNIKPMNLIGVDRGENIPAVIALTDPEGCPLSRFKDSLGNPTHILRIGESYKEKQRTIQAKKEVEQRRAGGYSRKYASKAKNLADDMVRNTARDLLYYAVTQDAMLIFENLSRGFGRQGKRTFMAERQYTRMEDWLTAKLAYEGLPSKTYLSKTLAQYTSKTCSNCGFTITSADYDRVLEKLKKTATGWMTTINGKELKVEGQITYYNRYKRQNVVKDLSVELDRLSEESVNNDISSWTKGRSGEALSLLKKRFSHRPVQEKFVCLNCGFETHADEQAALNIARSWLFLRSQEYKKYQTNKTTGNTDKRAFVETWQSFYRKKLKEVWKPAV

SEQ ID NO: 41360 - protein, 978 aa, synthetic construct
  REGION 1..978: note = engineered CasX variant
QEIGRINKIRRRLVKDSNTKKAGKTGPMKTLLVRVMTPDLRERLENLRKKPENIPQPISNTSRANLNKLLTDYTEMKKAILHVYWEEFQKDPVGLMSRVAQPASKKIDQNKLKPEMDEKGNLTTAGFACSQCGQPLFVYKLEQVSEKGKAYTNYFGRCNVAEHEKLIKLAQLKPEKDSDEAVTYSLGKFGQRALDFYSIHVTKESTHPVKPLAQIAGNRYASGPVGKALSDACMGTIASFLSKYQDIIIEHQKVVKGNQKRLESLRELAGKENLEYPSVTLPPQPHTKEGVDAYNEVIARVRMWVNLNLWQKLKLSRDDAKPLLRLKGFPSFPLVERQANEVDWWDMVCNVKKLINEKKEDGKVFWQNLAGYKRQEALRPYLSSEEDRKKGKKFARYQLGDLLLHLEKKHGEDWGDVYDEAWERIDKKVEGLSKHIKLEEERRSEDAQSKAALTDWLRAKASFVIEGLKEADKDEFCRCELKLQKWYGDLRGKPFAIEAENSILDISGFSKQYNCAFIWQKDGVKKLNLYLIINYFKGGKLRFKKIKPEAFEANRFYTVINKKSGEIVPMEVNFNFDDPNLIILPLAFGKRQGREFIWNDLLSLETGSLKLANGRVIEKTLYNRRTRQDEPALFVALTFERREVLDSSNIKPMNLIGVDRGENIPAVIALTDPEGCPLSRFKDSLGNPTHILRIGESYKEKQRTIQAKKEVEQRRAGGYSRKYASKAKNLADDMVRNTARDLLYYAVTQDAMLIFENLSRGFGRQGKRTFMAERQYTRMEDWLTAKLAYEGLPSKTYLSKTLAQYTSKTCSNCGFTITSADYDRVLEKLKKTATGWMTTINGKELKVEGQITYYNRYKRQNVVKDLSVELDRLSEESVNNDISSWTKGRSGEALSLLKKRFSHRPVQEKFVCLNCGFETHADEQAALNIARSWLFLRSQEYKKYQTNKTTGNTDKRAFVETWQSFYRKKLKEVWKPAV

SEQ ID NO: 41361 - protein, 977 aa, synthetic construct
  REGION 1..977: note = engineered CasX variant
QEIGRINKIRRRLVKDSNTKKAGKTGPMKTLLVRVMTPDLRERLENLRKKPENIPQPISNTSRANLNKLLTDYTEMKKAILHVYWEEFQKDPVGLMSRVAQPASKKIDQNKLKPEMDEKGNLTTAGFACSQCGQPLFVYKLEQVSEKGKAYTNYFGRCNVAEHEKLILLAQLKPEKDSDEAVTYSLGKFGQRALDFYSIHVTKESTHPVKPLAQIAGNRYASPVGKALSDACMGTIASFLSKYQDIIIEHQKVVKGNQKRLESLRELAGKENLEYPSVTLPPQPHTKEGVDAYNEVIARVRMWVNLNLWQKLKLSRDDAKPLLRLKGFPSFPLVERQANEVDWWDMVCNVKKLINEKKEDGKVFWQNLAGYKRQEALRPYLSSEEDRKKGKKFARYQLGDLLLHLEKKHGEDWGDVYDEAWERIDKKVEGLSKHIKLEEERRSEDAQSKAALTDWLRAKASFVIEGLKEADKDEFCRCELKLQKWYGDLRGKPFAIEAENSILDISGFSKQYNCAFIWQKDGVKKLNLYLIINYFKGGKLRFKKIKPEAFEANRFYTVINKKSGEIVPMEVNFNFDDPNLIILPLAFGKRQGREFIWNDLLSLETGSLKLANGRVIEKTLYNRRTRQDEPALFVALTFERREVLDSSNIKPMNLIGVDRGENIPAVIALTDPEGCPLSRFKDSLGNPTHILRIGESYKEKQRTIQAKKEVEQRRAGGYSRKYASKAKNLADDMVRNTARDLLYYAVTQDAMLIFENLSRGFGRQGKRTFMAERQYTRMEDWLTAKLAYEGLPSKTYLSKTLAQYTSKTCSNCGFTITSADYDRVLEKLKKTATGWMTTINGKELKVEGQITYYNRYKRQNVVKDLSVELDRLSEESVNNDISSWTKGRSGEALSLLKKRFSHRPVQEKFVCLNCGFETHADEQAALNIARSWLFLRSQEYKKYQTNKTTGNTDKRAFVETWQSFYRKKLKEVWKPAV

SEQ ID NO: 41362 - protein, 978 aa, synthetic construct
  REGION 1..978: note = engineered CasX variant
QEIGRINKIRRRLVKDSNTKKAGKTGPMKTLLVRVMTPDLRERLENLRKKPENIPQPISNTSRANLNKLLTDYTEMKKAILHVYWEEFQKDPVGLMSRVAQPASKKIDQNKLKPEMDEKGNLTTAGFACSQCGQPLFVYKLEQVSEKGKAYTNYFGRCNVAEHEKLILLAQLKPEKDSDEAVTYSLGKFGQRALDFYSIHVTKESTHPVKPLAQIAGNRYASYPVGKALSDACMGTIASFLSKYQDIIIEHQKVVKGNQKRLESLRELAGKENLEYPSVTLPPQPHTKEGVDAYNEVIARVRMWVNLNLWQKLKLSRDDAKPLLRLKGFPSFPLVERQANEVDWWDMVCNVKKLINEKKEDGKVFWQNLAGYKRQEALRPYLSSEEDRKKGKKFARYQLGDLLLHLEKKHGEDWGKVYGEAWERIDKKVEGLSKHIKLEEERRSEDAQSKAALTDWLRAKASFVIEGLKEADKDEFCRCELKLQKWYGDLRGKPFAIEAENSILDISGFSKQYNCAFIWQKDGVKKLNLYLIINYFKGGKLRFKKIKPEAFEANRFYTVINKKSGEIVPMEVNFNFDDPNLIILPLAFGKRQGREFIWNDLLSLETGSLKLANGRVIEKTLYNRRTRQDEPALFVALTFERREVLDSSNIKPMNLIGVDRGENIPAVIALTDPEGCPLSRFKDSLGNPTHILRIGESYKEKQRTIQAKKEVEQRRAGGYSRKYASKAKNLADDMVRNTARDLLYYAVTQDAMLIFENLSRGFGRQGKRTFMAERQYTRMEDWLTAKLAYEGLPSKTYLSKTLAQYTSKTCSNCGFTITSADYDRVLEKLKKTATGWMTTINGKELKVEGQITYYNRYKRQNVVKDLSVELDRLSEESVNNDISSWTKGRSGEALSLLKKRFSHRPVQEKFVCLNCGFETHADEQAALNIARSWLFLRSQEYKKYQTNKTTGNTDKRAFVETWQSFYRKKLKEVWKPAV

SEQ ID NO: 41363 - protein, 978 aa, synthetic construct
  REGION 1..978: note = engineered CasX variant
QEIGRINKIRRRLVKDSNTKKAGKTGPMKTLLVRVMTPDLRERLENLRKKPENIPQPISNTSRANLNKLLTDYTEMKKAILHVYWEEFQKDPVGLMSRVAQPASKKIDQNKLKPEMDEKGNLTTAGFACSQCGQPLFVYKLEQVSEKGKAYTNYFGRCNVAEHEKLILLAQLKPEKDSDEAVTYSLGKFGQRALDFYSIHVTKESTHPVKPLAQIAGNRYASHPVGKALSDACMGTIASFLSKYQDIIIEHQKVVKGNQKRLESLRELAGKENLEYPSVTLPPQPHTKEGVDAYNEVIARVRMWVNLNLWQKLKLSRDDAKPLLRLKGFPSFPLVERQANEVDWWDMVCNVKKLINEKKEDGKVFWQNLAGYKRQEALRPYLSSEEDRKKGKKFARYQLGDLLLHLEKKHGEDWGKVYGEAWERIDKKVEGLSKHIKLEEERRSEDAQSKAALTDWLRAKASFVIEGLKEADKDEFCRCELKLQKWYGDLRGKPFAIEAENSILDISGFSKQYNCAFIWQKDGVKKLNLYLIINYFKGGKLRFKKIKPEAFEANRFYTVINKKSGEIVPMEVNFNFDDPNLIILPLAFGKRQGREFIWNDLLSLETGSLKLANGRVIEKTLYNRRTRQDEPALFVALTFERREVLDSSNIKPMNLIGVDRGENIPAVIALTDPEGCPLSRFKDSLGNPTHILRIGESYKEKQRTIQAKKEVEQRRAGGYSRKYASKAKNLADDMVRNTARDLLYYAVTQDAMLIFENLSRGFGRQGKRTFMAERQYTRMEDWLTAKLAYEGLPSKTYLSKTLAQYTSKTCSNCGFTITSADYDRVLEKLKKTATGWMTTINGKELKVEGQITYYNRYKRQNVVKDLSVELDRLSEESVNNDISSWTKGRSGEALSLLKKRFSHRPVQEKFVCLNCGFETHADEQAALNIARSWLFLRSQEYKKYQTNKTTGNTDKRAFVETWQSFYRKKLKEVWKPAV

SEQ ID NO: 41364 - protein, 978 aa, synthetic construct
  REGION 1..978: note = engineered CasX variant
QEIGRINKIRRRLVKDSNTKKAGKTGPMKTLLVRVMTPDLRERLENLRKKPENIPQPISNTSRANLNKLLTDYTEMKKAILHVYWEEFQKDPVGLMSRVAQPASKKIDQNKLKPEMDEKGNLTTAGFACSQCGQPLFVYKLEQVSEKGKAYTNYFGRCNVAEHEKLILLAQLKPEKDSDEAVTYSLGKFGQRALDFYSIHVTKESTHPVKPLAQIAGNRYASSPVGKALSDACMGTIASFLSKYQDIIIEHQKVVKGNQKRLESLRELAGKENLEYPSVTLPPQPHTKEGVDAYNEVIARVRMWVNLNLWQKLKLSRDDAKPLLRLKGFPSFPLVERQANEVDWWDMVCNVKKLINEKKEDGKVFWQNLAGYKRQEALRPYLSSEEDRKKGKKFARYQLGDLLLHLEKKHGEDWGKVYGEAWERIDKKVEGLSKHIKLEEERRSEDAQSKAALTDWLRAKASFVIEGLKEADKDEFCRCELKLQKWYGDLRGKPFAIEAENSILDISGFSKQYNCAFIWQKDGVKKLNLYLIINYFKGGKLRFKKIKPEAFEANRFYTVINKKSGEIVPMEVNFNFDDPNLIILPLAFGKRQGREFIWNDLLSLETGSLKLANGRVIEKTLYNRRTRQDEPALFVALTFERREVLDSSNIKPMNLIGVDRGENIPAVIALTDPEGCPLSRFKDSLGNPTHILRIGESYKEKQRTIQAKKEVEQRRAGGYSRKYASKAKNLADDMVRNTARDLLYYAVTQDAMLIFENLSRGFGRQGKRTFMAERQYTRMEDWLTAKLAYEGLPSKTYLSKTLAQYTSKTCSNCGFTITSADYDRVLEKLKKTATGWMTTINGKELKVEGQITYYNRYKRQNVVKDLSVELDRLSEESVNNDISSWTKGRSGEALSLLKKRFSHRPVQEKFVCLNCGFETHADEQAALNIARSWLFLRSQEYKKYQTNKTTGNTDKRAFVETWQSFYRKKLKEVWKPAV

SEQ ID NO: 41365 - protein, 978 aa, synthetic construct
  REGION 1..978: note = engineered CasX variant
QEIGRINKIRRRLVKDSNTKKAGKTGPMKTLLVRVMTPDLRERLENLRKKPENIPQPISNTSRANLNKLLTDYTEMKKAILHVYWEEFQKDPVGLMSRVAQPASKKIDQNKLKPEMDEKGNLTTAGFACSQCGQPLFVYKLEQVSEKGKAYTNYFGRCNVAEHEKLILLAQLKPEKDSDEAVTYSLGKFGQRALDFYSIHVTKESTHPVKPLAQIAGNRYASTPVGKALSDACMGTIASFLSKYQDIIIEHQKVVKGNQKRLESLRELAGKENLEYPSVTLPPQPHTKEGVDAYNEVIARVRMWVNLNLWQKLKLSRDDAKPLLRLKGFPSFPLVERQANEVDWWDMVCNVKKLINEKKEDGKVFWQNLAGYKRQEALRPYLSSEEDRKKGKKFARYQLGDLLLHLEKKHGEDWGKVYGEAWERIDKKVEGLSKHIKLEEERRSEDAQSKAALTDWLRAKASFVIEGLKEADKDEFCRCELKLQKWYGDLRGKPFAIEAENSILDISGFSKQYNCAFIWQKDGVKKLNLYLIINYFKGGKLRFKKIKPEAFEANRFYTVINKKSGEIVPMEVNFNFDDPNLIILPLAFGKRQGREFIWNDLLSLETGSLKLANGRVIEKTLYNRRTRQDEPALFVALTFERREVLDSSNIKPMNLIGVDRGENIPAVIALTDPEGCPLSRFKDSLGNPTHILRIGESYKEKQRTIQAKKEVEQRRAGGYSRKYASKAKNLADDMVRNTARDLLYYAVTQDAMLIFENLSRGFGRQGKRTFMAERQYTRMEDWLTAKLAYEGLPSKTYLSKTLAQYTSKTCSNCGFTITSADYDRVLEKLKKTATGWMTTINGKELKVEGQITYYNRYKRQNVVKDLSVELDRLSEESVNNDISSWTKGRSGEALSLLKKRFSHRPVQEKFVCLNCGFETHADEQAALNIARSWLFLRSQEYKKYQTNKTTGNTDKRAFVETWQSFYRKKLKEVWKPAV

SEQ ID NO: 41366 - protein, 978 aa, synthetic construct
  REGION 1..978: note = engineered CasX variant
QEIGRINKIRRRLVKDSNTKKAGKTGPMKTLLVRVMTPDLRERLENLRKKPENIPQPISNTSRANLNKLLTDYTEMKKAILHVYWEEFQKDPVGLMSRVAQPASKKIDQNKLKPEMDEKGNLTTAGFACSQCGQPLFVYKLEQVSEKGKAYTNYFGRCNVAEHEKLILLAQLKPEKDSDEAVTYSLGKFGQRALDFYSIHVTKESTHPVKPLAQIAGNRYASAPVGKALSDACMGTIASFLSKYQDIIIEHQKVVKGNQKRLESLRELAGKENLEYPSVTLPPQPHTKEGVDAYNEVIARVRMWVNLNLWQKLKLSRDDAKPLLRLKGFPSFPLVERQANEVDWWDMVCNVKKLINEKKEDGKVFWQNLAGYKRQEALRPYLSSEEDRKKGKKFARYQLGDLLLHLEKKHGEDWGKVYGEAWERIDKKVEGLSKHIKLEEERRSEDAQSKAALTDWLRAKASFVIEGLKEADKDEFCRCELKLQKWYGDLRGKPFAIEAENSILDISGFSKQYNCAFIWQKDGVKKLNLYLIINYFKGGKLRFKKIKPEAFEANRFYTVINKKSGEIVPMEVNFNFDDPNLIILPLAFGKRQGREFIWNDLLSLETGSLKLANGRVIEKTLYNRRTRQDEPALFVALTFERREVLDSSNIKPMNLIGVDRGENIPAVIALTDPEGCPLSRFKDSLGNPTHILRIGESYKEKQRTIQAKKEVEQRRAGGYSRKYASKAKNLADDMVRNTARDLLYYAVTQDAMLIFENLSRGFGRQGKRTFMAERQYTRMEDWLTAKLAYEGLPSKTYLSKTLAQYTSKTCSNCGFTITSADYDRVLEKLKKTATGWMTTINGKELKVEGQITYYNRYKRQNVVKDLSVELDRLSEESVNNDISSWTKGRSGEALSLLKKRFSHRPVQEKFVCLNCGFETHADEQAALNIARSWLFLRSQEYKKYQTNKTTGNTDKRAFVETWQSFYRKKLKEVWKPAV

SEQ ID NO: 41367 - protein, 978 aa, synthetic construct
  REGION 1..978: note = engineered CasX variant
QEIGRINKIRRRLVKDSNTKKAGKTGPMKTLLVRVMTPDLRERLENLRKKPENIPQPISNTSRANLNKLLTDYTEMKKAILHVYWEEFQKDPVGLMSRVAQPASKKIDQNKLKPEMDEKGNLTTAGFACSQCGQPLFVYKLEQVSEKGKAYTNYFGRCNVAEHEKLILLAQLKPEKDSDEAVTYSLGKFGQRALDFYSIHVTKESTHPVKPLAQIAGNRYASVPVGKALSDACMGTIASFLSKYQDIIIEHQKVVKGNQKRLESLRELAGKENLEYPSVTLPPQPHTKEGVDAYNEVIARVRMWVNLNLWQKLKLSRDDAKPLLRLKGFPSFPLVERQANEVDWWDMVCNVKKLINEKKEDGKVFWQNLAGYKRQEALRPYLSSEEDRKKGKKFARYQLGDLLLHLEKKHGEDWGKVYGEAWERIDKKVEGLSKHIKLEEERRSEDAQSKAALTDWLRAKASFVIEGLKEADKDEFCRCELKLQKWYGDLRGKPFAIEAENSILDISGFSKQYNCAFIWQKDGVKKLNLYLIINYFKGGKLRFKKIKPEAFEANRFYTVINKKSGEIVPMEVNFNFDDPNLIILPLAFGKRQGREFIWNDLLSLETGSLKLANGRVIEKTLYNRRTRQDEPALFVALTFERREVLDSSNIKPMNLIGVDRGENIPAVIALTDPEGCPLSRFKDSLGNPTHILRIGESYKEKQRTIQAKKEVEQRRAGGYSRKYASKAKNLADDMVRNTARDLLYYAVTQDAMLIFENLSRGFGRQGKRTFMAERQYTRMEDWLTAKLAYEGLPSKTYLSKTLAQYTSKTCSNCGFTITSADYDRVLEKLKKTATGWMTTINGKELKVEGQITYYNRYKRQNVVKDLSVELDRLSEESVNNDISSWTKGRSGEALSLLKKRFSHRPVQEKFVCLNCGFETHADEQAALNIARSWLFLRSQEYKKYQTNKTTGNTDKRAFVETWQSFYRKKLKEVWKPAV

SEQ ID NO: 41368 - protein, 978 aa, synthetic construct
  REGION 1..978: note = engineered CasX variant
QEIGRINKIRRRLVKDSNTKKAGKTGPMKTLLVRVMTPDLRERLENLRKKPENIPQPISNTSRANLNKLLTDYTEMKKAILHVYWEEFQKDPVGLMSRVAQPASKKIDQNKLKPEMDEKGNLTTAGFACSQCGQPLFVYKLEQVSEKGKAYTNYFGRCNVAEHEKLIKLAQLKPEKDSDEAVTYSLGKFGQRALDFYSIHVTKESTHPVKPLAQIAGNRYASGPVGKALSDACMGTIASFLSKYQDIIIEHQKVVKGNQKRLESLRELAGKENLEYPSVTLPPQPHTKEGVDAYNEVIARVRMWVNLNLWQKLKLSRDDAKPLLRLKGFPSFPLVERQANEVDWWDMVCNVKKLINEKKEDGKVFWQNLAGYKRQEALRPYLSSEEDRKKGKKFARYQLGDLLLHLEKKHGEDWGKVYGEAWERIDKKVEGLSKHIKLEEERRSEDAQSKAALTDWLRAKASFVIEGLKEADKDEFCRCELKLQKWYGDLRGKPFAIEAENSILDISGFSKQYNCAFIWQKDGVKKLNLYLIINYFKGGKLRFKKIKPEAFEANRFYTVINKKSGEIVPMEVNFNFDDPNLIILPLAFGKRQGREFIWNDLLSLETGSLKLANGRVIEKTLYNRRTRQDEPALFVALTFERREVLDSSNIKPMNLIGVDRGENIPAVIALTDPEGCPLSRFKDSLGNPTHILRIGESYKEKQRTIQAKKEVEQRRAGGYSRKYASKAKNLADDMVRNTARDLLYYAVTQDAMLIFENLSRGFGRQGKRTFMAERQYTRMEDWLTAKLAYEGLPSKTYLSKTLAQYTSKTCSNCGFTITSADYDRVLEKLKKTATGWMTTINGKELKVEGQITYYNRYKRQNVVKDLSVELDRLSEESVNNDISSWTKGRSGEALSLLKKRFSHRPVQEKFVCLNCGFETHADEQAALNIARSWLFLRSQEYKKYQTNKTTGNTDKRAFVETWQSFYRKKLKEVWKPAV

SEQ ID NO: 41369 - protein, 977 aa, synthetic construct
  REGION 1..977: note = engineered CasX variant
QEIGRINKIRRRLVKDSNTKKAGKTGPMKTLLVRVMTPDLRERLENLRKKPENIPQPISNTSRANLNKLLTDYTEMKKAILHVYWEEFQKDPVGLMSRVAQPASKKIDQNKLKPEMDEKGNLTTAGFACSQCGQPLFVYKLEQVSEKGKAYTNYFGRCNVAEHEKLILLAQLKPEKDSDEAVTYSLGKFGQRALDFYSIHVTKESTHPVKPLAQIAGNRYASPVGKALSDACMGTIASFLSKYQDIIIEHQKVVKGNQKRLESLRELAGKENLEYPSVTLPPQPHTKEGVDAYNEVIARVRMWVNLNLWQKLKLSRDDAKPLLRLKGFPSFPLVERQANEVDWWDMVCNVKKLINEKKEDGKVFWQNLAGYKRQEALRPYLSSEEDRKKGKKFARYQLGDLLLHLEKKHGEDWGKVYGEAWERIDKKVEGLSKHIKLEEERRSEDAQSKAALTDWLRAKASFVIEGLKEADKDEFCRCELKLQKWYGDLRGKPFAIEAENSILDISGFSKQYNCAFIWQKDGVKKLNLYLIINYFKGGKLRFKKIKPEAFEANRFYTVINKKSGEIVPMEVNFNFDDPNLIILPLAFGKRQGREFIWNDLLSLETGSLKLANGRVIEKTLYNRRTRQDEPALFVALTFERREVLDSSNIKPMNLIGVDRGENIPAVIALTDPEGCPLSRFKDSLGNPTHILRIGESYKEKQRTIQAKKEVEQRRAGGYSRKYASKAKNLADDMVRNTARDLLYYAVTQDAMLIFENLSRGFGRQGKRTFMAERQYTRMEDWLTAKLAYEGLPSKTYLSKTLAQYTSKTCSNCGFTITSADYDRVLEKLKKTATGWMTTINGKELKVEGQITYYNRYKRQNVVKDLSVELDRLSEESVNNDISSWTKGRSGEALSLLKKRFSHRPVQEKFVCLNCGFETHADEQAALNIARSWLFLRSQEYKKYQTNKTTGNTDKRAFVETWQSFYRKKLKEVWKPAV

SEQ ID NO: 41370 - protein, 978 aa, synthetic construct
  REGION 1..978: note = engineered CasX variant
QEIGRINKIRRRLVKDSNTKKAGKTGPMKTLLVRVMTPDLRERLENLRKKPENIPQPISNTSRANLNKLLTDYTEMKKAILHVYWEEFQKDPVGLMSRVAQPASKKIDQNKLKPEMDEKGNLTTAGFACSQCGQPLFVYKLEQVSEKGKAYTNYFGRCNVAEHEKLILLAQLKPEKDSDEAVTYSLGKFGQRALDFYSIHVTKESTHPVKPLAQIAGNRYASYPVGKALSDACMGTIASFLSKYQDIIIEHQKVVKGNQKRLESLRELAGKENLEYPSVTLPPQPHTKEGVDAYNEVIARVRMWVNLNLWQKLKLSRDDAKPLLRLKGFPSFPLVERQANEVDWWDMVCNVKKLINEKKEDGKVFWQNLAGYKRQEALRPYLSSEEDRKKGKKFARYQLGDLLLHLEKKHGEDWGKVYDEAWERIDKKVEGLSKHIKLEEERRSEDAQSKAALTDWLRAKASFVIEGKKEADKDEFCRCELKLQKWYGDLRGKPFAIEAENSILDISGFSKQYNCAFIWQKDGVKKLNLYLIINYFKGGKLRFKKIKPEAFEANRFYTVINKKSGEIVPMEVNFNFDDPNLIILPLAFGKRQGREFIWNDLLSLETGSLKLANGRVIEKTLYNRRTRQDEPALFVALTFERREVLDSSNIKPMNLIGVDRGENIPAVIALTDPEGCPLSRFKDSLGNPTHILRIGESYKEKQRTIQAKKEVEQRRAGGYSRKYASKAKNLADDMVRNTARDLLYYAVTQDAMLIFENLSRGFGRQGKRTFMAERQYTRMEDWLTAKLAYEGLPSKTYLSKTLAQYTSKTCSNCGFTITSADYDRVLEKLKKTATGWMTTINGKELKVEGQITYYNRYKRQNVVKDLSVELDRLSEESVNNDISSWTKGRSGEALSLLKKRFSHRPVQEKFVCLNCGFETHADEQAALNIARSWLFLRSQEYKKYQTNKTTGNTDKRAFVETWQSFYRKKLKEVWKPAV

SEQ ID NO: 41371 - protein, 978 aa, synthetic construct
  REGION 1..978: note = engineered CasX variant
QEIGRINKIRRRLVKDSNTKKAGKTGPMKTLLVRVMTPDLRERLENLRKKPENIPQPISNTSRANLNKLLTDYTEMKKAILHVYWEEFQKDPVGLMSRVAQPASKKIDQNKLKPEMDEKGNLTTAGFACSQCGQPLFVYKLEQVSEKGKAYTNYFGRCNVAEHEKLILLAQLKPEKDSDEAVTYSLGKFGQRALDFYSIHVTKESTHPVKPLAQIAGNRYASHPVGKALSDACMGTIASFLSKYQDIIIEHQKVVKGNQKRLESLRELAGKENLEYPSVTLPPQPHTKEGVDAYNEVIARVRMWVNLNLWQKLKLSRDDAKPLLRLKGFPSFPLVERQANEVDWWDMVCNVKKLINEKKEDGKVFWQNLAGYKRQEALRPYLSSEEDRKKGKKFARYQLGDLLLHLEKKHGEDWGKVYDEAWERIDKKVEGLSKHIKLEEERRSEDAQSKAALTDWLRAKASFVIEGKKEADKDEFCRCELKLQKWYGDLRGKPFAIEAENSILDISGFSKQYNCAFIWQKDGVKKLNLYLIINYFKGGKLRFKKIKPEAFEANRFYTVINKKSGEIVPMEVNFNFDDPNLIILPLAFGKRQGREFIWNDLLSLETGSLKLANGRVIEKTLYNRRTRQDEPALFVALTFERREVLDSSNIKPMNLIGVDRGENIPAVIALTDPEGCPLSRFKDSLGNPTHILRIGESYKEKQRTIQAKKEVEQRRAGGYSRKYASKAKNLADDMVRNTARDLLYYAVTQDAMLIFENLSRGFGRQGKRTFMAERQYTRMEDWLTAKLAYEGLPSKTYLSKTLAQYTSKTCSNCGFTITSADYDRVLEKLKKTATGWMTTINGKELKVEGQITYYNRYKRQNVVKDLSVELDRLSEESVNNDISSWTKGRSGEALSLLKKRFSHRPVQEKFVCLNCGFETHADEQAALNIARSWLFLRSQEYKKYQTNKTTGNTDKRAFVETWQSFYRKKLKEVWKPAV

SEQ ID NO: 41372 - protein, 978 aa, synthetic construct
  REGION 1..978: note = engineered CasX variant
QEIGRINKIRRRLVKDSNTKKAGKTGPMKTLLVRVMTPDLRERLENLRKKPENIPQPISNTSRANLNKLLTDYTEMKKAILHVYWEEFQKDPVGLMSRVAQPASKKIDQNKLKPEMDEKGNLTTAGFACSQCGQPLFVYKLEQVSEKGKAYTNYFGRCNVAEHEKLILLAQLKPEKDSDEAVTYSLGKFGQRALDFYSIHVTKESTHPVKPLAQIAGNRYASSPVGKALSDACMGTIASFLSKYQDIIIEHQKVVKGNQKRLESLRELAGKENLEYPSVTLPPQPHTKEGVDAYNEVIARVRMWVNLNLWQKLKLSRDDAKPLLRLKGFPSFPLVERQANEVDWWDMVCNVKKLINEKKEDGKVFWQNLAGYKRQEALRPYLSSEEDRKKGKKFARYQLGDLLLHLEKKHGEDWGKVYDEAWERIDKKVEGLSKHIKLEEERRSEDAQSKAALTDWLRAKASFVIEGKKEADKDEFCRCELKLQKWYGDLRGKPFAIEAENSILDISGFSKQYNCAFIWQKDGVKKLNLYLIINYFKGGKLRFKKIKPEAFEANRFYTVINKKSGEIVPMEVNFNFDDPNLIILPLAFGKRQGREFIWNDLLSLETGSLKLANGRVIEKTLYNRRTRQDEPALFVALTFERREVLDSSNIKPMNLIGVDRGENIPAVIALTDPEGCPLSRFKDSLGNPTHILRIGESYKEKQRTIQAKKEVEQRRAGGYSRKYASKAKNLADDMVRNTARDLLYYAVTQDAMLIFENLSRGFGRQGKRTFMAERQYTRMEDWLTAKLAYEGLPSKTYLSKTLAQYTSKTCSNCGFTITSADYDRVLEKLKKTATGWMTTINGKELKVEGQITYYNRYKRQNVVKDLSVELDRLSEESVNNDISSWTKGRSGEALSLLKKRFSHRPVQEKFVCLNCGFETHADEQAALNIARSWLFLRSQEYKKYQTNKTTGNTDKRAFVETWQSFYRKKLKEVWKPAV

SEQ ID NO: 41373 - protein, 978 aa, synthetic construct
  REGION 1..978: note = engineered CasX variant
QEIGRINKIRRRLVKDSNTKKAGKTGPMKTLLVRVMTPDLRERLENLRKKPENIPQPISNTSRANLNKLLTDYTEMKKAILHVYWEEFQKDPVGLMSRVAQPASKKIDQNKLKPEMDEKGNLTTAGFACSQCGQPLFVYKLEQVSEKGKAYTNYFGRCNVAEHEKLILLAQLKPEKDSDEAVTYSLGKFGQRALDFYSIHVTKESTHPVKPLAQIAGNRYASTPVGKALSDACMGTIASFLSKYQDIIIEHQKVVKGNQKRLESLRELAGKENLEYPSVTLPPQPHTKEGVDAYNEVIARVRMWVNLNLWQKLKLSRDDAKPLLRLKGFPSFPLVERQANEVDWWDMVCNVKKLINEKKEDGKVFWQNLAGYKRQEALRPYLSSEEDRKKGKKFARYQLGDLLLHLEKKHGEDWGKVYDEAWERIDKKVEGLSKHIKLEEERRSEDAQSKAALTDWLRAKASFVIEGKKEADKDEFCRCELKLQKWYGDLRGKPFAIEAENSILDISGFSKQYNCAFIWQKDGVKKLNLYLIINYFKGGKLRFKKIKPEAFEANRFYTVINKKSGEIVPMEVNFNFDDPNLIILPLAFGKRQGREFIWNDLLSLETGSLKLANGRVIEKTLYNRRTRQDEPALFVALTFERREVLDSSNIKPMNLIGVDRGENIPAVIALTDPEGCPLSRFKDSLGNPTHILRIGESYKEKQRTIQAKKEVEQRRAGGYSRKYASKAKNLADDMVRNTARDLLYYAVTQDAMLIFENLSRGFGRQGKRTFMAERQYTRMEDWLTAKLAYEGLPSKTYLSKTLAQYTSKTCSNCGFTITSADYDRVLEKLKKTATGWMTTINGKELKVEGQITYYNRYKRQNVVKDLSVELDRLSEESVNNDISSWTKGRSGEALSLLKKRFSHRPVQEKFVCLNCGFETHADEQAALNIARSWLFLRSQEYKKYQTNKTTGNTDKRAFVETWQSFYRKKLKEVWKPAV

SEQ ID NO: 41374 - protein, 978 aa, synthetic construct
  REGION 1..978: note = engineered CasX variant
QEIGRINKIRRRLVKDSNTKKAGKTGPMKTLLVRVMTPDLRERLENLRKKPENIPQPISNTSRANLNKLLTDYTEMKKAILHVYWEEFQKDPVGLMSRVAQPASKKIDQNKLKPEMDEKGNLTTAGFACSQCGQPLFVYKLEQVSEKGKAYTNYFGRCNVAEHEKLILLAQLKPEKDSDEAVTYSLGKFGQRALDFYSIHVTKESTHPVKPLAQIAGNRYASAPVGKALSDACMGTIASFLSKYQDIIIEHQKVVKGNQKRLESLRELAGKENLEYPSVTLPPQPHTKEGVDAYNEVIARVRMWVNLNLWQKLKLSRDDAKPLLRLKGFPSFPLVERQANEVDWWDMVCNVKKLINEKKEDGKVFWQNLAGYKRQEALRPYLSSEEDRKKGKKFARYQLGDLLLHLEKKHGEDWGKVYDEAWERIDKKVEGLSKHIKLEEERRSEDAQSKAALTDWLRAKASFVIEGKKEADKDEFCRCELKLQKWYGDLRGKPFAIEAENSILDISGFSKQYNCAFIWQKDGVKKLNLYLIINYFKGGKLRFKKIKPEAFEANRFYTVINKKSGEIVPMEVNFNFDDPNLIILPLAFGKRQGREFIWNDLLSLETGSLKLANGRVIEKTLYNRRTRQDEPALFVALTFERREVLDSSNIKPMNLIGVDRGENIPAVIALTDPEGCPLSRFKDSLGNPTHILRIGESYKEKQRTIQAKKEVEQRRAGGYSRKYASKAKNLADDMVRNTARDLLYYAVTQDAMLIFENLSRGFGRQGKRTFMAERQYTRMEDWLTAKLAYEGLPSKTYLSKTLAQYTSKTCSNCGFTITSADYDRVLEKLKKTATGWMTTINGKELKVEGQITYYNRYKRQNVVKDLSVELDRLSEESVNNDISSWTKGRSGEALSLLKKRFSHRPVQEKFVCLNCGFETHADEQAALNIARSWLFLRSQEYKKYQTNKTTGNTDKRAFVETWQSFYRKKLKEVWKPAV

SEQ ID NO: 41375 - protein, 978 aa, synthetic construct
  REGION 1..978: note = engineered CasX variant
QEIGRINKIRRRLVKDSNTKKAGKTGPMKTLLVRVMTPDLRERLENLRKKPENIPQPISNTSRANLNKLLTDYTEMKKAILHVYWEEFQKDPVGLMSRVAQPASKKIDQNKLKPEMDEKGNLTTAGFACSQCGQPLFVYKLEQVSEKGKAYTNYFGRCNVAEHEKLILLAQLKPEKDSDEAVTYSLGKFGQRALDFYSIHVTKESTHPVKPLAQIAGNRYASVPVGKALSDACMGTIASFLSKYQDIIIEHQKVVKGNQKRLESLRELAGKENLEYPSVTLPPQPHTKEGVDAYNEVIARVRMWVNLNLWQKLKLSRDDAKPLLRLKGFPSFPLVERQANEVDWWDMVCNVKKLINEKKEDGKVFWQNLAGYKRQEALRPYLSSEEDRKKGKKFARYQLGDLLLHLEKKHGEDWGKVYDEAWERIDKKVEGLSKHIKLEEERRSEDAQSKAALTDWLRAKASFVIEGKKEADKDEFCRCELKLQKWYGDLRGKPFAIEAENSILDISGFSKQYNCAFIWQKDGVKKLNLYLIINYFKGGKLRFKKIKPEAFEANRFYTVINKKSGEIVPMEVNFNFDDPNLIILPLAFGKRQGREFIWNDLLSLETGSLKLANGRVIEKTLYNRRTRQDEPALFVALTFERREVLDSSNIKPMNLIGVDRGENIPAVIALTDPEGCPLSRFKDSLGNPTHILRIGESYKEKQRTIQAKKEVEQRRAGGYSRKYASKAKNLADDMVRNTARDLLYYAVTQDAMLIFENLSRGFGRQGKRTFMAERQYTRMEDWLTAKLAYEGLPSKTYLSKTLAQYTSKTCSNCGFTITSADYDRVLEKLKKTATGWMTTINGKELKVEGQITYYNRYKRQNVVKDLSVELDRLSEESVNNDISSWTKGRSGEALSLLKKRFSHRPVQEKFVCLNCGFETHADEQAALNIARSWLFLRSQEYKKYQTNKTTGNTDKRAFVETWQSFYRKKLKEVWKPAV

SEQ ID NO: 41376 - protein, 978 aa, synthetic construct
  REGION 1..978: note = engineered CasX variant
QEIGRINKIRRRLVKDSNTKKAGKTGPMKTLLVRVMTPDLRERLENLRKKPENIPQPISNTSRANLNKLLTDYTEMKKAILHVYWEEFQKDPVGLMSRVAQPASKKIDQNKLKPEMDEKGNLTTAGFACSQCGQPLFVYKLEQVSEKGKAYTNYFGRCNVAEHEKLIKLAQLKPEKDSDEAVTYSLGKFGQRALDFYSIHVTKESTHPVKPLAQIAGNRYASGPVGKALSDACMGTIASFLSKYQDIIIEHQKVVKGNQKRLESLRELAGKENLEYPSVTLPPQPHTKEGVDAYNEVIARVRMWVNLNLWQKLKLSRDDAKPLLRLKGFPSFPLVERQANEVDWWDMVCNVKKLINEKKEDGKVFWQNLAGYKRQEALRPYLSSEEDRKKGKKFARYQLGDLLLHLEKKHGEDWGKVYDEAWERIDKKVEGLSKHIKLEEERRSEDAQSKAALTDWLRAKASFVIEGKKEADKDEFCRCELKLQKWYGDLRGKPFAIEAENSILDISGFSKQYNCAFIWQKDGVKKLNLYLIINYFKGGKLRFKKIKPEAFEANRFYTVINKKSGEIVPMEVNFNFDDPNLIILPLAFGKRQGREFIWNDLLSLETGSLKLANGRVIEKTLYNRRTRQDEPALFVALTFERREVLDSSNIKPMNLIGVDRGENIPAVIALTDPEGCPLSRFKDSLGNPTHILRIGESYKEKQRTIQAKKEVEQRRAGGYSRKYASKAKNLADDMVRNTARDLLYYAVTQDAMLIFENLSRGFGRQGKRTFMAERQYTRMEDWLTAKLAYEGLPSKTYLSKTLAQYTSKTCSNCGFTITSADYDRVLEKLKKTATGWMTTINGKELKVEGQITYYNRYKRQNVVKDLSVELDRLSEESVNNDISSWTKGRSGEALSLLKKRFSHRPVQEKFVCLNCGFETHADEQAALNIARSWLFLRSQEYKKYQTNKTTGNTDKRAFVETWQSFYRKKLKEVWKPAV

SEQ ID NO: 41377 - protein, 977 aa, synthetic construct
  REGION 1..977: note = engineered CasX variant
QEIGRINKIRRRLVKDSNTKKAGKTGPMKTLLVRVMTPDLRERLENLRKKPENIPQPISNTSRANLNKLLTDYTEMKKAILHVYWEEFQKDPVGLMSRVAQPASKKIDQNKLKPEMDEKGNLTTAGFACSQCGQPLFVYKLEQVSEKGKAYTNYFGRCNVAEHEKLILLAQLKPEKDSDEAVTYSLGKFGQRALDFYSIHVTKESTHPVKPLAQIAGNRYASPVGKALSDACMGTIASFLSKYQDIIIEHQKVVKGNQKRLESLRELAGKENLEYPSVTLPPQPHTKEGVDAYNEVIARVRMWVNLNLWQKLKLSRDDAKPLLRLKGFPSFPLVERQANEVDWWDMVCNVKKLINEKKEDGKVFWQNLAGYKRQEALRPYLSSEEDRKKGKKFARYQLGDLLLHLEKKHGEDWGKVYDEAWERIDKKVEGLSKHIKLEEERRSEDAQSKAALTDWLRAKASFVIEGKKEADKDEFCRCELKLQKWYGDLRGKPFAIEAENSILDISGFSKQYNCAFIWQKDGVKKLNLYLIINYFKGGKLRFKKIKPEAFEANRFYTVINKKSGEIVPMEVNFNFDDPNLIILPLAFGKRQGREFIWNDLLSLETGSLKLANGRVIEKTLYNRRTRQDEPALFVALTFERREVLDSSNIKPMNLIGVDRGENIPAVIALTDPEGCPLSRFKDSLGNPTHILRIGESYKEKQRTIQAKKEVEQRRAGGYSRKYASKAKNLADDMVRNTARDLLYYAVTQDAMLIFENLSRGFGRQGKRTFMAERQYTRMEDWLTAKLAYEGLPSKTYLSKTLAQYTSKTCSNCGFTITSADYDRVLEKLKKTATGWMTTINGKELKVEGQITYYNRYKRQNVVKDLSVELDRLSEESVNNDISSWTKGRSGEALSLLKKRFSHRPVQEKFVCLNCGFETHADEQAALNIARSWLFLRSQEYKKYQTNKTTGNTDKRAFVETWQSFYRKKLKEVWKPAV

SEQ ID NO: 41378 - protein, 978 aa, synthetic construct
  REGION 1..978: note = engineered CasX variant
QEIGRINKIRRRLVKDSNTKKAGKTGPMKTLLVRVMTPDLRERLENLRKKPENIPQPISNTSRANLNKLLTDYTEMKKAILHVYWEEFQKDPVGLMSRVAQPASKKIDQNKLKPEMDEKGNLTTAGFACSQCGQPLFVYKLEQVSEKGKAYTNYFGRCNVAEHEKLILLAQLKPEKDSDEAVTYSLGKFGQRALDFYSIHVTKESTHPVKPLAQIAGNRYASYPVGKALSDACMGTIASFLSKYQDIIIEHQKVVKGNQKRLESLRELAGKENLEYPSVTLPPQPHTKEGVDAYNEVIARVRMWVNLNLWQKLKLSRDDAKPLLRLKGFPSFPLVERQANEVDWWDMVCNVKKLINEKKEDGKVFWQNLAGYKRQEALRPYLSSEEDRKKGKKFARYQLGDLLLHLEKKHGEDWGKVYDEAWERIDKKVEGLSKHIKLEEERRSEDAQSKAALTDWLRAKASFVIEGSKEADKDEFCRCELKLQKWYGDLRGKPFAIEAENSILDISGFSKQYNCAFIWQKDGVKKLNLYLIINYFKGGKLRFKKIKPEAFEANRFYTVINKKSGEIVPMEVNFNFDDPNLIILPLAFGKRQGREFIWNDLLSLETGSLKLANGRVIEKTLYNRRTRQDEPALFVALTFERREVLDSSNIKPMNLIGVDRGENIPAVIALTDPEGCPLSRFKDSLGNPTHILRIGESYKEKQRTIQAKKEVEQRRAGGYSRKYASKAKNLADDMVRNTARDLLYYAVTQDAMLIFENLSRGFGRQGKRTFMAERQYTRMEDWLTAKLAYEGLPSKTYLSKTLAQYTSKTCSNCGFTITSADYDRVLEKLKKTATGWMTTINGKELKVEGQITYYNRYKRQNVVKDLSVELDRLSEESVNNDISSWTKGRSGEALSLLKKRFSHRPVQEKFVCLNCGFETHADEQAALNIARSWLFLRSQEYKKYQTNKTTGNTDKRAFVETWQSFYRKKLKEVWKPAV

SEQ ID NO: 41379 - protein, 978 aa, synthetic construct
  REGION 1..978: note = engineered CasX variant
QEIGRINKIRRRLVKDSNTKKAGKTGPMKTLLVRVMTPDLRERLENLRKKPENIPQPISNTSRANLNKLLTDYTEMKKAILHVYWEEFQKDPVGLMSRVAQPASKKIDQNKLKPEMDEKGNLTTAGFACSQCGQPLFVYKLEQVSEKGKAYTNYFGRCNVAEHEKLILLAQLKPEKDSDEAVTYSLGKFGQRALDFYSIHVTKESTHPVKPLAQIAGNRYASHPVGKALSDACMGTIASFLSKYQDIIIEHQKVVKGNQKRLESLRELAGKENLEYPSVTLPPQPHTKEGVDAYNEVIARVRMWVNLNLWQKLKLSRDDAKPLLRLKGFPSFPLVERQANEVDWWDMVCNVKKLINEKKEDGKVFWQNLAGYKRQEALRPYLSSEEDRKKGKKFARYQLGDLLLHLEKKHGEDWGKVYDEAWERIDKKVEGLSKHIKLEEERRSEDAQSKAALTDWLRAKASFVIEGSKEADKDEFCRCELKLQKWYGDLRGKPFAIEAENSILDISGFSKQYNCAFIWQKDGVKKLNLYLIINYFKGGKLRFKKIKPEAFEANRFYTVINKKSGEIVPMEVNFNFDDPNLIILPLAFGKRQGREFIWNDLLSLETGSLKLANGRVIEKTLYNRRTRQDEPALFVALTFERREVLDSSNIKPMNLIGVDRGENIPAVIALTDPEGCPLSRFKDSLGNPTHILRIGESYKEKQRTIQAKKEVEQRRAGGYSRKYASKAKNLADDMVRNTARDLLYYAVTQDAMLIFENLSRGFGRQGKRTFMAERQYTRMEDWLTAKLAYEGLPSKTYLSKTLAQYTSKTCSNCGFTITSADYDRVLEKLKKTATGWMTTINGKELKVEGQITYYNRYKRQNVVKDLSVELDRLSEESVNNDISSWTKGRSGEALSLLKKRFSHRPVQEKFVCLNCGFETHADEQAALNIARSWLFLRSQEYKKYQTNKTTGNTDKRAFVETWQSFYRKKLKEVWKPAV

SEQ ID NO: 41380 - protein, 978 aa, synthetic construct
  REGION 1..978: note = engineered CasX variant
QEIGRINKIRRRLVKDSNTKKAGKTGPMKTLLVRVMTPDLRERLENLRKKPENIPQPISNTSRANLNKLLTDYTEMKKAILHVYWEEFQKDPVGLMSRVAQPASKKIDQNKLKPEMDEKGNLTTAGFACSQCGQPLFVYKLEQVSEKGKAYTNYFGRCNVAEHEKLILLAQLKPEKDSDEAVTYSLGKFGQRALDFYSIHVTKESTHPVKPLAQIAGNRYASSPVGKALSDACMGTIASFLSKYQDIIIEHQKVVKGNQKRLESLRELAGKENLEYPSVTLPPQPHTKEGVDAYNEVIARVRMWVNLNLWQKLKLSRDDAKPLLRLKGFPSFPLVERQANEVDWWDMVCNVKKLINEKKEDGKVFWQNLAGYKRQEALRPYLSSEEDRKKGKKFARYQLGDLLLHLEKKHGEDWGKVYDEAWERIDKKVEGLSKHIKLEEERRSEDAQSKAALTDWLRAKASFVIEGSKEADKDEFCRCELKLQKWYGDLRGKPFAIEAENSILDISGFSKQYNCAFIWQKDGVKKLNLYLIINYFKGGKLRFKKIKPEAFEANRFYTVINKKSGEIVPMEVNFNFDDPNLIILPLAFGKRQGREFIWNDLLSLETGSLKLANGRVIEKTLYNRRTRQDEPALFVALTFERREVLDSSNIKPMNLIGVDRGENIPAVIALTDPEGCPLSRFKDSLGNPTHILRIGESYKEKQRTIQAKKEVEQRRAGGYSRKYASKAKNLADDMVRNTARDLLYYAVTQDAMLIFENLSRGFGRQGKRTFMAERQYTRMEDWLTAKLAYEGLPSKTYLSKTLAQYTSKTCSNCGFTITSADYDRVLEKLKKTATGWMTTINGKELKVEGQITYYNRYKRQNVVKDLSVELDRLSEESVNNDISSWTKGRSGEALSLLKKRFSHRPVQEKFVCLNCGFETHADEQAALNIARSWLFLRSQEYKKYQTNKTTGNTDKRAFVETWQSFYRKKLKEVWKPAV

SEQ ID NO: 41381 - protein, 978 aa, synthetic construct
  REGION 1..978: note = engineered CasX variant
QEIGRINKIRRRLVKDSNTKKAGKTGPMKTLLVRVMTPDLRERLENLRKKPENIPQPISNTSRANLNKLLTDYTEMKKAILHVYWEEFQKDPVGLMSRVAQPASKKIDQNKLKPEMDEKGNLTTAGFACSQCGQPLFVYKLEQVSEKGKAYTNYFGRCNVAEHEKLILLAQLKPEKDSDEAVTYSLGKFGQRALDFYSIHVTKESTHPVKPLAQIAGNRYASTPVGKALSDACMGTIASFLSKYQDIIIEHQKVVKGNQKRLESLRELAGKENLEYPSVTLPPQPHTKEGVDAYNEVIARVRMWVNLNLWQKLKLSRDDAKPLLRLKGFPSFPLVERQANEVDWWDMVCNVKKLINEKKEDGKVFWQNLAGYKRQEALRPYLSSEEDRKKGKKFARYQLGDLLLHLEKKHGEDWGKVYDEAWERIDKKVEGLSKHIKLEEERRSEDAQSKAALTDWLRAKASFVIEGSKEADKDEFCRCELKLQKWYGDLRGKPFAIEAENSILDISGFSKQYNCAFIWQKDGVKKLNLYLIINYFKGGKLRFKKIKPEAFEANRFYTVINKKSGEIVPMEVNFNFDDPNLIILPLAFGKRQGREFIWNDLLSLETGSLKLANGRVIEKTLYNRRTRQDEPALFVALTFERREVLDSSNIKPMNLIGVDRGENIPAVIALTDPEGCPLSRFKDSLGNPTHILRIGESYKEKQRTIQAKKEVEQRRAGGYSRKYASKAKNLADDMVRNTARDLLYYAVTQDAMLIFENLSRGFGRQGKRTFMAERQYTRMEDWLTAKLAYEGLPSKTYLSKTLAQYTSKTCSNCGFTITSADYDRVLEKLKKTATGWMTTINGKELKVEGQITYYNRYKRQNVVKDLSVELDRLSEESVNNDISSWTKGRSGEALSLLKKRFSHRPVQEKFVCLNCGFETHADEQAALNIARSWLFLRSQEYKKYQTNKTTGNTDKRAFVETWQSFYRKKLKEVWKPAV

SEQ ID NO: 41382 - protein, 978 aa, synthetic construct
  REGION 1..978: note = engineered CasX variant
QEIGRINKIRRRLVKDSNTKKAGKTGPMKTLLVRVMTPDLRERLENLRKKPENIPQPISNTSRANLNKLLTDYTEMKKAILHVYWEEFQKDPVGLMSRVAQPASKKIDQNKLKPEMDEKGNLTTAGFACSQCGQPLFVYKLEQVSEKGKAYTNYFGRCNVAEHEKLILLAQLKPEKDSDEAVTYSLGKFGQRALDFYSIHVTKESTHPVKPLAQIAGNRYASAPVGKALSDACMGTIASFLSKYQDIIIEHQKVVKGNQKRLESLRELAGKENLEYPSVTLPPQPHTKEGVDAYNEVIARVRMWVNLNLWQKLKLSRDDAKPLLRLKGFPSFPLVERQANEVDWWDMVCNVKKLINEKKEDGKVFWQNLAGYKRQEALRPYLSSEEDRKKGKKFARYQLGDLLLHLEKKHGEDWGKVYDEAWERIDKKVEGLSKHIKLEEERRSEDAQSKAALTDWLRAKASFVIEGSKEADKDEFCRCELKLQKWYGDLRGKPFAIEAENSILDISGFSKQYNCAFIWQKDGVKKLNLYLIINYFKGGKLRFKKIKPEAFEANRFYTVINKKSGEIVPMEVNFNFDDPNLIILPLAFGKRQGREFIWNDLLSLETGSLKLANGRVIEKTLYNRRTRQDEPALFVALTFERREVLDSSNIKPMNLIGVDRGENIPAVIALTDPEGCPLSRFKDSLGNPTHILRIGESYKEKQRTIQAKKEVEQRRAGGYSRKYASKAKNLADDMVRNTARDLLYYAVTQDAMLIFENLSRGFGRQGKRTFMAERQYTRMEDWLTAKLAYEGLPSKTYLSKTLAQYTSKTCSNCGFTITSADYDRVLEKLKKTATGWMTTINGKELKVEGQITYYNRYKRQNVVKDLSVELDRLSEESVNNDISSWTKGRSGEALSLLKKRFSHRPVQEKFVCLNCGFETHADEQAALNIARSWLFLRSQEYKKYQTNKTTGNTDKRAFVETWQSFYRKKLKEVWKPAV

SEQ ID NO: 41383 - protein, 978 aa, synthetic construct
  REGION 1..978: note = engineered CasX variant
QEIGRINKIRRRLVKDSNTKKAGKTGPMKTLLVRVMTPDLRERLENLRKKPENIPQPISNTSRANLNKLLTDYTEMKKAILHVYWEEFQKDPVGLMSRVAQPASKKIDQNKLKPEMDEKGNLTTAGFACSQCGQPLFVYKLEQVSEKGKAYTNYFGRCNVAEHEKLILLAQLKPEKDSDEAVTYSLGKFGQRALDFYSIHVTKESTHPVKPLAQIAGNRYASVPVGKALSDACMGTIASFLSKYQDIIIEHQKVVKGNQKRLESLRELAGKENLEYPSVTLPPQPHTKEGVDAYNEVIARVRMWVNLNLWQKLKLSRDDAKPLLRLKGFPSFPLVERQANEVDWWDMVCNVKKLINEKKEDGKVFWQNLAGYKRQEALRPYLSSEEDRKKGKKFARYQLGDLLLHLEKKHGEDWGKVYDEAWERIDKKVEGLSKHIKLEEERRSEDAQSKAALTDWLRAKASFVIEGSKEADKDEFCRCELKLQKWYGDLRGKPFAIEAENSILDISGFSKQYNCAFIWQKDGVKKLNLYLIINYFKGGKLRFKKIKPEAFEANRFYTVINKKSGEIVPMEVNFNFDDPNLIILPLAFGKRQGREFIWNDLLSLETGSLKLANGRVIEKTLYNRRTRQDEPALFVALTFERREVLDSSNIKPMNLIGVDRGENIPAVIALTDPEGCPLSRFKDSLGNPTHILRIGESYKEKQRTIQAKKEVEQRRAGGYSRKYASKAKNLADDMVRNTARDLLYYAVTQDAMLIFENLSRGFGRQGKRTFMAERQYTRMEDWLTAKLAYEGLPSKTYLSKTLAQYTSKTCSNCGFTITSADYDRVLEKLKKTATGWMTTINGKELKVEGQITYYNRYKRQNVVKDLSVELDRLSEESVNNDISSWTKGRSGEALSLLKKRFSHRPVQEKFVCLNCGFETHADEQAALNIARSWLFLRSQEYKKYQTNKTTGNTDKRAFVETWQSFYRKKLKEVWKPAV

SEQ ID NO: 41384 - protein, 978 aa, synthetic construct
  REGION 1..978: note = engineered CasX variant
QEIGRINKIRRRLVKDSNTKKAGKTGPMKTLLVRVMTPDLRERLENLRKKPENIPQPISNTSRANLNKLLTDYTEMKKAILHVYWEEFQKDPVGLMSRVAQPASKKIDQNKLKPEMDEKGNLTTAGFACSQCGQPLFVYKLEQVSEKGKAYTNYFGRCNVAEHEKLIKLAQLKPEKDSDEAVTYSLGKFGQRALDFYSIHVTKESTHPVKPLAQIAGNRYASGPVGKALSDACMGTIASFLSKYQDIIIEHQKVVKGNQKRLESLRELAGKENLEYPSVTLPPQPHTKEGVDAYNEVIARVRMWVNLNLWQKLKLSRDDAKPLLRLKGFPSFPLVERQANEVDWWDMVCNVKKLINEKKEDGKVFWQNLAGYKRQEALRPYLSSEEDRKKGKKFARYQLGDLLLHLEKKHGEDWGKVYDEAWERIDKKVEGLSKHIKLEEERRSEDAQSKAALTDWLRAKASFVIEGSKEADKDEFCRCELKLQKWYGDLRGKPFAIEAENSILDISGFSKQYNCAFIWQKDGVKKLNLYLIINYFKGGKLRFKKIKPEAFEANRFYTVINKKSGEIVPMEVNFNFDDPNLIILPLAFGKRQGREFIWNDLLSLETGSLKLANGRVIEKTLYNRRTRQDEPALFVALTFERREVLDSSNIKPMNLIGVDRGENIPAVIALTDPEGCPLSRFKDSLGNPTHILRIGESYKEKQRTIQAKKEVEQRRAGGYSRKYASKAKNLADDMVRNTARDLLYYAVTQDAMLIFENLSRGFGRQGKRTFMAERQYTRMEDWLTAKLAYEGLPSKTYLSKTLAQYTSKTCSNCGFTITSADYDRVLEKLKKTATGWMTTINGKELKVEGQITYYNRYKRQNVVKDLSVELDRLSEESVNNDISSWTKGRSGEALSLLKKRFSHRPVQEKFVCLNCGFETHADEQAALNIARSWLFLRSQEYKKYQTNKTTGNTDKRAFVETWQSFYRKKLKEVWKPAV

SEQ ID NO: 41385 - protein, 977 aa, synthetic construct
  REGION 1..977: note = engineered CasX variant
QEIGRINKIRRRLVKDSNTKKAGKTGPMKTLLVRVMTPDLRERLENLRKKPENIPQPISNTSRANLNKLLTDYTEMKKAILHVYWEEFQKDPVGLMSRVAQPASKKIDQNKLKPEMDEKGNLTTAGFACSQCGQPLFVYKLEQVSEKGKAYTNYFGRCNVAEHEKLILLAQLKPEKDSDEAVTYSLGKFGQRALDFYSIHVTKESTHPVKPLAQIAGNRYASPVGKALSDACMGTIASFLSKYQDIIIEHQKVVKGNQKRLESLRELAGKENLEYPSVTLPPQPHTKEGVDAYNEVIARVRMWVNLNLWQKLKLSRDDAKPLLRLKGFPSFPLVERQANEVDWWDMVCNVKKLINEKKEDGKVFWQNLAGYKRQEALRPYLSSEEDRKKGKKFARYQLGDLLLHLEKKHGEDWGKVYDEAWERIDKKVEGLSKHIKLEEERRSEDAQSKAALTDWLRAKASFVIEGSKEADKDEFCRCELKLQKWYGDLRGKPFAIEAENSILDISGFSKQYNCAFIWQKDGVKKLNLYLIINYFKGGKLRFKKIKPEAFEANRFYTVINKKSGEIVPMEVNFNFDDPNLIILPLAFGKRQGREFIWNDLLSLETGSLKLANGRVIEKTLYNRRTRQDEPALFVALTFERREVLDSSNIKPMNLIGVDRGENIPAVIALTDPEGCPLSRFKDSLGNPTHILRIGESYKEKQRTIQAKKEVEQRRAGGYSRKYASKAKNLADDMVRNTARDLLYYAVTQDAMLIFENLSRGFGRQGKRTFMAERQYTRMEDWLTAKLAYEGLPSKTYLSKTLAQYTSKTCSNCGFTITSADYDRVLEKLKKTATGWMTTINGKELKVEGQITYYNRYKRQNVVKDLSVELDRLSEESVNNDISSWTKGRSGEALSLLKKRFSHRPVQEKFVCLNCGFETHADEQAALNIARSWLFLRSQEYKKYQTNKTTGNTDKRAFVETWQSFYRKKLKEVWKPAV

SEQ ID NO: 41386 - protein, 979 aa, synthetic construct
  REGION 1..979: note = engineered CasX variant
QEIGRINKIRRRLVKDSNTKKAGKTGPMKTLLVRVMTPDLRERLENLRKKPENIPQPISNTSRANLNKLLTDYTEMKKAILHVYWEEFQKDPVGLMSRVAQPASKKIDQNKLKPEMDEKGNLTTAGFACSQCGQPLFVYKLEQVSEKGKAYTNYFGRCNVAEHEKLILLAQLKPEKDSDEAVTYSLGKFGQRALDFYSIHVTKESTHPVKPLAQIAGNRYASYPVGKALSDACMGTIASFLSKYQDIIIEHQKVVKGNQKRLESLRELAGKENLEYPSVTLPPQPHTKEGVDAYNEVIARVRMWVNLNLWQKLKLSRDDAKPLLRLKGFPSFPLVERQANEVDWWDMVCNVKKLINEKKEDGKVFWQNLAGYKRQEALRPYLSSEEDRKKGKKFARYQLGDLLLHLEKKHGEDWGKVYDEAWERIDKKVEGLSKHIKLEEERRSEDAQSKAALTDWLRAKASFVIEGLKEADDKDEFCRCELKLQKWYGDLRGKPFAIEAENSILDISGFSKQYNCAFIWQKDGVKKLNLYLIINYFKGGKLRFKKIKPEAFEANRFYTVINKKSGEIVPMEVNFNFDDPNLIILPLAFGKRQGREFIWNDLLSLETGSLKLANGRVIEKTLYNRRTRQDEPALFVALTFERREVLDSSNIKPMNLIGVDRGENIPAVIALTDPEGCPLSRFKDSLGNPTHILRIGESYKEKQRTIQAKKEVEQRRAGGYSRKYASKAKNLADDMVRNTARDLLYYAVTQDAMLIFENLSRGFGRQGKRTFMAERQYTRMEDWLTAKLAYEGLPSKTYLSKTLAQYTSKTCSNCGFTITSADYDRVLEKLKKTATGWMTTINGKELKVEGQITYYNRYKRQNVVKDLSVELDRLSEESVNNDISSWTKGRSGEALSLLKKRFSHRPVQEKFVCLNCGFETHADEQAALNIARSWLFLRSQEYKKYQTNKTTGNTDKRAFVETWQSFYRKKLKEVWKPAV

SEQ ID NO: 41387 - protein, 979 aa, synthetic construct
  REGION 1..979: note = engineered CasX variant
QEIGRINKIRRRLVKDSNTKKAGKTGPMKTLLVRVMTPDLRERLENLRKKPENIPQPISNTSRANLNKLLTDYTEMKKAILHVYWEEFQKDPVGLMSRVAQPASKKIDQNKLKPEMDEKGNLTTAGFACSQCGQPLFVYKLEQVSEKGKAYTNYFGRCNVAEHEKLILLAQLKPEKDSDEAVTYSLGKFGQRALDFYSIHVTKESTHPVKPLAQIAGNRYASHPVGKALSDACMGTIASFLSKYQDIIIEHQKVVKGNQKRLESLRELAGKENLEYPSVTLPPQPHTKEGVDAYNEVIARVRMWVNLNLWQKLKLSRDDAKPLLRLKGFPSFPLVERQANEVDWWDMVCNVKKLINEKKEDGKVFWQNLAGYKRQEALRPYLSSEEDRKKGKKFARYQLGDLLLHLEKKHGEDWGKVYDEAWERIDKKVEGLSKHIKLEEERRSEDAQSKAALTDWLRAKASFVIEGLKEADDKDEFCRCELKLQKWYGDLRGKPFAIEAENSILDISGFSKQYNCAFIWQKDGVKKLNLYLIINYFKGGKLRFKKIKPEAFEANRFYTVINKKSGEIVPMEVNFNFDDPNLIILPLAFGKRQGREFIWNDLLSLETGSLKLANGRVIEKTLYNRRTRQDEPALFVALTFERREVLDSSNIKPMNLIGVDRGENIPAVIALTDPEGCPLSRFKDSLGNPTHILRIGESYKEKQRTIQAKKEVEQRRAGGYSRKYASKAKNLADDMVRNTARDLLYYAVTQDAMLIFENLSRGFGRQGKRTFMAERQYTRMEDWLTAKLAYEGLPSKTYLSKTLAQYTSKTCSNCGFTITSADYDRVLEKLKKTATGWMTTINGKELKVEGQITYYNRYKRQNVVKDLSVELDRLSEESVNNDISSWTKGRSGEALSLLKKRFSHRPVQEKFVCLNCGFETHADEQAALNIARSWLFLRSQEYKKYQTNKTTGNTDKRAFVETWQSFYRKKLKEVWKPAV

SEQ ID NO: 41388 - protein, 979 aa, synthetic construct
  REGION 1..979: note = engineered CasX variant
QEIGRINKIRRRLVKDSNTKKAGKTGPMKTLLVRVMTPDLRERLENLRKKPENIPQPISNTSRANLNKLLTDYTEMKKAILHVYWEEFQKDPVGLMSRVAQPASKKIDQNKLKPEMDEKGNLTTAGFACSQCGQPLFVYKLEQVSEKGKAYTNYFGRCNVAEHEKLILLAQLKPEKDSDEAVTYSLGKFGQRALDFYSIHVTKESTHPVKPLAQIAGNRYASSPVGKALSDACMGTIASFLSKYQDIIIEHQKVVKGNQKRLESLRELAGKENLEYPSVTLPPQPHTKEGVDAYNEVIARVRMWVNLNLWQKLKLSRDDAKPLLRLKGFPSFPLVERQANEVDWWDMVCNVKKLINEKKEDGKVFWQNLAGYKRQEALRPYLSSEEDRKKGKKFARYQLGDLLLHLEKKHGEDWGKVYDEAWERIDKKVEGLSKHIKLEEERRSEDAQSKAALTDWLRAKASFVIEGLKEADDKDEFCRCELKLQKWYGDLRGKPFAIEAENSILDISGFSKQYNCAFIWQKDGVKKLNLYLIINYFKGGKLRFKKIKPEAFEANRFYTVINKKSGEIVPMEVNFNFDDPNLIILPLAFGKRQGREFIWNDLLSLETGSLKLANGRVIEKTLYNRRTRQDEPALFVALTFERREVLDSSNIKPMNLIGVDRGENIPAVIALTDPEGCPLSRFKDSLGNPTHILRIGESYKEKQRTIQAKKEVEQRRAGGYSRKYASKAKNLADDMVRNTARDLLYYAVTQDAMLIFENLSRGFGRQGKRTFMAERQYTRMEDWLTAKLAYEGLPSKTYLSKTLAQYTSKTCSNCGFTITSADYDRVLEKLKKTATGWMTTINGKELKVEGQITYYNRYKRQNVVKDLSVELDRLSEESVNNDISSWTKGRSGEALSLLKKRFSHRPVQEKFVCLNCGFETHADEQAALNIARSWLFLRSQEYKKYQTNKTTGNTDKRAFVETWQSFYRKKLKEVWKPAV

SEQ ID NO: 41389 - protein, 979 aa, synthetic construct
  REGION 1..979: note = engineered CasX variant
QEIGRINKIRRRLVKDSNTKKAGKTGPMKTLLVRVMTPDLRERLENLRKKPENIPQPISNTSRANLNKLLTDYTEMKKAILHVYWEEFQKDPVGLMSRVAQPASKKIDQNKLKPEMDEKGNLTTAGFACSQCGQPLFVYKLEQVSEKGKAYTNYFGRCNVAEHEKLILLAQLKPEKDSDEAVTYSLGKFGQRALDFYSIHVTKESTHPVKPLAQIAGNRYASTPVGKALSDACMGTIASFLSKYQDIIIEHQKVVKGNQKRLESLRELAGKENLEYPSVTLPPQPHTKEGVDAYNEVIARVRMWVNLNLWQKLKLSRDDAKPLLRLKGFPSFPLVERQANEVDWWDMVCNVKKLINEKKEDGKVFWQNLAGYKRQEALRPYLSSEEDRKKGKKFARYQLGDLLLHLEKKHGEDWGKVYDEAWERIDKKVEGLSKHIKLEEERRSEDAQSKAALTDWLRAKASFVIEGLKEADDKDEFCRCELKLQKWYGDLRGKPFAIEAENSILDISGFSKQYNCAFIWQKDGVKKLNLYLIINYFKGGKLRFKKIKPEAFEANRFYTVINKKSGEIVPMEVNFNFDDPNLIILPLAFGKRQGREFIWNDLLSLETGSLKLANGRVIEKTLYNRRTRQDEPALFVALTFERREVLDSSNIKPMNLIGVDRGENIPAVIALTDPEGCPLSRFKDSLGNPTHILRIGESYKEKQRTIQAKKEVEQRRAGGYSRKYASKAKNLADDMVRNTARDLLYYAVTQDAMLIFENLSRGFGRQGKRTFMAERQYTRMEDWLTAKLAYEGLPSKTYLSKTLAQYTSKTCSNCGFTITSADYDRVLEKLKKTATGWMTTINGKELKVEGQITYYNRYKRQNVVKDLSVELDRLSEESVNNDISSWTKGRSGEALSLLKKRFSHRPVQEKFVCLNCGFETHADEQAALNIARSWLFLRSQEYKKYQTNKTTGNTDKRAFVETWQSFYRKKLKEVWKPAV

SEQ ID NO: 41390 - protein, 979 aa, synthetic construct
  REGION 1..979: note = engineered CasX variant
QEIGRINKIRRRLVKDSNTKKAGKTGPMKTLLVRVMTPDLRERLENLRKKPENIPQPISNTSRANLNKLLTDYTEMKKAILHVYWEEFQKDPVGLMSRVAQPASKKIDQNKLKPEMDEKGNLTTAGFACSQCGQPLFVYKLEQVSEKGKAYTNYFGRCNVAEHEKLILLAQLKPEKDSDEAVTYSLGKFGQRALDFYSIHVTKESTHPVKPLAQIAGNRYASAPVGKALSDACMGTIASFLSKYQDIIIEHQKVVKGNQKRLESLRELAGKENLEYPSVTLPPQPHTKEGVDAYNEVIARVRMWVNLNLWQKLKLSRDDAKPLLRLKGFPSFPLVERQANEVDWWDMVCNVKKLINEKKEDGKVFWQNLAGYKRQEALRPYLSSEEDRKKGKKFARYQLGDLLLHLEKKHGEDWGKVYDEAWERIDKKVEGLSKHIKLEEERRSEDAQSKAALTDWLRAKASFVIEGLKEADDKDEFCRCELKLQKWYGDLRGKPFAIEAENSILDISGFSKQYNCAFIWQKDGVKKLNLYLIINYFKGGKLRFKKIKPEAFEANRFYTVINKKSGEIVPMEVNFNFDDPNLIILPLAFGKRQGREFIWNDLLSLETGSLKLANGRVIEKTLYNRRTRQDEPALFVALTFERREVLDSSNIKPMNLIGVDRGENIPAVIALTDPEGCPLSRFKDSLGNPTHILRIGESYKEKQRTIQAKKEVEQRRAGGYSRKYASKAKNLADDMVRNTARDLLYYAVTQDAMLIFENLSRGFGRQGKRTFMAERQYTRMEDWLTAKLAYEGLPSKTYLSKTLAQYTSKTCSNCGFTITSADYDRVLEKLKKTATGWMTTINGKELKVEGQITYYNRYKRQNVVKDLSVELDRLSEESVNNDISSWTKGRSGEALSLLKKRFSHRPVQEKFVCLNCGFETHADEQAALNIARSWLFLRSQEYKKYQTNKTTGNTDKRAFVETWQSFYRKKLKEVWKPAV

SEQ ID NO: 41391 - protein, 979 aa, synthetic construct
  REGION 1..979: note = engineered CasX variant
QEIGRINKIRRRLVKDSNTKKAGKTGPMKTLLVRVMTPDLRERLENLRKKPENIPQPISNTSRANLNKLLTDYTEMKKAILHVYWEEFQKDPVGLMSRVAQPASKKIDQNKLKPEMDEKGNLTTAGFACSQCGQPLFVYKLEQVSEKGKAYTNYFGRCNVAEHEKLILLAQLKPEKDSDEAVTYSLGKFGQRALDFYSIHVTKESTHPVKPLAQIAGNRYASVPVGKALSDACMGTIASFLSKYQDIIIEHQKVVKGNQKRLESLRELAGKENLEYPSVTLPPQPHTKEGVDAYNEVIARVRMWVNLNLWQKLKLSRDDAKPLLRLKGFPSFPLVERQANEVDWWDMVCNVKKLINEKKEDGKVFWQNLAGYKRQEALRPYLSSEEDRKKGKKFARYQLGDLLLHLEKKHGEDWGKVYDEAWERIDKKVEGLSKHIKLEEERRSEDAQSKAALTDWLRAKASFVIEGLKEADDKDEFCRCELKLQKWYGDLRGKPFAIEAENSILDISGFSKQYNCAFIWQKDGVKKLNLYLIINYFKGGKLRFKKIKPEAFEANRFYTVINKKSGEIVPMEVNFNFDDPNLIILPLAFGKRQGREFIWNDLLSLETGSLKLANGRVIEKTLYNRRTRQDEPALFVALTFERREVLDSSNIKPMNLIGVDRGENIPAVIALTDPEGCPLSRFKDSLGNPTHILRIGESYKEKQRTIQAKKEVEQRRAGGYSRKYASKAKNLADDMVRNTARDLLYYAVTQDAMLIFENLSRGFGRQGKRTFMAERQYTRMEDWLTAKLAYEGLPSKTYLSKTLAQYTSKTCSNCGFTITSADYDRVLEKLKKTATGWMTTINGKELKVEGQITYYNRYKRQNVVKDLSVELDRLSEESVNNDISSWTKGRSGEALSLLKKRFSHRPVQEKFVCLNCGFETHADEQAALNIARSWLFLRSQEYKKYQTNKTTGNTDKRAFVETWQSFYRKKLKEVWKPAV

SEQ ID NO: 41392 - protein, 979 aa, synthetic construct
  REGION 1..979: note = engineered CasX variant
QEIGRINKIRRRLVKDSNTKKAGKTGPMKTLLVRVMTPDLRERLENLRKKPENIPQPISNTSRANLNKLLTDYTEMKKAILHVYWEEFQKDPVGLMSRVAQPASKKIDQNKLKPEMDEKGNLTTAGFACSQCGQPLFVYKLEQVSEKGKAYTNYFGRCNVAEHEKLIKLAQLKPEKDSDEAVTYSLGKFGQRALDFYSIHVTKESTHPVKPLAQIAGNRYASGPVGKALSDACMGTIASFLSKYQDIIIEHQKVVKGNQKRLESLRELAGKENLEYPSVTLPPQPHTKEGVDAYNEVIARVRMWVNLNLWQKLKLSRDDAKPLLRLKGFPSFPLVERQANEVDWWDMVCNVKKLINEKKEDGKVFWQNLAGYKRQEALRPYLSSEEDRKKGKKFARYQLGDLLLHLEKKHGEDWGKVYDEAWERIDKKVEGLSKHIKLEEERRSEDAQSKAALTDWLRAKASFVIEGLKEADDKDEFCRCELKLQKWYGDLRGKPFAIEAENSILDISGFSKQYNCAFIWQKDGVKKLNLYLIINYFKGGKLRFKKIKPEAFEANRFYTVINKKSGEIVPMEVNFNFDDPNLIILPLAFGKRQGREFIWNDLLSLETGSLKLANGRVIEKTLYNRRTRQDEPALFVALTFERREVLDSSNIKPMNLIGVDRGENIPAVIALTDPEGCPLSRFKDSLGNPTHILRIGESYKEKQRTIQAKKEVEQRRAGGYSRKYASKAKNLADDMVRNTARDLLYYAVTQDAMLIFENLSRGFGRQGKRTFMAERQYTRMEDWLTAKLAYEGLPSKTYLSKTLAQYTSKTCSNCGFTITSADYDRVLEKLKKTATGWMTTINGKELKVEGQITYYNRYKRQNVVKDLSVELDRLSEESVNNDISSWTKGRSGEALSLLKKRFSHRPVQEKFVCLNCGFETHADEQAALNIARSWLFLRSQEYKKYQTNKTTGNTDKRAFVETWQSFYRKKLKEVWKPAV

SEQ ID NO: 41393 - protein, 978 aa, synthetic construct
  REGION 1..978: note = engineered CasX variant
QEIGRINKIRRRLVKDSNTKKAGKTGPMKTLLVRVMTPDLRERLENLRKKPENIPQPISNTSRANLNKLLTDYTEMKKAILHVYWEEFQKDPVGLMSRVAQPASKKIDQNKLKPEMDEKGNLTTAGFACSQCGQPLFVYKLEQVSEKGKAYTNYFGRCNVAEHEKLILLAQLKPEKDSDEAVTYSLGKFGQRALDFYSIHVTKESTHPVKPLAQIAGNRYASPVGKALSDACMGTIASFLSKYQDIIIEHQKVVKGNQKRLESLRELAGKENLEYPSVTLPPQPHTKEGVDAYNEVIARVRMWVNLNLWQKLKLSRDDAKPLLRLKGFPSFPLVERQANEVDWWDMVCNVKKLINEKKEDGKVFWQNLAGYKRQEALRPYLSSEEDRKKGKKFARYQLGDLLLHLEKKHGEDWGKVYDEAWERIDKKVEGLSKHIKLEEERRSEDAQSKAALTDWLRAKASFVIEGLKEADDKDEFCRCELKLQKWYGDLRGKPFAIEAENSILDISGFSKQYNCAFIWQKDGVKKLNLYLIINYFKGGKLRFKKIKPEAFEANRFYTVINKKSGEIVPMEVNFNFDDPNLIILPLAFGKRQGREFIWNDLLSLETGSLKLANGRVIEKTLYNRRTRQDEPALFVALTFERREVLDSSNIKPMNLIGVDRGENIPAVIALTDPEGCPLSRFKDSLGNPTHILRIGESYKEKQRTIQAKKEVEQRRAGGYSRKYASKAKNLADDMVRNTARDLLYYAVTQDAMLIFENLSRGFGRQGKRTFMAERQYTRMEDWLTAKLAYEGLPSKTYLSKTLAQYTSKTCSNCGFTITSADYDRVLEKLKKTATGWMTTINGKELKVEGQITYYNRYKRQNVVKDLSVELDRLSEESVNNDISSWTKGRSGEALSLLKKRFSHRPVQEKFVCLNCGFETHADEQAALNIARSWLFLRSQEYKKYQTNKTTGNTDKRAFVETWQSFYRKKLKEVWKPAV

SEQ ID NO: 41394 - protein, 979 aa, synthetic construct
  REGION 1..979: note = engineered CasX variant
QEIGRINKIRRRLVKDSNTKKAGKTGPMKTLLVRVMTPDLRERLENLRKKPENIPQPISNTSRANLNKLLTDYTEMKKAILHVYWEEFQKDPVGLMSRVAQPASKKIDQNKLKPEMDEKGNLTTAGFACSQCGQPLFVYKLEQVSEKGKAYTNYFGRCNVAEHEKLILLAQLKPEKDSDEAVTYSLGKFGQRALDFYSIHVTKESTHPVKPLAQIAGNRYASYPVGKALSDACMGTIASFLSKYQDIIIEHQKVVKGNQKRLESLRELAGKENLEYPSVTLPPQPHTKEGVDAYNEVIARVRMWVNLNLWQKLKLSRDDAKPLLRLKGFPSFPLVERQANEVDWWDMVCNVKKLINEKKEDGKVFWQNLAGYKRQEALRPYLSSEEDRKKGKKFARYQLGDLLLHLEKKHGEDWGKVYDEAWERIDKKVEGLSKHIKLEEERRSEDAQSKAALTDWLRAKASFVIEGLKEADKDEFCRCELKLQKWYGDLRGKPFAIEAENSILDISGFSKQYNCAFIWQKDGVKKLNLYLIINYFKGGKLRFKKIKPEAFEANRFYTVINKKSGEIVPMEVNFNFDDPNLIILPLAFGKRQGREFIWNDLLSLETGSLKLANGRVIEKTLYNRRTRQDEPALFVALTFERREVLDSSNIKPMNLIGVDRGENIPAVIALTDPEGCPLSRFKDSLGNPTHILRIGESYKEKQRTIQAKKEVEQRRAGGYSRKYASKAKNLADDMVRNTARDLLYYAVTQDAMLIFENLSRGFGRQGKRTFMAERQYTRMEDWLTAKLAYEGLPSKTYLSKTLAQYTSKTCSNCGFTITSADYDRVLEKLKKTATGWMTTINGKELKVEGQITYYNRYKRQNVVKDLSVELDRLSEESVNNDISSWTKGRSGNEALSLLKKRFSHRPVQEKFVCLNCGFETHADEQAALNIARSWLFLRSQEYKKYQTNKTTGNTDKRAFVETWQSFYRKKLKEVWKPAV

SEQ ID NO: 41395 - protein, 979 aa, synthetic construct
  REGION 1..979: note = engineered CasX variant
QEIGRINKIRRRLVKDSNTKKAGKTGPMKTLLVRVMTPDLRERLENLRKKPENIPQPISNTSRANLNKLLTDYTEMKKAILHVYWEEFQKDPVGLMSRVAQPASKKIDQNKLKPEMDEKGNLTTAGFACSQCGQPLFVYKLEQVSEKGKAYTNYFGRCNVAEHEKLILLAQLKPEKDSDEAVTYSLGKFGQRALDFYSIHVTKESTHPVKPLAQIAGNRYASHPVGKALSDACMGTIASFLSKYQDIIIEHQKVVKGNQKRLESLRELAGKENLEYPSVTLPPQPHTKEGVDAYNEVIARVRMWVNLNLWQKLKLSRDDAKPLLRLKGFPSFPLVERQANEVDWWDMVCNVKKLINEKKEDGKVFWQNLAGYKRQEALRPYLSSEEDRKKGKKFARYQLGDLLLHLEKKHGEDWGKVYDEAWERIDKKVEGLSKHIKLEEERRSEDAQSKAALTDWLRAKASFVIEGLKEADKDEFCRCELKLQKWYGDLRGKPFAIEAENSILDISGFSKQYNCAFIWQKDGVKKLNLYLIINYFKGGKLRFKKIKPEAFEANRFYTVINKKSGEIVPMEVNFNFDDPNLIILPLAFGKRQGREFIWNDLLSLETGSLKLANGRVIEKTLYNRRTRQDEPALFVALTFERREVLDSSNIKPMNLIGVDRGENIPAVIALTDPEGCPLSRFKDSLGNPTHILRIGESYKEKQRTIQAKKEVEQRRAGGYSRKYASKAKNLADDMVRNTARDLLYYAVTQDAMLIFENLSRGFGRQGKRTFMAERQYTRMEDWLTAKLAYEGLPSKTYLSKTLAQYTSKTCSNCGFTITSADYDRVLEKLKKTATGWMTTINGKELKVEGQITYYNRYKRQNVVKDLSVELDRLSEESVNNDISSWTKGRSGNEALSLLKKRFSHRPVQEKFVCLNCGFETHADEQAALNIARSWLFLRSQEYKKYQTNKTTGNTDKRAFVETWQSFYRKKLKEVWKPAV

SEQ ID NO: 41396 - protein, 979 aa, synthetic construct
  REGION 1..979: note = engineered CasX variant
QEIGRINKIRRRLVKDSNTKKAGKTGPMKTLLVRVMTPDLRERLENLRKKPENIPQPISNTSRANLNKLLTDYTEMKKAILHVYWEEFQKDPVGLMSRVAQPASKKIDQNKLKPEMDEKGNLTTAGFACSQCGQPLFVYKLEQVSEKGKAYTNYFGRCNVAEHEKLILLAQLKPEKDSDEAVTYSLGKFGQRALDFYSIHVTKESTHPVKPLAQIAGNRYASSPVGKALSDACMGTIASFLSKYQDIIIEHQKVVKGNQKRLESLRELAGKENLEYPSVTLPPQPHTKEGVDAYNEVIARVRMWVNLNLWQKLKLSRDDAKPLLRLKGFPSFPLVERQANEVDWWDMVCNVKKLINEKKEDGKVFWQNLAGYKRQEALRPYLSSEEDRKKGKKFARYQLGDLLLHLEKKHGEDWGKVYDEAWERIDKKVEGLSKHIKLEEERRSEDAQSKAALTDWLRAKASFVIEGLKEADKDEFCRCELKLQKWYGDLRGKPFAIEAENSILDISGFSKQYNCAFIWQKDGVKKLNLYLIINYFKGGKLRFKKIKPEAFEANRFYTVINKKSGEIVPMEVNFNFDDPNLIILPLAFGKRQGREFIWNDLLSLETGSLKLANGRVIEKTLYNRRTRQDEPALFVALTFERREVLDSSNIKPMNLIGVDRGENIPAVIALTDPEGCPLSRFKDSLGNPTHILRIGESYKEKQRTIQAKKEVEQRRAGGYSRKYASKAKNLADDMVRNTARDLLYYAVTQDAMLIFENLSRGFGRQGKRTFMAERQYTRMEDWLTAKLAYEGLPSKTYLSKTLAQYTSKTCSNCGFTITSADYDRVLEKLKKTATGWMTTINGKELKVEGQITYYNRYKRQNVVKDLSVELDRLSEESVNNDISSWTKGRSGNEALSLLKKRFSHRPVQEKFVCLNCGFETHADEQAALNIARSWLFLRSQEYKKYQTNKTTGNTDKRAFVETWQSFYRKKLKEVWKPAV

SEQ ID NO: 41397 - protein, 979 aa, synthetic construct
  REGION 1..979: note = engineered CasX variant
QEIGRINKIRRRLVKDSNTKKAGKTGPMKTLLVRVMTPDLRERLENLRKKPENIPQPISNTSRANLNKLLTDYTEMKKAILHVYWEEFQKDPVGLMSRVAQPASKKIDQNKLKPEMDEKGNLTTAGFACSQCGQPLFVYKLEQVSEKGKAYTNYFGRCNVAEHEKLILLAQLKPEKDSDEAVTYSLGKFGQRALDFYSIHVTKESTHPVKPLAQIAGNRYASTPVGKALSDACMGTIASFLSKYQDIIIEHQKVVKGNQKRLESLRELAGKENLEYPSVTLPPQPHTKEGVDAYNEVIARVRMWVNLNLWQKLKLSRDDAKPLLRLKGFPSFPLVERQANEVDWWDMVCNVKKLINEKKEDGKVFWQNLAGYKRQEALRPYLSSEEDRKKGKKFARYQLGDLLLHLEKKHGEDWGKVYDEAWERIDKKVEGLSKHIKLEEERRSEDAQSKAALTDWLRAKASFVIEGLKEADKDEFCRCELKLQKWYGDLRGKPFAIEAENSILDISGFSKQYNCAFIWQKDGVKKLNLYLIINYFKGGKLRFKKIKPEAFEANRFYTVINKKSGEIVPMEVNFNFDDPNLIILPLAFGKRQGREFIWNDLLSLETGSLKLANGRVIEKTLYNRRTRQDEPALFVALTFERREVLDSSNIKPMNLIGVDRGENIPAVIALTDPEGCPLSRFKDSLGNPTHILRIGESYKEKQRTIQAKKEVEQRRAGGYSRKYASKAKNLADDMVRNTARDLLYYAVTQDAMLIFENLSRGFGRQGKRTFMAERQYTRMEDWLTAKLAYEGLPSKTYLSKTLAQYTSKTCSNCGFTITSADYDRVLEKLKKTATGWMTTINGKELKVEGQITYYNRYKRQNVVKDLSVELDRLSEESVNNDISSWTKGRSGNEALSLLKKRFSHRPVQEKFVCLNCGFETHADEQAALNIARSWLFLRSQEYKKYQTNKTTGNTDKRAFVETWQSFYRKKLKEVWKPAV

SEQ ID NO: 41398 - protein, 979 aa, synthetic construct
  REGION 1..979: note = engineered CasX variant
QEIGRINKIRRRLVKDSNTKKAGKTGPMKTLLVRVMTPDLRERLENLRKKPENIPQPISNTSRANLNKLLTDYTEMKKAILHVYWEEFQKDPVGLMSRVAQPASKKIDQNKLKPEMDEKGNLTTAGFACSQCGQPLFVYKLEQVSEKGKAYTNYFGRCNVAEHEKLILLAQLKPEKDSDEAVTYSLGKFGQRALDFYSIHVTKESTHPVKPLAQIAGNRYASAPVGKALSDACMGTIASFLSKYQDIIIEHQKVVKGNQKRLESLRELAGKENLEYPSVTLPPQPHTKEGVDAYNEVIARVRMWVNLNLWQKLKLSRDDAKPLLRLKGFPSFPLVERQANEVDWWDMVCNVKKLINEKKEDGKVFWQNLAGYKRQEALRPYLSSEEDRKKGKKFARYQLGDLLLHLEKKHGEDWGKVYDEAWERIDKKVEGLSKHIKLEEERRSEDAQSKAALTDWLRAKASFVIEGLKEADKDEFCRCELKLQKWYGDLRGKPFAIEAENSILDISGFSKQYNCAFIWQKDGVKKLNLYLIINYFKGGKLRFKKIKPEAFEANRFYTVINKKSGEIVPMEVNFNFDDPNLIILPLAFGKRQGREFIWNDLLSLETGSLKLANGRVIEKTLYNRRTRQDEPALFVALTFERREVLDSSNIKPMNLIGVDRGENIPAVIALTDPEGCPLSRFKDSLGNPTHILRIGESYKEKQRTIQAKKEVEQRRAGGYSRKYASKAKNLADDMVRNTARDLLYYAVTQDAMLIFENLSRGFGRQGKRTFMAERQYTRMEDWLTAKLAYEGLPSKTYLSKTLAQYTSKTCSNCGFTITSADYDRVLEKLKKTATGWMTTINGKELKVEGQITYYNRYKRQNVVKDLSVELDRLSEESVNNDISSWTKGRSGNEALSLLKKRFSHRPVQEKFVCLNCGFETHADEQAALNIARSWLFLRSQEYKKYQTNKTTGNTDKRAFVETWQSFYRKKLKEVWKPAV

SEQ ID NO: 41399 - protein, 979 aa, synthetic construct
  REGION 1..979: note = engineered CasX variant
QEIGRINKIRRRLVKDSNTKKAGKTGPMKTLLVRVMTPDLRERLENLRKKPENIPQPISNTSRANLNKLLTDYTEMKKAILHVYWEEFQKDPVGLMSRVAQPASKKIDQNKLKPEMDEKGNLTTAGFACSQCGQPLFVYKLEQVSEKGKAYTNYFGRCNVAEHEKLILLAQLKPEKDSDEAVTYSLGKFGQRALDFYSIHVTKESTHPVKPLAQIAGNRYASVPVGKALSDACMGTIASFLSKYQDIIIEHQKVVKGNQKRLESLRELAGKENLEYPSVTLPPQPHTKEGVDAYNEVIARVRMWVNLNLWQKLKLSRDDAKPLLRLKGFPSFPLVERQANEVDWWDMVCNVKKLINEKKEDGKVFWQNLAGYKRQEALRPYLSSEEDRKKGKKFARYQLGDLLLHLEKKHGEDWGKVYDEAWERIDKKVEGLSKHIKLEEERRSEDAQSKAALTDWLRAKASFVIEGLKEADKDEFCRCELKLQKWYGDLRGKPFAIEAENSILDISGFSKQYNCAFIWQKDGVKKLNLYLIINYFKGGKLRFKKIKPEAFEANRFYTVINKKSGEIVPMEVNFNFDDPNLIILPLAFGKRQGREFIWNDLLSLETGSLKLANGRVIEKTLYNRRTRQDEPALFVALTFERREVLDSSNIKPMNLIGVDRGENIPAVIALTDPEGCPLSRFKDSLGNPTHILRIGESYKEKQRTIQAKKEVEQRRAGGYSRKYASKAKNLADDMVRNTARDLLYYAVTQDAMLIFENLSRGFGRQGKRTFMAERQYTRMEDWLTAKLAYEGLPSKTYLSKTLAQYTSKTCSNCGFTITSADYDRVLEKLKKTATGWMTTINGKELKVEGQITYYNRYKRQNVVKDLSVELDRLSEESVNNDISSWTKGRSGNEALSLLKKRFSHRPVQEKFVCLNCGFETHADEQAALNIARSWLFLRSQEYKKYQTNKTTGNTDKRAFVETWQSFYRKKLKEVWKPAV

SEQ ID NO: 41400 - protein, 979 aa, synthetic construct
  REGION 1..979: note = engineered CasX variant
QEIGRINKIRRRLVKDSNTKKAGKTGPMKTLLVRVMTPDLRERLENLRKKPENIPQPISNTSRANLNKLLTDYTEMKKAILHVYWEEFQKDPVGLMSRVAQPASKKIDQNKLKPEMDEKGNLTTAGFACSQCGQPLFVYKLEQVSEKGKAYTNYFGRCNVAEHEKLIKLAQLKPEKDSDEAVTYSLGKFGQRALDFYSIHVTKESTHPVKPLAQIAGNRYASGPVGKALSDACMGTIASFLSKYQDIIIEHQKVVKGNQKRLESLRELAGKENLEYPSVTLPPQPHTKEGVDAYNEVIARVRMWVNLNLWQKLKLSRDDAKPLLRLKGFPSFPLVERQANEVDWWDMVCNVKKLINEKKEDGKVFWQNLAGYKRQEALRPYLSSEEDRKKGKKFARYQLGDLLLHLEKKHGEDWGKVYDEAWERIDKKVEGLSKHIKLEEERRSEDAQSKAALTDWLRAKASFVIEGLKEADKDEFCRCELKLQKWYGDLRGKPFAIEAENSILDISGFSKQYNCAFIWQKDGVKKLNLYLIINYFKGGKLRFKKIKPEAFEANRFYTVINKKSGEIVPMEVNFNFDDPNLIILPLAFGKRQGREFIWNDLLSLETGSLKLANGRVIEKTLYNRRTRQDEPALFVALTFERREVLDSSNIKPMNLIGVDRGENIPAVIALTDPEGCPLSRFKDSLGNPTHILRIGESYKEKQRTIQAKKEVEQRRAGGYSRKYASKAKNLADDMVRNTARDLLYYAVTQDAMLIFENLSRGFGRQGKRTFMAERQYTRMEDWLTAKLAYEGLPSKTYLSKTLAQYTSKTCSNCGFTITSADYDRVLEKLKKTATGWMTTINGKELKVEGQITYYNRYKRQNVVKDLSVELDRLSEESVNNDISSWTKGRSGNEALSLLKKRFSHRPVQEKFVCLNCGFETHADEQAALNIARSWLFLRSQEYKKYQTNKTTGNTDKRAFVETWQSFYRKKLKEVWKPAV

SEQ ID NO: 41401 - protein, 978 aa, synthetic construct
  REGION 1..978: note = engineered CasX variant
QEIGRINKIRRRLVKDSNTKKAGKTGPMKTLLVRVMTPDLRERLENLRKKPENIPQPISNTSRANLNKLLTDYTEMKKAILHVYWEEFQKDPVGLMSRVAQPASKKIDQNKLKPEMDEKGNLTTAGFACSQCGQPLFVYKLEQVSEKGKAYTNYFGRCNVAEHEKLILLAQLKPEKDSDEAVTYSLGKFGQRALDFYSIHVTKESTHPVKPLAQIAGNRYASPVGKALSDACMGTIASFLSKYQDIIIEHQKVVKGNQKRLESLRELAGKENLEYPSVTLPPQPHTKEGVDAYNEVIARVRMWVNLNLWQKLKLSRDDAKPLLRLKGFPSFPLVERQANEVDWWDMVCNVKKLINEKKEDGKVFWQNLAGYKRQEALRPYLSSEEDRKKGKKFARYQLGDLLLHLEKKHGEDWGKVYDEAWERIDKKVEGLSKHIKLEEERRSEDAQSKAALTDWLRAKASFVIEGLKEADKDEFCRCELKLQKWYGDLRGKPFAIEAENSILDISGFSKQYNCAFIWQKDGVKKLNLYLIINYFKGGKLRFKKIKPEAFEANRFYTVINKKSGEIVPMEVNFNFDDPNLIILPLAFGKRQGREFIWNDLLSLETGSLKLANGRVIEKTLYNRRTRQDEPALFVALTFERREVLDSSNIKPMNLIGVDRGENIPAVIALTDPEGCPLSRFKDSLGNPTHILRIGESYKEKQRTIQAKKEVEQRRAGGYSRKYASKAKNLADDMVRNTARDLLYYAVTQDAMLIFENLSRGFGRQGKRTFMAERQYTRMEDWLTAKLAYEGLPSKTYLSKTLAQYTSKTCSNCGFTITSADYDRVLEKLKKTATGWMTTINGKELKVEGQITYYNRYKRQNVVKDLSVELDRLSEESVNNDISSWTKGRSGNEALSLLKKRFSHRPVQEKFVCLNCGFETHADEQAALNIARSWLFLRSQEYKKYQTNKTTGNTDKRAFVETWQSFYRKKLKEVWKPAV

SEQ ID NO: 41402 - protein, 978 aa, synthetic construct
  REGION 1..978: note = engineered CasX variant
QEIGRINKIRRRLVKDSNTKKAGKTGPMKTLLVRVMTPDLRERLENLRKKPENIPQPISNTSRANLNKLLTDYTEMKKAILHVYWEEFQKDPVGLMSRVAQPASKKIDQNKLKPEMDEKGNLTTAGFACSQCGQPLFVYKLEQVSEKGKAYTNYFGRCNVAEHEKLILLAQLKPEKDSDEAVTYSLGKFGQRALDFYSIHVTKESTHPVKPLAQIAGNRYASYPVGKALSDACMGTIASFLSKYQDIIIEHQKVVKGNQKRLESLRELAGKENLEYPSVTLPPQPHTKEGVDAYNEVIARVRMWVNLNLWQKLKLSRDDAKPLLRLKGFPSFPLVERQANEVDWWDMVCNVKKLINEKKEDGKVFWQNLAGYKRQEALRPYLSSEEDRQKGKKFARYQLGDLLLHLEKKHGEDWGKVYDEAWERIDKKVEGLSKHIKLEEERRSEDAQSKAALTDWLRAKASFVIEGLKEADKDEFCRCELKLQKWYGDLRGKPFAIEAENSILDISGFSKQYNCAFIWQKDGVKKLNLYLIINYFKGGKLRFKKIKPEAFEANRFYTVINKKSGEIVPMEVNFNFDDPNLIILPLAFGKRQGREFIWNDLLSLETGSLKLANGRVIEKTLYNRRTRQDEPALFVALTFERREVLDSSNIKPMNLIGVDRGENIPAVIALTDPEGCPLSRFKDSLGNPTHILRIGESYKEKQRTIQAKKEVEQRRAGGYSRKYASKAKNLADDMVRNTARDLLYYAVTQDAMLIFENLSRGFGRQGKRTFMAERQYTRMEDWLTAKLAYEGLPSKTYLSKTLAQYTSKTCSNCGFTITSADYDRVLEKLKKTATGWMTTINGKELKVEGQITYYNRYKRQNVVKDLSVELDRLSEESVNNDISSWTKGRSGEALSLLKKRFSHRPVQEKFVCLNCGFETHADEQAALNIARSWLFLRSQEYKKYQTNKTTGNTDKRAFVETWQSFYRKKLKEVWKPAV

SEQ ID NO: 41403 - protein, 978 aa, synthetic construct
  REGION 1..978: note = engineered CasX variant
QEIGRINKIRRRLVKDSNTKKAGKTGPMKTLLVRVMTPDLRERLENLRKKPENIPQPISNTSRANLNKLLTDYTEMKKAILHVYWEEFQKDPVGLMSRVAQPASKKIDQNKLKPEMDEKGNLTTAGFACSQCGQPLFVYKLEQVSEKGKAYTNYFGRCNVAEHEKLILLAQLKPEKDSDEAVTYSLGKFGQRALDFYSIHVTKESTHPVKPLAQIAGNRYASHPVGKALSDACMGTIASFLSKYQDIIIEHQKVVKGNQKRLESLRELAGKENLEYPSVTLPPQPHTKEGVDAYNEVIARVRMWVNLNLWQKLKLSRDDAKPLLRLKGFPSFPLVERQANEVDWWDMVCNVKKLINEKKEDGKVFWQNLAGYKRQEALRPYLSSEEDRQKGKKFARYQLGDLLLHLEKKHGEDWGKVYDEAWERIDKKVEGLSKHIKLEEERRSEDAQSKAALTDWLRAKASFVIEGLKEADKDEFCRCELKLQKWYGDLRGKPFAIEAENSILDISGFSKQYNCAFIWQKDGVKKLNLYLIINYFKGGKLRFKKIKPEAFEANRFYTVINKKSGEIVPMEVNFNFDDPNLIILPLAFGKRQGREFIWNDLLSLETGSLKLANGRVIEKTLYNRRTRQDEPALFVALTFERREVLDSSNIKPMNLIGVDRGENIPAVIALTDPEGCPLSRFKDSLGNPTHILRIGESYKEKQRTIQAKKEVEQRRAGGYSRKYASKAKNLADDMVRNTARDLLYYAVTQDAMLIFENLSRGFGRQGKRTFMAERQYTRMEDWLTAKLAYEGLPSKTYLSKTLAQYTSKTCSNCGFTITSADYDRVLEKLKKTATGWMTTINGKELKVEGQITYYNRYKRQNVVKDLSVELDRLSEESVNNDISSWTKGRSGEALSLLKKRFSHRPVQEKFVCLNCGFETHADEQAALNIARSWLFLRSQEYKKYQTNKTTGNTDKRAFVETWQSFYRKKLKEVWKPAV

SEQ ID NO: 41404 - protein, 978 aa, synthetic construct
  REGION 1..978: note = engineered CasX variant
QEIGRINKIRRRLVKDSNTKKAGKTGPMKTLLVRVMTPDLRERLENLRKKPENIPQPISNTSRANLNKLLTDYTEMKKAILHVYWEEFQKDPVGLMSRVAQPASKKIDQNKLKPEMDEKGNLTTAGFACSQCGQPLFVYKLEQVSEKGKAYTNYFGRCNVAEHEKLILLAQLKPEKDSDEAVTYSLGKFGQRALDFYSIHVTKESTHPVKPLAQIAGNRYASSPVGKALSDACMGTIASFLSKYQDIIIEHQKVVKGNQKRLESLRELAGKENLEYPSVTLPPQPHTKEGVDAYNEVIARVRMWVNLNLWQKLKLSRDDAKPLLRLKGFPSFPLVERQANEVDWWDMVCNVKKLINEKKEDGKVFWQNLAGYKRQEALRPYLSSEEDRQKGKKFARYQLGDLLLHLEKKHGEDWGKVYDEAWERIDKKVEGLSKHIKLEEERRSEDAQSKAALTDWLRAKASFVIEGLKEADKDEFCRCELKLQKWYGDLRGKPFAIEAENSILDISGFSKQYNCAFIWQKDGVKKLNLYLIINYFKGGKLRFKKIKPEAFEANRFYTVINKKSGEIVPMEVNFNFDDPNLIILPLAFGKRQGREFIWNDLLSLETGSLKLANGRVIEKTLYNRRTRQDEPALFVALTFERREVLDSSNIKPMNLIGVDRGENIPAVIALTDPEGCPLSRFKDSLGNPTHILRIGESYKEKQRTIQAKKEVEQRRAGGYSRKYASKAKNLADDMVRNTARDLLYYAVTQDAMLIFENLSRGFGRQGKRTFMAERQYTRMEDWLTAKLAYEGLPSKTYLSKTLAQYTSKTCSNCGFTITSADYDRVLEKLKKTATGWMTTINGKELKVEGQITYYNRYKRQNVVKDLSVELDRLSEESVNNDISSWTKGRSGEALSLLKKRFSHRPVQEKFVCLNCGFETHADEQAALNIARSWLFLRSQEYKKYQTNKTTGNTDKRAFVETWQSFYRKKLKEVWKPAV

SEQ ID NO: 41405 - protein, 978 aa, synthetic construct
  REGION 1..978: note = engineered CasX variant
QEIGRINKIRRRLVKDSNTKKAGKTGPMKTLLVRVMTPDLRERLENLRKKPENIPQPISNTSRANLNKLLTDYTEMKKAILHVYWEEFQKDPVGLMSRVAQPASKKIDQNKLKPEMDEKGNLTTAGFACSQCGQPLFVYKLEQVSEKGKAYTNYFGRCNVAEHEKLILLAQLKPEKDSDEAVTYSLGKFGQRALDFYSIHVTKESTHPVKPLAQIAGNRYASTPVGKALSDACMGTIASFLSKYQDIIIEHQKVVKGNQKRLESLRELAGKENLEYPSVTLPPQPHTKEGVDAYNEVIARVRMWVNLNLWQKLKLSRDDAKPLLRLKGFPSFPLVERQANEVDWWDMVCNVKKLINEKKEDGKVFWQNLAGYKRQEALRPYLSSEEDRQKGKKFARYQLGDLLLHLEKKHGEDWGKVYDEAWERIDKKVEGLSKHIKLEEERRSEDAQSKAALTDWLRAKASFVIEGLKEADKDEFCRCELKLQKWYGDLRGKPFAIEAENSILDISGFSKQYNCAFIWQKDGVKKLNLYLIINYFKGGKLRFKKIKPEAFEANRFYTVINKKSGEIVPMEVNFNFDDPNLIILPLAFGKRQGREFIWNDLLSLETGSLKLANGRVIEKTLYNRRTRQDEPALFVALTFERREVLDSSNIKPMNLIGVDRGENIPAVIALTDPEGCPLSRFKDSLGNPTHILRIGESYKEKQRTIQAKKEVEQRRAGGYSRKYASKAKNLADDMVRNTARDLLYYAVTQDAMLIFENLSRGFGRQGKRTFMAERQYTRMEDWLTAKLAYEGLPSKTYLSKTLAQYTSKTCSNCGFTITSADYDRVLEKLKKTATGWMTTINGKELKVEGQITYYNRYKRQNVVKDLSVELDRLSEESVNNDISSWTKGRSGEALSLLKKRFSHRPVQEKFVCLNCGFETHADEQAALNIARSWLFLRSQEYKKYQTNKTTGNTDKRAFVETWQSFYRKKLKEVWKPAV

SEQ ID NO: 41406 - protein, 978 aa, synthetic construct
  REGION 1..978: note = engineered CasX variant
QEIGRINKIRRRLVKDSNTKKAGKTGPMKTLLVRVMTPDLRERLENLRKKPENIPQPISNTSRANLNKLLTDYTEMKKAILHVYWEEFQKDPVGLMSRVAQPASKKIDQNKLKPEMDEKGNLTTAGFACSQCGQPLFVYKLEQVSEKGKAYTNYFGRCNVAEHEKLILLAQLKPEKDSDEAVTYSLGKFGQRALDFYSIHVTKESTHPVKPLAQIAGNRYASAPVGKALSDACMGTIASFLSKYQDIIIEHQKVVKGNQKRLESLRELAGKENLEYPSVTLPPQPHTKEGVDAYNEVIARVRMWVNLNLWQKLKLSRDDAKPLLRLKGFPSFPLVERQANEVDWWDMVCNVKKLINEKKEDGKVFWQNLAGYKRQEALRPYLSSEEDRQKGKKFARYQLGDLLLHLEKKHGEDWGKVYDEAWERIDKKVEGLSKHIKLEEERRSEDAQSKAALTDWLRAKASFVIEGLKEADKDEFCRCELKLQKWYGDLRGKPFAIEAENSILDISGFSKQYNCAFIWQKDGVKKLNLYLIINYFKGGKLRFKKIKPEAFEANRFYTVINKKSGEIVPMEVNFNFDDPNLIILPLAFGKRQGREFIWNDLLSLETGSLKLANGRVIEKTLYNRRTRQDEPALFVALTFERREVLDSSNIKPMNLIGVDRGENIPAVIALTDPEGCPLSRFKDSLGNPTHILRIGESYKEKQRTIQAKKEVEQRRAGGYSRKYASKAKNLADDMVRNTARDLLYYAVTQDAMLIFENLSRGFGRQGKRTFMAERQYTRMEDWLTAKLAYEGLPSKTYLSKTLAQYTSKTCSNCGFTITSADYDRVLEKLKKTATGWMTTINGKELKVEGQITYYNRYKRQNVVKDLSVELDRLSEESVNNDISSWTKGRSGEALSLLKKRFSHRPVQEKFVCLNCGFETHADEQAALNIARSWLFLRSQEYKKYQTNKTTGNTDKRAFVETWQSFYRKKLKEVWKPAV

SEQ ID NO: 41407 - protein, 978 aa, synthetic construct
  REGION 1..978: note = engineered CasX variant
QEIGRINKIRRRLVKDSNTKKAGKTGPMKTLLVRVMTPDLRERLENLRKKPENIPQPISNTSRANLNKLLTDYTEMKKAILHVYWEEFQKDPVGLMSRVAQPASKKIDQNKLKPEMDEKGNLTTAGFACSQCGQPLFVYKLEQVSEKGKAYTNYFGRCNVAEHEKLILLAQLKPEKDSDEAVTYSLGKFGQRALDFYSIHVTKESTHPVKPLAQIAGNRYASVPVGKALSDACMGTIASFLSKYQDIIIEHQKVVKGNQKRLESLRELAGKENLEYPSVTLPPQPHTKEGVDAYNEVIARVRMWVNLNLWQKLKLSRDDAKPLLRLKGFPSFPLVERQANEVDWWDMVCNVKKLINEKKEDGKVFWQNLAGYKRQEALRPYLSSEEDRQKGKKFARYQLGDLLLHLEKKHGEDWGKVYDEAWERIDKKVEGLSKHIKLEEERRSEDAQSKAALTDWLRAKASFVIEGLKEADKDEFCRCELKLQKWYGDLRGKPFAIEAENSILDISGFSKQYNCAFIWQKDGVKKLNLYLIINYFKGGKLRFKKIKPEAFEANRFYTVINKKSGEIVPMEVNFNFDDPNLIILPLAFGKRQGREFIWNDLLSLETGSLKLANGRVIEKTLYNRRTRQDEPALFVALTFERREVLDSSNIKPMNLIGVDRGENIPAVIALTDPEGCPLSRFKDSLGNPTHILRIGESYKEKQRTIQAKKEVEQRRAGGYSRKYASKAKNLADDMVRNTARDLLYYAVTQDAMLIFENLSRGFGRQGKRTFMAERQYTRMEDWLTAKLAYEGLPSKTYLSKTLAQYTSKTCSNCGFTITSADYDRVLEKLKKTATGWMTTINGKELKVEGQITYYNRYKRQNVVKDLSVELDRLSEESVNNDISSWTKGRSGEALSLLKKRFSHRPVQEKFVCLNCGFETHADEQAALNIARSWLFLRSQEYKKYQTNKTTGNTDKRAFVETWQSFYRKKLKEVWKPAV

SEQ ID NO: 41408 - protein, 978 aa, synthetic construct
  REGION 1..978: note = engineered CasX variant
QEIGRINKIRRRLVKDSNTKKAGKTGPMKTLLVRVMTPDLRERLENLRKKPENIPQPISNTSRANLNKLLTDYTEMKKAILHVYWEEFQKDPVGLMSRVAQPASKKIDQNKLKPEMDEKGNLTTAGFACSQCGQPLFVYKLEQVSEKGKAYTNYFGRCNVAEHEKLIKLAQLKPEKDSDEAVTYSLGKFGQRALDFYSIHVTKESTHPVKPLAQIAGNRYASGPVGKALSDACMGTIASFLSKYQDIIIEHQKVVKGNQKRLESLRELAGKENLEYPSVTLPPQPHTKEGVDAYNEVIARVRMWVNLNLWQKLKLSRDDAKPLLRLKGFPSFPLVERQANEVDWWDMVCNVKKLINEKKEDGKVFWQNLAGYKRQEALRPYLSSEEDRQKGKKFARYQLGDLLLHLEKKHGEDWGKVYDEAWERIDKKVEGLSKHIKLEEERRSEDAQSKAALTDWLRAKASFVIEGLKEADKDEFCRCELKLQKWYGDLRGKPFAIEAENSILDISGFSKQYNCAFIWQKDGVKKLNLYLIINYFKGGKLRFKKIKPEAFEANRFYTVINKKSGEIVPMEVNFNFDDPNLIILPLAFGKRQGREFIWNDLLSLETGSLKLANGRVIEKTLYNRRTRQDEPALFVALTFERREVLDSSNIKPMNLIGVDRGENIPAVIALTDPEGCPLSRFKDSLGNPTHILRIGESYKEKQRTIQAKKEVEQRRAGGYSRKYASKAKNLADDMVRNTARDLLYYAVTQDAMLIFENLSRGFGRQGKRTFMAERQYTRMEDWLTAKLAYEGLPSKTYLSKTLAQYTSKTCSNCGFTITSADYDRVLEKLKKTATGWMTTINGKELKVEGQITYYNRYKRQNVVKDLSVELDRLSEESVNNDISSWTKGRSGEALSLLKKRFSHRPVQEKFVCLNCGFETHADEQAALNIARSWLFLRSQEYKKYQTNKTTGNTDKRAFVETWQSFYRKKLKEVWKPAV

SEQ ID NO: 41409 - protein, 977 aa, synthetic construct
  REGION 1..977: note = engineered CasX variant
QEIGRINKIRRRLVKDSNTKKAGKTGPMKTLLVRVMTPDLRERLENLRKKPENIPQPISNTSRANLNKLLTDYTEMKKAILHVYWEEFQKDPVGLMSRVAQPASKKIDQNKLKPEMDEKGNLTTAGFACSQCGQPLFVYKLEQVSEKGKAYTNYFGRCNVAEHEKLILLAQLKPEKDSDEAVTYSLGKFGQRALDFYSIHVTKESTHPVKPLAQIAGNRYASPVGKALSDACMGTIASFLSKYQDIIIEHQKVVKGNQKRLESLRELAGKENLEYPSVTLPPQPHTKEGVDAYNEVIARVRMWVNLNLWQKLKLSRDDAKPLLRLKGFPSFPLVERQANEVDWWDMVCNVKKLINEKKEDGKVFWQNLAGYKRQEALRPYLSSEEDRQKGKKFARYQLGDLLLHLEKKHGEDWGKVYDEAWERIDKKVEGLSKHIKLEEERRSEDAQSKAALTDWLRAKASFVIEGLKEADKDEFCRCELKLQKWYGDLRGKPFAIEAENSILDISGFSKQYNCAFIWQKDGVKKLNLYLIINYFKGGKLRFKKIKPEAFEANRFYTVINKKSGEIVPMEVNFNFDDPNLIILPLAFGKRQGREFIWNDLLSLETGSLKLANGRVIEKTLYNRRTRQDEPALFVALTFERREVLDSSNIKPMNLIGVDRGENIPAVIALTDPEGCPLSRFKDSLGNPTHILRIGESYKEKQRTIQAKKEVEQRRAGGYSRKYASKAKNLADDMVRNTARDLLYYAVTQDAMLIFENLSRGFGRQGKRTFMAERQYTRMEDWLTAKLAYEGLPSKTYLSKTLAQYTSKTCSNCGFTITSADYDRVLEKLKKTATGWMTTINGKELKVEGQITYYNRYKRQNVVKDLSVELDRLSEESVNNDISSWTKGRSGEALSLLKKRFSHRPVQEKFVCLNCGFETHADEQAALNIARSWLFLRSQEYKKYQTNKTTGNTDKRAFVETWQSFYRKKLKEVWKPAV

SEQ ID NO: 41410 - protein, 978 aa, synthetic construct
  REGION 1..978: note = engineered CasX variant
QEIGRINKIRRRLVKDSNTKKAGKTGPMKTLLVRVMTPDLRERLENLRKKPENIPQPISNTSRANLNKLLTDYTEMKKAILHVYWEEFQKDPVGLMSRVAQPASKKIDQNKLKPEMDEKGNLTTAGFACSQCGQPLFVYKLEQVSEKGKAYTNYFGRCNVAEHEKLILLAQLKPEKDSDEAVTYSLGKFGQRALDFYSIHVTKESTHPVKPLAQIAGNRYASYPVGKALSDACMGTIASFLSKYQDIIIEHQKVVKGNQKRLESLRELAGKENLEYPSVTLPPQPHTKEGVDAYNEVIARVRMWVNLNLWQKLKLSRDDAKPLLRLKGFPSFPLVERQANEVDWWDMVCNVKKLINEKKEDGKVFWQNLAGYKRQEALRPYLSSEEDRKKGKKFARYQLGDLLLHLEKKHGEDWGKVYDEAWERIDKKVEGLSKHIKLEEERRSEDAQSKAALTDWLRAKASFVIEGLKEADKDEFCRCELKLQKWYGDLRGKPFAIEAENSILDISGFSKQYNCAFIWQKDGVKKLNLYLIINYFKGGKLRFKKIKPEAFEANRFYTVINKKSGEIVPMEVNFNFDDPNLIILPLAFGKRQGREFIWNDLLSLETGSLKLANGRVIEKTLYNRRTRQDEPALFVALTFERREVLDSSNIKPMNLIGVDRGENIPAVIALTDPEGCPLSRFKDSLGNPTHILRIGESYKEKQRTIQAKKEVEQRRAGGYSRKYASKAKNLADDMVRNTARDLLYYAVTQDAMLIFENLSRGFGRQGKRTFMAERQYTRMEDWLTAKLAYEGLPSQTYLSKTLAQYTSKTCSNCGFTITSADYDRVLEKLKKTATGWMTTINGKELKVEGQITYYNRYKRQNVVKDLSVELDRLSEESVNNDISSWTKGRSGEALSLLKKRFSHRPVQEKFVCLNCGFETHADEQAALNIARSWLFLRSQEYKKYQTNKTTGNTDKRAFVETWQSFYRKKLKEVWKPAV

SEQ ID NO: 41411 - protein, 978 aa, synthetic construct
  REGION 1..978: note = engineered CasX variant
QEIGRINKIRRRLVKDSNTKKAGKTGPMKTLLVRVMTPDLRERLENLRKKPENIPQPISNTSRANLNKLLTDYTEMKKAILHVYWEEFQKDPVGLMSRVAQPASKKIDQNKLKPEMDEKGNLTTAGFACSQCGQPLFVYKLEQVSEKGKAYTNYFGRCNVAEHEKLILLAQLKPEKDSDEAVTYSLGKFGQRALDFYSIHVTKESTHPVKPLAQIAGNRYASHPVGKALSDACMGTIASFLSKYQDIIIEHQKVVKGNQKRLESLRELAGKENLEYPSVTLPPQPHTKEGVDAYNEVIARVRMWVNLNLWQKLKLSRDDAKPLLRLKGFPSFPLVERQANEVDWWDMVCNVKKLINEKKEDGKVFWQNLAGYKRQEALRPYLSSEEDRKKGKKFARYQLGDLLLHLEKKHGEDWGKVYDEAWERIDKKVEGLSKHIKLEEERRSEDAQSKAALTDWLRAKASFVIEGLKEADKDEFCRCELKLQKWYGDLRGKPFAIEAENSILDISGFSKQYNCAFIWQKDGVKKLNLYLIINYFKGGKLRFKKIKPEAFEANRFYTVINKKSGEIVPMEVNFNFDDPNLIILPLAFGKRQGREFIWNDLLSLETGSLKLANGRVIEKTLYNRRTRQDEPALFVALTFERREVLDSSNIKPMNLIGVDRGENIPAVIALTDPEGCPLSRFKDSLGNPTHILRIGESYKEKQRTIQAKKEVEQRRAGGYSRKYASKAKNLADDMVRNTARDLLYYAVTQDAMLIFENLSRGFGRQGKRTFMAERQYTRMEDWLTAKLAYEGLPSQTYLSKTLAQYTSKTCSNCGFTITSADYDRVLEKLKKTATGWMTTINGKELKVEGQITYYNRYKRQNVVKDLSVELDRLSEESVNNDISSWTKGRSGEALSLLKKRFSHRPVQEKFVCLNCGFETHADEQAALNIARSWLFLRSQEYKKYQTNKTTGNTDKRAFVETWQSFYRKKLKEVWKPAV

SEQ ID NO: 41412 - protein, 978 aa, synthetic construct
  REGION 1..978: note = engineered CasX variant
QEIGRINKIRRRLVKDSNTKKAGKTGPMKTLLVRVMTPDLRERLENLRKKPENIPQPISNTSRANLNKLLTDYTEMKKAILHVYWEEFQKDPVGLMSRVAQPASKKIDQNKLKPEMDEKGNLTTAGFACSQCGQPLFVYKLEQVSEKGKAYTNYFGRCNVAEHEKLILLAQLKPEKDSDEAVTYSLGKFGQRALDFYSIHVTKESTHPVKPLAQIAGNRYASSPVGKALSDACMGTIASFLSKYQDIIIEHQKVVKGNQKRLESLRELAGKENLEYPSVTLPPQPHTKEGVDAYNEVIARVRMWVNLNLWQKLKLSRDDAKPLLRLKGFPSFPLVERQANEVDWWDMVCNVKKLINEKKEDGKVFWQNLAGYKRQEALRPYLSSEEDRKKGKKFARYQLGDLLLHLEKKHGEDWGKVYDEAWERIDKKVEGLSKHIKLEEERRSEDAQSKAALTDWLRAKASFVIEGLKEADKDEFCRCELKLQKWYGDLRGKPFAIEAENSILDISGFSKQYNCAFIWQKDGVKKLNLYLIINYFKGGKLRFKKIKPEAFEANRFYTVINKKSGEIVPMEVNFNFDDPNLIILPLAFGKRQGREFIWNDLLSLETGSLKLANGRVIEKTLYNRRTRQDEPALFVALTFERREVLDSSNIKPMNLIGVDRGENIPAVIALTDPEGCPLSRFKDSLGNPTHILRIGESYKEKQRTIQAKKEVEQRRAGGYSRKYASKAKNLADDMVRNTARDLLYYAVTQDAMLIFENLSRGFGRQGKRTFMAERQYTRMEDWLTAKLAYEGLPSQTYLSKTLAQYTSKTCSNCGFTITSADYDRVLEKLKKTATGWMTTINGKELKVEGQITYYNRYKRQNVVKDLSVELDRLSEESVNNDISSWTKGRSGEALSLLKKRFSHRPVQEKFVCLNCGFETHADEQAALNIARSWLFLRSQEYKKYQTNKTTGNTDKRAFVETWQSFYRKKLKEVWKPAV

SEQ ID NO: 41413 - protein, 978 aa, synthetic construct
  REGION 1..978: note = engineered CasX variant
QEIGRINKIRRRLVKDSNTKKAGKTGPMKTLLVRVMTPDLRERLENLRKKPENIPQPISNTSRANLNKLLTDYTEMKKAILHVYWEEFQKDPVGLMSRVAQPASKKIDQNKLKPEMDEKGNLTTAGFACSQCGQPLFVYKLEQVSEKGKAYTNYFGRCNVAEHEKLILLAQLKPEKDSDEAVTYSLGKFGQRALDFYSIHVTKESTHPVKPLAQIAGNRYASTPVGKALSDACMGTIASFLSKYQDIIIEHQKVVKGNQKRLESLRELAGKENLEYPSVTLPPQPHTKEGVDAYNEVIARVRMWVNLNLWQKLKLSRDDAKPLLRLKGFPSFPLVERQANEVDWWDMVCNVKKLINEKKEDGKVFWQNLAGYKRQEALRPYLSSEEDRKKGKKFARYQLGDLLLHLEKKHGEDWGKVYDEAWERIDKKVEGLSKHIKLEEERRSEDAQSKAALTDWLRAKASFVIEGLKEADKDEFCRCELKLQKWYGDLRGKPFAIEAENSILDISGFSKQYNCAFIWQKDGVKKLNLYLIINYFKGGKLRFKKIKPEAFEANRFYTVINKKSGEIVPMEVNFNFDDPNLIILPLAFGKRQGREFIWNDLLSLETGSLKLANGRVIEKTLYNRRTRQDEPALFVALTFERREVLDSSNIKPMNLIGVDRGENIPAVIALTDPEGCPLSRFKDSLGNPTHILRIGESYKEKQRTIQAKKEVEQRRAGGYSRKYASKAKNLADDMVRNTARDLLYYAVTQDAMLIFENLSRGFGRQGKRTFMAERQYTRMEDWLTAKLAYEGLPSQTYLSKTLAQYTSKTCSNCGFTITSADYDRVLEKLKKTATGWMTTINGKELKVEGQITYYNRYKRQNVVKDLSVELDRLSEESVNNDISSWTKGRSGEALSLLKKRFSHRPVQEKFVCLNCGFETHADEQAALNIARSWLFLRSQEYKKYQTNKTTGNTDKRAFVETWQSFYRKKLKEVWKPAV

SEQ ID NO: 41414 - protein, 978 aa, synthetic construct
  REGION 1..978: note = engineered CasX variant
QEIGRINKIRRRLVKDSNTKKAGKTGPMKTLLVRVMTPDLRERLENLRKKPENIPQPISNTSRANLNKLLTDYTEMKKAILHVYWEEFQKDPVGLMSRVAQPASKKIDQNKLKPEMDEKGNLTTAGFACSQCGQPLFVYKLEQVSEKGKAYTNYFGRCNVAEHEKLILLAQLKPEKDSDEAVTYSLGKFGQRALDFYSIHVTKESTHPVKPLAQIAGNRYASAPVGKALSDACMGTIASFLSKYQDIIIEHQKVVKGNQKRLESLRELAGKENLEYPSVTLPPQPHTKEGVDAYNEVIARVRMWVNLNLWQKLKLSRDDAKPLLRLKGFPSFPLVERQANEVDWWDMVCNVKKLINEKKEDGKVFWQNLAGYKRQEALRPYLSSEEDRKKGKKFARYQLGDLLLHLEKKHGEDWGKVYDEAWERIDKKVEGLSKHIKLEEERRSEDAQSKAALTDWLRAKASFVIEGLKEADKDEFCRCELKLQKWYGDLRGKPFAIEAENSILDISGFSKQYNCAFIWQKDGVKKLNLYLIINYFKGGKLRFKKIKPEAFEANRFYTVINKKSGEIVPMEVNFNFDDPNLIILPLAFGKRQGREFIWNDLLSLETGSLKLANGRVIEKTLYNRRTRQDEPALFVALTFERREVLDSSNIKPMNLIGVDRGENIPAVIALTDPEGCPLSRFKDSLGNPTHILRIGESYKEKQRTIQAKKEVEQRRAGGYSRKYASKAKNLADDMVRNTARDLLYYAVTQDAMLIFENLSRGFGRQGKRTFMAERQYTRMEDWLTAKLAYEGLPSQTYLSKTLAQYTSKTCSNCGFTITSADYDRVLEKLKKTATGWMTTINGKELKVEGQITYYNRYKRQNVVKDLSVELDRLSEESVNNDISSWTKGRSGEALSLLKKRFSHRPVQEKFVCLNCGFETHADEQAALNIARSWLFLRSQEYKKYQTNKTTGNTDKRAFVETWQSFYRKKLKEVWKPAV

SEQ ID NO: 41415 - protein, 978 aa, synthetic construct
  REGION 1..978: note = engineered CasX variant
QEIGRINKIRRRLVKDSNTKKAGKTGPMKTLLVRVMTPDLRERLENLRKKPENIPQPISNTSRANLNKLLTDYTEMKKAILHVYWEEFQKDPVGLMSRVAQPASKKIDQNKLKPEMDEKGNLTTAGFACSQCGQPLFVYKLEQVSEKGKAYTNYFGRCNVAEHEKLILLAQLKPEKDSDEAVTYSLGKFGQRALDFYSIHVTKESTHPVKPLAQIAGNRYASVPVGKALSDACMGTIASFLSKYQDIIIEHQKVVKGNQKRLESLRELAGKENLEYPSVTLPPQPHTKEGVDAYNEVIARVRMWVNLNLWQKLKLSRDDAKPLLRLKGFPSFPLVERQANEVDWWDMVCNVKKLINEKKEDGKVFWQNLAGYKRQEALRPYLSSEEDRKKGKKFARYQLGDLLLHLEKKHGEDWGKVYDEAWERIDKKVEGLSKHIKLEEERRSEDAQSKAALTDWLRAKASFVIEGLKEADKDEFCRCELKLQKWYGDLRGKPFAIEAENSILDISGFSKQYNCAFIWQKDGVKKLNLYLIINYFKGGKLRFKKIKPEAFEANRFYTVINKKSGEIVPMEVNFNFDDPNLIILPLAFGKRQGREFIWNDLLSLETGSLKLANGRVIEKTLYNRRTRQDEPALFVALTFERREVLDSSNIKPMNLIGVDRGENIPAVIALTDPEGCPLSRFKDSLGNPTHILRIGESYKEKQRTIQAKKEVEQRRAGGYSRKYASKAKNLADDMVRNTARDLLYYAVTQDAMLIFENLSRGFGRQGKRTFMAERQYTRMEDWLTAKLAYEGLPSQTYLSKTLAQYTSKTCSNCGFTITSADYDRVLEKLKKTATGWMTTINGKELKVEGQITYYNRYKRQNVVKDLSVELDRLSEESVNNDISSWTKGRSGEALSLLKKRFSHRPVQEKFVCLNCGFETHADEQAALNIARSWLFLRSQEYKKYQTNKTTGNTDKRAFVETWQSFYRKKLKEVWKPAV

SEQ ID NO: 41416 - protein, 978 aa, synthetic construct
  REGION 1..978: note = engineered CasX variant
QEIGRINKIRRRLVKDSNTKKAGKTGPMKTLLVRVMTPDLRERLENLRKKPENIPQPISNTSRANLNKLLTDYTEMKKAILHVYWEEFQKDPVGLMSRVAQPASKKIDQNKLKPEMDEKGNLTTAGFACSQCGQPLFVYKLEQVSEKGKAYTNYFGRCNVAEHEKLIKLAQLKPEKDSDEAVTYSLGKFGQRALDFYSIHVTKESTHPVKPLAQIAGNRYASGPVGKALSDACMGTIASFLSKYQDIIIEHQKVVKGNQKRLESLRELAGKENLEYPSVTLPPQPHTKEGVDAYNEVIARVRMWVNLNLWQKLKLSRDDAKPLLRLKGFPSFPLVERQANEVDWWDMVCNVKKLINEKKEDGKVFWQNLAGYKRQEALRPYLSSEEDRKKGKKFARYQLGDLLLHLEKKHGEDWGKVYDEAWERIDKKVEGLSKHIKLEEERRSEDAQSKAALTDWLRAKASFVIEGLKEADKDEFCRCELKLQKWYGDLRGKPFAIEAENSILDISGFSKQYNCAFIWQKDGVKKLNLYLIINYFKGGKLRFKKIKPEAFEANRFYTVINKKSGEIVPMEVNFNFDDPNLIILPLAFGKRQGREFIWNDLLSLETGSLKLANGRVIEKTLYNRRTRQDEPALFVALTFERREVLDSSNIKPMNLIGVDRGENIPAVIALTDPEGCPLSRFKDSLGNPTHILRIGESYKEKQRTIQAKKEVEQRRAGGYSRKYASKAKNLADDMVRNTARDLLYYAVTQDAMLIFENLSRGFGRQGKRTFMAERQYTRMEDWLTAKLAYEGLPSQTYLSKTLAQYTSKTCSNCGFTITSADYDRVLEKLKKTATGWMTTINGKELKVEGQITYYNRYKRQNVVKDLSVELDRLSEESVNNDISSWTKGRSGEALSLLKKRFSHRPVQEKFVCLNCGFETHADEQAALNIARSWLFLRSQEYKKYQTNKTTGNTDKRAFVETWQSFYRKKLKEVWKPAV

SEQ ID NO: 41417 - protein, 977 aa, synthetic construct
  REGION 1..977: note = engineered CasX variant
QEIGRINKIRRRLVKDSNTKKAGKTGPMKTLLVRVMTPDLRERLENLRKKPENIPQPISNTSRANLNKLLTDYTEMKKAILHVYWEEFQKDPVGLMSRVAQPASKKIDQNKLKPEMDEKGNLTTAGFACSQCGQPLFVYKLEQVSEKGKAYTNYFGRCNVAEHEKLILLAQLKPEKDSDEAVTYSLGKFGQRALDFYSIHVTKESTHPVKPLAQIAGNRYASPVGKALSDACMGTIASFLSKYQDIIIEHQKVVKGNQKRLESLRELAGKENLEYPSVTLPPQPHTKEGVDAYNEVIARVRMWVNLNLWQKLKLSRDDAKPLLRLKGFPSFPLVERQANEVDWWDMVCNVKKLINEKKEDGKVFWQNLAGYKRQEALRPYLSSEEDRKKGKKFARYQLGDLLLHLEKKHGEDWGKVYDEAWERIDKKVEGLSKHIKLEEERRSEDAQSKAALTDWLRAKASFVIEGLKEADKDEFCRCELKLQKWYGDLRGKPFAIEAENSILDISGFSKQYNCAFIWQKDGVKKLNLYLIINYFKGGKLRFKKIKPEAFEANRFYTVINKKSGEIVPMEVNFNFDDPNLIILPLAFGKRQGREFIWNDLLSLETGSLKLANGRVIEKTLYNRRTRQDEPALFVALTFERREVLDSSNIKPMNLIGVDRGENIPAVIALTDPEGCPLSRFKDSLGNPTHILRIGESYKEKQRTIQAKKEVEQRRAGGYSRKYASKAKNLADDMVRNTARDLLYYAVTQDAMLIFENLSRGFGRQGKRTFMAERQYTRMEDWLTAKLAYEGLPSQTYLSKTLAQYTSKTCSNCGFTITSADYDRVLEKLKKTATGWMTTINGKELKVEGQITYYNRYKRQNVVKDLSVELDRLSEESVNNDISSWTKGRSGEALSLLKKRFSHRPVQEKFVCLNCGFETHADEQAALNIARSWLFLRSQEYKKYQTNKTTGNTDKRAFVETWQSFYRKKLKEVWKPAV

SEQ ID NO: 41418 - protein, 978 aa, synthetic construct
  REGION 1..978: note = engineered CasX variant
QEIGRINKIRRRLVKDSNTKKAGKTGPMKTLLVRVMTPDLRERLENLRKKPENIPQPISNTSRANLNKLLTDYTEMKKAILHVYWEEFQKDPVGLMSRVAQPASKKIDQNKLKPEMDEKGNLTTAGFACSQCGQPLFVYKLEQVSEKGKAYTNYFGRCNVAEHEKLILLAQLKPEKDSDEAVTYSLGKFGQRALDFYSIHVTKESTHPVKPLAQIAGNRYASYPVGKALSDACMGTIASFLSKYQDIIIEHQKVVKGNQKRLESLRELAGKENLEYPSVTLPPQPHTKEGVDAYNEVIARVRMWVNLNLWQKLKLSRDDAKPLLRLKGFPSFPLVERQANEVDWWDMVCNVKKLINEKKEDGKVFWQNLAGYKRQEALRPYLSSEEDRKKGKKFARYQLGDLLLHLEKKHGEDWGKVYDEAWERIDKKVEGLSKHIKLEEERRSEDAQSKAALTDWLRAKASFVIEGLKEADKDEFCRCELKLQKWYGDLRGKPFAIEAENSILDISGFSKQYNCAFIWQKDGVKKLNLYLIINYFKGGKLRFKKIKPEAFEANRFYTVINKKSGEIVPMEVNFNFDDPNLIILPLAFGKRQGREFIWNDLLSLETGSLKLANGRVIEKTLYNRRTRQDEPALFVALTFERREVLDSSNIKPMNLIGVDRGENIPAVIALTDPEGCPLSRFKDSLGNPTHILRIGESYKEKQRTIQAKKEVEQRRAGGYSRKYASKAKNLADDMVRNTARDLLYYAVTQDAMLIFENLSRGFGRQGKRTFMAERQYTRMEDWLTAKLAYNGLPSKTYLSKTLAQYTSKTCSNCGFTITSADYDRVLEKLKKTATGWMTTINGKELKVEGQITYYNRYKRQNVVKDLSVELDRLSEESVNNDISSWTKGRSGEALSLLKKRFSHRPVQEKFVCLNCGFETHADEQAALNIARSWLFLRSQEYKKYQTNKTTGNTDKRAFVETWQSFYRKKLKEVWKPAV

SEQ ID NO: 41419 - protein, 978 aa, synthetic construct
  REGION 1..978: note = engineered CasX variant
QEIGRINKIRRRLVKDSNTKKAGKTGPMKTLLVRVMTPDLRERLENLRKKPENIPQPISNTSRANLNKLLTDYTEMKKAILHVYWEEFQKDPVGLMSRVAQPASKKIDQNKLKPEMDEKGNLTTAGFACSQCGQPLFVYKLEQVSEKGKAYTNYFGRCNVAEHEKLILLAQLKPEKDSDEAVTYSLGKFGQRALDFYSIHVTKESTHPVKPLAQIAGNRYASHPVGKALSDACMGTIASFLSKYQDIIIEHQKVVKGNQKRLESLRELAGKENLEYPSVTLPPQPHTKEGVDAYNEVIARVRMWVNLNLWQKLKLSRDDAKPLLRLKGFPSFPLVERQANEVDWWDMVCNVKKLINEKKEDGKVFWQNLAGYKRQEALRPYLSSEEDRKKGKKFARYQLGDLLLHLEKKHGEDWGKVYDEAWERIDKKVEGLSKHIKLEEERRSEDAQSKAALTDWLRAKASFVIEGLKEADKDEFCRCELKLQKWYGDLRGKPFAIEAENSILDISGFSKQYNCAFIWQKDGVKKLNLYLIINYFKGGKLRFKKIKPEAFEANRFYTVINKKSGEIVPMEVNFNFDDPNLIILPLAFGKRQGREFIWNDLLSLETGSLKLANGRVIEKTLYNRRTRQDEPALFVALTFERREVLDSSNIKPMNLIGVDRGENIPAVIALTDPEGCPLSRFKDSLGNPTHILRIGESYKEKQRTIQAKKEVEQRRAGGYSRKYASKAKNLADDMVRNTARDLLYYAVTQDAMLIFENLSRGFGRQGKRTFMAERQYTRMEDWLTAKLAYNGLPSKTYLSKTLAQYTSKTCSNCGFTITSADYDRVLEKLKKTATGWMTTINGKELKVEGQITYYNRYKRQNVVKDLSVELDRLSEESVNNDISSWTKGRSGEALSLLKKRFSHRPVQEKFVCLNCGFETHADEQAALNIARSWLFLRSQEYKKYQTNKTTGNTDKRAFVETWQSFYRKKLKEVWKPAV

SEQ ID NO: 41420 - protein, 978 aa, synthetic construct
  REGION 1..978: note = engineered CasX variant
QEIGRINKIRRRLVKDSNTKKAGKTGPMKTLLVRVMTPDLRERLENLRKKPENIPQPISNTSRANLNKLLTDYTEMKKAILHVYWEEFQKDPVGLMSRVAQPASKKIDQNKLKPEMDEKGNLTTAGFACSQCGQPLFVYKLEQVSEKGKAYTNYFGRCNVAEHEKLILLAQLKPEKDSDEAVTYSLGKFGQRALDFYSIHVTKESTHPVKPLAQIAGNRYASSPVGKALSDACMGTIASFLSKYQDIIIEHQKVVKGNQKRLESLRELAGKENLEYPSVTLPPQPHTKEGVDAYNEVIARVRMWVNLNLWQKLKLSRDDAKPLLRLKGFPSFPLVERQANEVDWWDMVCNVKKLINEKKEDGKVFWQNLAGYKRQEALRPYLSSEEDRKKGKKFARYQLGDLLLHLEKKHGEDWGKVYDEAWERIDKKVEGLSKHIKLEEERRSEDAQSKAALTDWLRAKASFVIEGLKEADKDEFCRCELKLQKWYGDLRGKPFAIEAENSILDISGFSKQYNCAFIWQKDGVKKLNLYLIINYFKGGKLRFKKIKPEAFEANRFYTVINKKSGEIVPMEVNFNFDDPNLIILPLAFGKRQGREFIWNDLLSLETGSLKLANGRVIEKTLYNRRTRQDEPALFVALTFERREVLDSSNIKPMNLIGVDRGENIPAVIALTDPEGCPLSRFKDSLGNPTHILRIGESYKEKQRTIQAKKEVEQRRAGGYSRKYASKAKNLADDMVRNTARDLLYYAVTQDAMLIFENLSRGFGRQGKRTFMAERQYTRMEDWLTAKLAYNGLPSKTYLSKTLAQYTSKTCSNCGFTITSADYDRVLEKLKKTATGWMTTINGKELKVEGQITYYNRYKRQNVVKDLSVELDRLSEESVNNDISSWTKGRSGEALSLLKKRFSHRPVQEKFVCLNCGFETHADEQAALNIARSWLFLRSQEYKKYQTNKTTGNTDKRAFVETWQSFYRKKLKEVWKPAV

SEQ ID NO: 41421 - protein, 978 aa, synthetic construct
  REGION 1..978: note = engineered CasX variant
QEIGRINKIRRRLVKDSNTKKAGKTGPMKTLLVRVMTPDLRERLENLRKKPENIPQPISNTSRANLNKLLTDYTEMKKAILHVYWEEFQKDPVGLMSRVAQPASKKIDQNKLKPEMDEKGNLTTAGFACSQCGQPLFVYKLEQVSEKGKAYTNYFGRCNVAEHEKLILLAQLKPEKDSDEAVTYSLGKFGQRALDFYSIHVTKESTHPVKPLAQIAGNRYASTPVGKALSDACMGTIASFLSKYQDIIIEHQKVVKGNQKRLESLRELAGKENLEYPSVTLPPQPHTKEGVDAYNEVIARVRMWVNLNLWQKLKLSRDDAKPLLRLKGFPSFPLVERQANEVDWWDMVCNVKKLINEKKEDGKVFWQNLAGYKRQEALRPYLSSEEDRKKGKKFARYQLGDLLLHLEKKHGEDWGKVYDEAWERIDKKVEGLSKHIKLEEERRSEDAQSKAALTDWLRAKASFVIEGLKEADKDEFCRCELKLQKWYGDLRGKPFAIEAENSILDISGFSKQYNCAFIWQKDGVKKLNLYLIINYFKGGKLRFKKIKPEAFEANRFYTVINKKSGEIVPMEVNFNFDDPNLIILPLAFGKRQGREFIWNDLLSLETGSLKLANGRVIEKTLYNRRTRQDEPALFVALTFERREVLDSSNIKPMNLIGVDRGENIPAVIALTDPEGCPLSRFKDSLGNPTHILRIGESYKEKQRTIQAKKEVEQRRAGGYSRKYASKAKNLADDMVRNTARDLLYYAVTQDAMLIFENLSRGFGRQGKRTFMAERQYTRMEDWLTAKLAYNGLPSKTYLSKTLAQYTSKTCSNCGFTITSADYDRVLEKLKKTATGWMTTINGKELKVEGQITYYNRYKRQNVVKDLSVELDRLSEESVNNDISSWTKGRSGEALSLLKKRFSHRPVQEKFVCLNCGFETHADEQAALNIARSWLFLRSQEYKKYQTNKTTGNTDKRAFVETWQSFYRKKLKEVWKPAV

SEQ ID NO: 41422 - protein, 978 aa, synthetic construct
  REGION 1..978: note = engineered CasX variant
QEIGRINKIRRRLVKDSNTKKAGKTGPMKTLLVRVMTPDLRERLENLRKKPENIPQPISNTSRANLNKLLTDYTEMKKAILHVYWEEFQKDPVGLMSRVAQPASKKIDQNKLKPEMDEKGNLTTAGFACSQCGQPLFVYKLEQVSEKGKAYTNYFGRCNVAEHEKLILLAQLKPEKDSDEAVTYSLGKFGQRALDFYSIHVTKESTHPVKPLAQIAGNRYASAPVGKALSDACMGTIASFLSKYQDIIIEHQKVVKGNQKRLESLRELAGKENLEYPSVTLPPQPHTKEGVDAYNEVIARVRMWVNLNLWQKLKLSRDDAKPLLRLKGFPSFPLVERQANEVDWWDMVCNVKKLINEKKEDGKVFWQNLAGYKRQEALRPYLSSEEDRKKGKKFARYQLGDLLLHLEKKHGEDWGKVYDEAWERIDKKVEGLSKHIKLEEERRSEDAQSKAALTDWLRAKASFVIEGLKEADKDEFCRCELKLQKWYGDLRGKPFAIEAENSILDISGFSKQYNCAFIWQKDGVKKLNLYLIINYFKGGKLRFKKIKPEAFEANRFYTVINKKSGEIVPMEVNFNFDDPNLIILPLAFGKRQGREFIWNDLLSLETGSLKLANGRVIEKTLYNRRTRQDEPALFVALTFERREVLDSSNIKPMNLIGVDRGENIPAVIALTDPEGCPLSRFKDSLGNPTHILRIGESYKEKQRTIQAKKEVEQRRAGGYSRKYASKAKNLADDMVRNTARDLLYYAVTQDAMLIFENLSRGFGRQGKRTFMAERQYTRMEDWLTAKLAYNGLPSKTYLSKTLAQYTSKTCSNCGFTITSADYDRVLEKLKKTATGWMTTINGKELKVEGQITYYNRYKRQNVVKDLSVELDRLSEESVNNDISSWTKGRSGEALSLLKKRFSHRPVQEKFVCLNCGFETHADEQAALNIARSWLFLRSQEYKKYQTNKTTGNTDKRAFVETWQSFYRKKLKEVWKPAV

SEQ ID NO: 41423 - protein, 978 aa, synthetic construct
  REGION 1..978: note = engineered CasX variant
QEIGRINKIRRRLVKDSNTKKAGKTGPMKTLLVRVMTPDLRERLENLRKKPENIPQPISNTSRANLNKLLTDYTEMKKAILHVYWEEFQKDPVGLMSRVAQPASKKIDQNKLKPEMDEKGNLTTAGFACSQCGQPLFVYKLEQVSEKGKAYTNYFGRCNVAEHEKLILLAQLKPEKDSDEAVTYSLGKFGQRALDFYSIHVTKESTHPVKPLAQIAGNRYASVPVGKALSDACMGTIASFLSKYQDIIIEHQKVVKGNQKRLESLRELAGKENLEYPSVTLPPQPHTKEGVDAYNEVIARVRMWVNLNLWQKLKLSRDDAKPLLRLKGFPSFPLVERQANEVDWWDMVCNVKKLINEKKEDGKVFWQNLAGYKRQEALRPYLSSEEDRKKGKKFARYQLGDLLLHLEKKHGEDWGKVYDEAWERIDKKVEGLSKHIKLEEERRSEDAQSKAALTDWLRAKASFVIEGLKEADKDEFCRCELKLQKWYGDLRGKPFAIEAENSILDISGFSKQYNCAFIWQKDGVKKLNLYLIINYFKGGKLRFKKIKPEAFEANRFYTVINKKSGEIVPMEVNFNFDDPNLIILPLAFGKRQGREFIWNDLLSLETGSLKLANGRVIEKTLYNRRTRQDEPALFVALTFERREVLDSSNIKPMNLIGVDRGENIPAVIALTDPEGCPLSRFKDSLGNPTHILRIGESYKEKQRTIQAKKEVEQRRAGGYSRKYASKAKNLADDMVRNTARDLLYYAVTQDAMLIFENLSRGFGRQGKRTFMAERQYTRMEDWLTAKLAYNGLPSKTYLSKTLAQYTSKTCSNCGFTITSADYDRVLEKLKKTATGWMTTINGKELKVEGQITYYNRYKRQNVVKDLSVELDRLSEESVNNDISSWTKGRSGEALSLLKKRFSHRPVQEKFVCLNCGFETHADEQAALNIARSWLFLRSQEYKKYQTNKTTGNTDKRAFVETWQSFYRKKLKEVWKPAV

SEQ ID NO: 41424 - protein, 978 aa, synthetic construct
  REGION 1..978: note = engineered CasX variant
QEIGRINKIRRRLVKDSNTKKAGKTGPMKTLLVRVMTPDLRERLENLRKKPENIPQPISNTSRANLNKLLTDYTEMKKAILHVYWEEFQKDPVGLMSRVAQPASKKIDQNKLKPEMDEKGNLTTAGFACSQCGQPLFVYKLEQVSEKGKAYTNYFGRCNVAEHEKLIKLAQLKPEKDSDEAVTYSLGKFGQRALDFYSIHVTKESTHPVKPLAQIAGNRYASGPVGKALSDACMGTIASFLSKYQDIIIEHQKVVKGNQKRLESLRELAGKENLEYPSVTLPPQPHTKEGVDAYNEVIARVRMWVNLNLWQKLKLSRDDAKPLLRLKGFPSFPLVERQANEVDWWDMVCNVKKLINEKKEDGKVFWQNLAGYKRQEALRPYLSSEEDRKKGKKFARYQLGDLLLHLEKKHGEDWGKVYDEAWERIDKKVEGLSKHIKLEEERRSEDAQSKAALTDWLRAKASFVIEGLKEADKDEFCRCELKLQKWYGDLRGKPFAIEAENSILDISGFSKQYNCAFIWQKDGVKKLNLYLIINYFKGGKLRFKKIKPEAFEANRFYTVINKKSGEIVPMEVNFNFDDPNLIILPLAFGKRQGREFIWNDLLSLETGSLKLANGRVIEKTLYNRRTRQDEPALFVALTFERREVLDSSNIKPMNLIGVDRGENIPAVIALTDPEGCPLSRFKDSLGNPTHILRIGESYKEKQRTIQAKKEVEQRRAGGYSRKYASKAKNLADDMVRNTARDLLYYAVTQDAMLIFENLSRGFGRQGKRTFMAERQYTRMEDWLTAKLAYNGLPSKTYLSKTLAQYTSKTCSNCGFTITSADYDRVLEKLKKTATGWMTTINGKELKVEGQITYYNRYKRQNVVKDLSVELDRLSEESVNNDISSWTKGRSGEALSLLKKRFSHRPVQEKFVCLNCGFETHADEQAALNIARSWLFLRSQEYKKYQTNKTTGNTDKRAFVETWQSFYRKKLKEVWKPAV

SEQ ID NO: 41425 - protein, 977 aa, synthetic construct
  REGION 1..977: note = engineered CasX variant
QEIGRINKIRRRLVKDSNTKKAGKTGPMKTLLVRVMTPDLRERLENLRKKPENIPQPISNTSRANLNKLLTDYTEMKKAILHVYWEEFQKDPVGLMSRVAQPASKKIDQNKLKPEMDEKGNLTTAGFACSQCGQPLFVYKLEQVSEKGKAYTNYFGRCNVAEHEKLILLAQLKPEKDSDEAVTYSLGKFGQRALDFYSIHVTKESTHPVKPLAQIAGNRYASPVGKALSDACMGTIASFLSKYQDIIIEHQKVVKGNQKRLESLRELAGKENLEYPSVTLPPQPHTKEGVDAYNEVIARVRMWVNLNLWQKLKLSRDDAKPLLRLKGFPSFPLVERQANEVDWWDMVCNVKKLINEKKEDGKVFWQNLAGYKRQEALRPYLSSEEDRKKGKKFARYQLGDLLLHLEKKHGEDWGKVYDEAWERIDKKVEGLSKHIKLEEERRSEDAQSKAALTDWLRAKASFVIEGLKEADKDEFCRCELKLQKWYGDLRGKPFAIEAENSILDISGFSKQYNCAFIWQKDGVKKLNLYLIINYFKGGKLRFKKIKPEAFEANRFYTVINKKSGEIVPMEVNFNFDDPNLIILPLAFGKRQGREFIWNDLLSLETGSLKLANGRVIEKTLYNRRTRQDEPALFVALTFERREVLDSSNIKPMNLIGVDRGENIPAVIALTDPEGCPLSRFKDSLGNPTHILRIGESYKEKQRTIQAKKEVEQRRAGGYSRKYASKAKNLADDMVRNTARDLLYYAVTQDAMLIFENLSRGFGRQGKRTFMAERQYTRMEDWLTAKLAYNGLPSKTYLSKTLAQYTSKTCSNCGFTITSADYDRVLEKLKKTATGWMTTINGKELKVEGQITYYNRYKRQNVVKDLSVELDRLSEESVNNDISSWTKGRSGEALSLLKKRFSHRPVQEKFVCLNCGFETHADEQAALNIARSWLFLRSQEYKKYQTNKTTGNTDKRAFVETWQSFYRKKLKEVWKPAV

SEQ ID NO: 41426 - protein, 978 aa, synthetic construct
  REGION 1..978: note = engineered CasX variant
QEIGRINKIRRRLVKDSNTKKAGKTGPMKTLLVRVMTPDLRERLENLRKKPENIPQPISNTSRANLNKLLTDYTEMKKAILHVYWEEFQKDPVGLMSRVAQPASKKIDQNKLKPEMDEKGNLTTAGFACSQCGQPLFVYKLEQVSEKGKAYTNYFGRCNVAEHEKLIQLAQLKPEKDSDEAVTYSLGKFGQRALDFYSIHVTKESTHPVKPLAQIAGNRYASYPVGKALSDACMGTIASFLSKYQDIIIEHQKVVKGNQKRLESLRELAGKENLEYPSVTLPPQPHTKEGVDAYNEVIARVRMWVNLNLWQKLKLSRDDAKPLLRLKGFPSFPLVERQANEVDWWDMVCNVKKLINEKKEDGKVFWQNLAGYKRQEALRPYLSSEEDRKKGKKFARYQLGDLLLHLEKKHGEDWGKVYDEAWERIDKKVEGLSKHIKLEEERRSEDAQSKAALTDWLRAKASFVIEGLKEADKDEFCRCELKLQKWYGDLRGKPFAIEAENSILDISGFSKQYNCAFIWQKDGVKKLNLYLIINYFKGGKLRFKKIKPEAFEANRFYTVINKKSGEIVPMEVNFNFDDPNLIILPLAFGKRQGREFIWNDLLSLETGSLKLANGRVIEKTLYNRRTRQDEPALFVALTFERREVLDSSNIKPMNLIGVDRGENIPAVIALTDPEGCPLSRFKDSLGNPTHILRIGESYKEKQRTIQAKKEVEQRRAGGYSRKYASKAKNLADDMVRNTARDLLYYAVTQDAMLIFENLSRGFGRQGKRTFMAERQYTRMEDWLTAKLAYEGLPSKTYLSKTLAQYTSKTCSNCGFTITSADYDRVLEKLKKTATGWMTTINGKELKVEGQITYYNRYKRQNVVKDLSVELDRLSEESVNNDISSWTKGRSGEALSLLKKRFSHRPVQEKFVCLNCGFETHADEQAALNIARSWLFLRSQEYKKYQTNKTTGNTDKRAFVETWQSFYRKKLKEVWKPAV

SEQ ID NO: 41427 - protein, 978 aa, synthetic construct
  REGION 1..978: note = engineered CasX variant
QEIGRINKIRRRLVKDSNTKKAGKTGPMKTLLVRVMTPDLRERLENLRKKPENIPQPISNTSRANLNKLLTDYTEMKKAILHVYWEEFQKDPVGLMSRVAQPASKKIDQNKLKPEMDEKGNLTTAGFACSQCGQPLFVYKLEQVSEKGKAYTNYFGRCNVAEHEKLIQLAQLKPEKDSDEAVTYSLGKFGQRALDFYSIHVTKESTHPVKPLAQIAGNRYASHPVGKALSDACMGTIASFLSKYQDIIIEHQKVVKGNQKRLESLRELAGKENLEYPSVTLPPQPHTKEGVDAYNEVIARVRMWVNLNLWQKLKLSRDDAKPLLRLKGFPSFPLVERQANEVDWWDMVCNVKKLINEKKEDGKVFWQNLAGYKRQEALRPYLSSEEDRKKGKKFARYQLGDLLLHLEKKHGEDWGKVYDEAWERIDKKVEGLSKHIKLEEERRSEDAQSKAALTDWLRAKASFVIEGLKEADKDEFCRCELKLQKWYGDLRGKPFAIEAENSILDISGFSKQYNCAFIWQKDGVKKLNLYLIINYFKGGKLRFKKIKPEAFEANRFYTVINKKSGEIVPMEVNFNFDDPNLIILPLAFGKRQGREFIWNDLLSLETGSLKLANGRVIEKTLYNRRTRQDEPALFVALTFERREVLDSSNIKPMNLIGVDRGENIPAVIALTDPEGCPLSRFKDSLGNPTHILRIGESYKEKQRTIQAKKEVEQRRAGGYSRKYASKAKNLADDMVRNTARDLLYYAVTQDAMLIFENLSRGFGRQGKRTFMAERQYTRMEDWLTAKLAYEGLPSKTYLSKTLAQYTSKTCSNCGFTITSADYDRVLEKLKKTATGWMTTINGKELKVEGQITYYNRYKRQNVVKDLSVELDRLSEESVNNDISSWTKGRSGEALSLLKKRFSHRPVQEKFVCLNCGFETHADEQAALNIARSWLFLRSQEYKKYQTNKTTGNTDKRAFVETWQSFYRKKLKEVWKPAV

SEQ ID NO: 41428 - protein, 978 aa, synthetic construct
  REGION 1..978: note = engineered CasX variant
QEIGRINKIRRRLVKDSNTKKAGKTGPMKTLLVRVMTPDLRERLENLRKKPENIPQPISNTSRANLNKLLTDYTEMKKAILHVYWEEFQKDPVGLMSRVAQPASKKIDQNKLKPEMDEKGNLTTAGFACSQCGQPLFVYKLEQVSEKGKAYTNYFGRCNVAEHEKLIQLAQLKPEKDSDEAVTYSLGKFGQRALDFYSIHVTKESTHPVKPLAQIAGNRYASSPVGKALSDACMGTIASFLSKYQDIIIEHQKVVKGNQKRLESLRELAGKENLEYPSVTLPPQPHTKEGVDAYNEVIARVRMWVNLNLWQKLKLSRDDAKPLLRLKGFPSFPLVERQANEVDWWDMVCNVKKLINEKKEDGKVFWQNLAGYKRQEALRPYLSSEEDRKKGKKFARYQLGDLLLHLEKKHGEDWGKVYDEAWERIDKKVEGLSKHIKLEEERRSEDAQSKAALTDWLRAKASFVIEGLKEADKDEFCRCELKLQKWYGDLRGKPFAIEAENSILDISGFSKQYNCAFIWQKDGVKKLNLYLIINYFKGGKLRFKKIKPEAFEANRFYTVINKKSGEIVPMEVNFNFDDPNLIILPLAFGKRQGREFIWNDLLSLETGSLKLANGRVIEKTLYNRRTRQDEPALFVALTFERREVLDSSNIKPMNLIGVDRGENIPAVIALTDPEGCPLSRFKDSLGNPTHILRIGESYKEKQRTIQAKKEVEQRRAGGYSRKYASKAKNLADDMVRNTARDLLYYAVTQDAMLIFENLSRGFGRQGKRTFMAERQYTRMEDWLTAKLAYEGLPSKTYLSKTLAQYTSKTCSNCGFTITSADYDRVLEKLKKTATGWMTTINGKELKVEGQITYYNRYKRQNVVKDLSVELDRLSEESVNNDISSWTKGRSGEALSLLKKRFSHRPVQEKFVCLNCGFETHADEQAALNIARSWLFLRSQEYKKYQTNKTTGNTDKRAFVETWQSFYRKKLKEVWKPAV

SEQ ID NO: 41429 - protein, 978 aa, synthetic construct
  REGION 1..978: note = engineered CasX variant
QEIGRINKIRRRLVKDSNTKKAGKTGPMKTLLVRVMTPDLRERLENLRKKPENIPQPISNTSRANLNKLLTDYTEMKKAILHVYWEEFQKDPVGLMSRVAQPASKKIDQNKLKPEMDEKGNLTTAGFACSQCGQPLFVYKLEQVSEKGKAYTNYFGRCNVAEHEKLIQLAQLKPEKDSDEAVTYSLGKFGQRALDFYSIHVTKESTHPVKPLAQIAGNRYASTPVGKALSDACMGTIASFLSKYQDIIIEHQKVVKGNQKRLESLRELAGKENLEYPSVTLPPQPHTKEGVDAYNEVIARVRMWVNLNLWQKLKLSRDDAKPLLRLKGFPSFPLVERQANEVDWWDMVCNVKKLINEKKEDGKVFWQNLAGYKRQEALRPYLSSEEDRKKGKKFARYQLGDLLLHLEKKHGEDWGKVYDEAWERIDKKVEGLSKHIKLEEERRSEDAQSKAALTDWLRAKASFVIEGLKEADKDEFCRCELKLQKWYGDLRGKPFAIEAENSILDISGFSKQYNCAFIWQKDGVKKLNLYLIINYFKGGKLRFKKIKPEAFEANRFYTVINKKSGEIVPMEVNFNFDDPNLIILPLAFGKRQGREFIWNDLLSLETGSLKLANGRVIEKTLYNRRTRQDEPALFVALTFERREVLDSSNIKPMNLIGVDRGENIPAVIALTDPEGCPLSRFKDSLGNPTHILRIGESYKEKQRTIQAKKEVEQRRAGGYSRKYASKAKNLADDMVRNTARDLLYYAVTQDAMLIFENLSRGFGRQGKRTFMAERQYTRMEDWLTAKLAYEGLPSKTYLSKTLAQYTSKTCSNCGFTITSADYDRVLEKLKKTATGWMTTINGKELKVEGQITYYNRYKRQNVVKDLSVELDRLSEESVNNDISSWTKGRSGEALSLLKKRFSHRPVQEKFVCLNCGFETHADEQAALNIARSWLFLRSQEYKKYQTNKTTGNTDKRAFVETWQSFYRKKLKEVWKPAV

SEQ ID NO: 41430 - protein, 978 aa, synthetic construct
  REGION 1..978: note = engineered CasX variant
QEIGRINKIRRRLVKDSNTKKAGKTGPMKTLLVRVMTPDLRERLENLRKKPENIPQPISNTSRANLNKLLTDYTEMKKAILHVYWEEFQKDPVGLMSRVAQPASKKIDQNKLKPEMDEKGNLTTAGFACSQCGQPLFVYKLEQVSEKGKAYTNYFGRCNVAEHEKLIQLAQLKPEKDSDEAVTYSLGKFGQRALDFYSIHVTKESTHPVKPLAQIAGNRYASAPVGKALSDACMGTIASFLSKYQDIIIEHQKVVKGNQKRLESLRELAGKENLEYPSVTLPPQPHTKEGVDAYNEVIARVRMWVNLNLWQKLKLSRDDAKPLLRLKGFPSFPLVERQANEVDWWDMVCNVKKLINEKKEDGKVFWQNLAGYKRQEALRPYLSSEEDRKKGKKFARYQLGDLLLHLEKKHGEDWGKVYDEAWERIDKKVEGLSKHIKLEEERRSEDAQSKAALTDWLRAKASFVIEGLKEADKDEFCRCELKLQKWYGDLRGKPFAIEAENSILDISGFSKQYNCAFIWQKDGVKKLNLYLIINYFKGGKLRFKKIKPEAFEANRFYTVINKKSGEIVPMEVNFNFDDPNLIILPLAFGKRQGREFIWNDLLSLETGSLKLANGRVIEKTLYNRRTRQDEPALFVALTFERREVLDSSNIKPMNLIGVDRGENIPAVIALTDPEGCPLSRFKDSLGNPTHILRIGESYKEKQRTIQAKKEVEQRRAGGYSRKYASKAKNLADDMVRNTARDLLYYAVTQDAMLIFENLSRGFGRQGKRTFMAERQYTRMEDWLTAKLAYEGLPSKTYLSKTLAQYTSKTCSNCGFTITSADYDRVLEKLKKTATGWMTTINGKELKVEGQITYYNRYKRQNVVKDLSVELDRLSEESVNNDISSWTKGRSGEALSLLKKRFSHRPVQEKFVCLNCGFETHADEQAALNIARSWLFLRSQEYKKYQTNKTTGNTDKRAFVETWQSFYRKKLKEVWKPAV

SEQ ID NO: 41431 - protein, 978 aa, synthetic construct
  REGION 1..978: note = engineered CasX variant
QEIGRINKIRRRLVKDSNTKKAGKTGPMKTLLVRVMTPDLRERLENLRKKPENIPQPISNTSRANLNKLLTDYTEMKKAILHVYWEEFQKDPVGLMSRVAQPASKKIDQNKLKPEMDEKGNLTTAGFACSQCGQPLFVYKLEQVSEKGKAYTNYFGRCNVAEHEKLIQLAQLKPEKDSDEAVTYSLGKFGQRALDFYSIHVTKESTHPVKPLAQIAGNRYASVPVGKALSDACMGTIASFLSKYQDIIIEHQKVVKGNQKRLESLRELAGKENLEYPSVTLPPQPHTKEGVDAYNEVIARVRMWVNLNLWQKLKLSRDDAKPLLRLKGFPSFPLVERQANEVDWWDMVCNVKKLINEKKEDGKVFWQNLAGYKRQEALRPYLSSEEDRKKGKKFARYQLGDLLLHLEKKHGEDWGKVYDEAWERIDKKVEGLSKHIKLEEERRSEDAQSKAALTDWLRAKASFVIEGLKEADKDEFCRCELKLQKWYGDLRGKPFAIEAENSILDISGFSKQYNCAFIWQKDGVKKLNLYLIINYFKGGKLRFKKIKPEAFEANRFYTVINKKSGEIVPMEVNFNFDDPNLIILPLAFGKRQGREFIWNDLLSLETGSLKLANGRVIEKTLYNRRTRQDEPALFVALTFERREVLDSSNIKPMNLIGVDRGENIPAVIALTDPEGCPLSRFKDSLGNPTHILRIGESYKEKQRTIQAKKEVEQRRAGGYSRKYASKAKNLADDMVRNTARDLLYYAVTQDAMLIFENLSRGFGRQGKRTFMAERQYTRMEDWLTAKLAYEGLPSKTYLSKTLAQYTSKTCSNCGFTITSADYDRVLEKLKKTATGWMTTINGKELKVEGQITYYNRYKRQNVVKDLSVELDRLSEESVNNDISSWTKGRSGEALSLLKKRFSHRPVQEKFVCLNCGFETHADEQAALNIARSWLFLRSQEYKKYQTNKTTGNTDKRAFVETWQSFYRKKLKEVWKPAV

SEQ ID NO: 41432 - protein, 979 aa, synthetic construct
  REGION 1..979: note = engineered CasX variant
QEIGRINKIRRRLVKDSNTKKAGKTGPMKTLLVRVMTPDLRERLENLRKKPENIPQPISNTSRANLNKLLTDYTEMKKAILHVYWEEFQKDPVGLMSRVAQPASKKIDQNKLKPEMDEKGNLTTAGFACSQCGQPLFVYKLEQVSEKGKAYTNYFGRCNVAEHEKLIQKLAQLKPEKDSDEAVTYSLGKFGQRALDFYSIHVTKESTHPVKPLAQIAGNRYASGPVGKALSDACMGTIASFLSKYQDIIIEHQKVVKGNQKRLESLRELAGKENLEYPSVTLPPQPHTKEGVDAYNEVIARVRMWVNLNLWQKLKLSRDDAKPLLRLKGFPSFPLVERQANEVDWWDMVCNVKKLINEKKEDGKVFWQNLAGYKRQEALRPYLSSEEDRKKGKKFARYQLGDLLLHLEKKHGEDWGKVYDEAWERIDKKVEGLSKHIKLEEERRSEDAQSKAALTDWLRAKASFVIEGLKEADKDEFCRCELKLQKWYGDLRGKPFAIEAENSILDISGFSKQYNCAFIWQKDGVKKLNLYLIINYFKGGKLRFKKIKPEAFEANRFYTVINKKSGEIVPMEVNFNFDDPNLIILPLAFGKRQGREFIWNDLLSLETGSLKLANGRVIEKTLYNRRTRQDEPALFVALTFERREVLDSSNIKPMNLIGVDRGENIPAVIALTDPEGCPLSRFKDSLGNPTHILRIGESYKEKQRTIQAKKEVEQRRAGGYSRKYASKAKNLADDMVRNTARDLLYYAVTQDAMLIFENLSRGFGRQGKRTFMAERQYTRMEDWLTAKLAYEGLPSKTYLSKTLAQYTSKTCSNCGFTITSADYDRVLEKLKKTATGWMTTINGKELKVEGQITYYNRYKRQNVVKDLSVELDRLSEESVNNDISSWTKGRSGEALSLLKKRFSHRPVQEKFVCLNCGFETHADEQAALNIARSWLFLRSQEYKKYQTNKTTGNTDKRAFVETWQSFYRKKLKEVWKPAV

SEQ ID NO: 41433 - protein, 977 aa, synthetic construct
  REGION 1..977: note = engineered CasX variant
QEIGRINKIRRRLVKDSNTKKAGKTGPMKTLLVRVMTPDLRERLENLRKKPENIPQPISNTSRANLNKLLTDYTEMKKAILHVYWEEFQKDPVGLMSRVAQPASKKIDQNKLKPEMDEKGNLTTAGFACSQCGQPLFVYKLEQVSEKGKAYTNYFGRCNVAEHEKLIQLAQLKPEKDSDEAVTYSLGKFGQRALDFYSIHVTKESTHPVKPLAQIAGNRYASPVGKALSDACMGTIASFLSKYQDIIIEHQKVVKGNQKRLESLRELAGKENLEYPSVTLPPQPHTKEGVDAYNEVIARVRMWVNLNLWQKLKLSRDDAKPLLRLKGFPSFPLVERQANEVDWWDMVCNVKKLINEKKEDGKVFWQNLAGYKRQEALRPYLSSEEDRKKGKKFARYQLGDLLLHLEKKHGEDWGKVYDEAWERIDKKVEGLSKHIKLEEERRSEDAQSKAALTDWLRAKASFVIEGLKEADKDEFCRCELKLQKWYGDLRGKPFAIEAENSILDISGFSKQYNCAFIWQKDGVKKLNLYLIINYFKGGKLRFKKIKPEAFEANRFYTVINKKSGEIVPMEVNFNFDDPNLIILPLAFGKRQGREFIWNDLLSLETGSLKLANGRVIEKTLYNRRTRQDEPALFVALTFERREVLDSSNIKPMNLIGVDRGENIPAVIALTDPEGCPLSRFKDSLGNPTHILRIGESYKEKQRTIQAKKEVEQRRAGGYSRKYASKAKNLADDMVRNTARDLLYYAVTQDAMLIFENLSRGFGRQGKRTFMAERQYTRMEDWLTAKLAYEGLPSKTYLSKTLAQYTSKTCSNCGFTITSADYDRVLEKLKKTATGWMTTINGKELKVEGQITYYNRYKRQNVVKDLSVELDRLSEESVNNDISSWTKGRSGEALSLLKKRFSHRPVQEKFVCLNCGFETHADEQAALNIARSWLFLRSQEYKKYQTNKTTGNTDKRAFVETWQSFYRKKLKEVWKPAV

SEQ ID NO: 41434 - protein, 978 aa, synthetic construct
  REGION 1..978: note = engineered CasX variant
QEIGRINKIRRRLVKDSNTKKAGKTGPMKTLLVRVMTPDLRERLENLRKKPENIPQPISNTSRANLNKLLTDYTEMKKAILHVYWEEFQKDPVGLMSRVAQPASKKIDQNKLKPEMDEKGNLTTAGFACSQCGQPLFVYKLEQVSEKGKAYTNYFGRCNVAEHEKLILLAQLKPEKDSDEAVTYSLGKFGQRALDFYSIHVTKESTHPVKPLAQIAGNRYASYPVGKALSDACMGTIASFLSKYQDIIIEHQKVVKGNQKRLESLRELAGKENLEYPSVTLPPQPHTKEGVDAYNEVIARVRMWVNLNLWQKLKLSRDDAKPLLRLKGFPSFPLVERQANEVDWWDMVCNVKKLINEKKEDGKVFWQNLAIYKRQEALRPYLSSEEDRKKGKKFARYQLGDLLLHLEKKHGEDWGKVYDEAWERIDKKVEGLSKHIKLEEERRSEDAQSKAALTDWLRAKASFVIEGLKEADKDEFCRCELKLQKWYGDLRGKPFAIEAENSILDISGFSKQYNCAFIWQKDGVKKLNLYLIINYFKGGKLRFKKIKPEAFEANRFYTVINKKSGEIVPMEVNFNFDDPNLIILPLAFGKRQGREFIWNDLLSLETGSLKLANGRVIEKTLYNRRTRQDEPALFVALTFERREVLDSSNIKPMNLIGVDRGENIPAVIALTDPEGCPLSRFKDSLGNPTHILRIGESYKEKQRTIQAKKEVEQRRAGGYSRKYASKAKNLADDMVRNTARDLLYYAVTQDAMLIFENLSRGFGRQGKRTFMAERQYTRMEDWLTAKLAYEGLPSKTYLSKTLAQYTSKTCSNCGFTITSADYDRVLEKLKKTATGWMTTINGKELKVEGQITYYNRYKRQNVVKDLSVELDRLSEESVNNDISSWTKGRSGEALSLLKKRFSHRPVQEKFVCLNCGFETHADEQAALNIARSWLFLRSQEYKKYQTNKTTGNTDKRAFVETWQSFYRKKLKEVWKPAV

SEQ ID NO: 41435 - protein, 978 aa, synthetic construct
  REGION 1..978: note = engineered CasX variant
QEIGRINKIRRRLVKDSNTKKAGKTGPMKTLLVRVMTPDLRERLENLRKKPENIPQPISNTSRANLNKLLTDYTEMKKAILHVYWEEFQKDPVGLMSRVAQPASKKIDQNKLKPEMDEKGNLTTAGFACSQCGQPLFVYKLEQVSEKGKAYTNYFGRCNVAEHEKLILLAQLKPEKDSDEAVTYSLGKFGQRALDFYSIHVTKESTHPVKPLAQIAGNRYASHPVGKALSDACMGTIASFLSKYQDIIIEHQKVVKGNQKRLESLRELAGKENLEYPSVTLPPQPHTKEGVDAYNEVIARVRMWVNLNLWQKLKLSRDDAKPLLRLKGFPSFPLVERQANEVDWWDMVCNVKKLINEKKEDGKVFWQNLAIYKRQEALRPYLSSEEDRKKGKKFARYQLGDLLLHLEKKHGEDWGKVYDEAWERIDKKVEGLSKHIKLEEERRSEDAQSKAALTDWLRAKASFVIEGLKEADKDEFCRCELKLQKWYGDLRGKPFAIEAENSILDISGFSKQYNCAFIWQKDGVKKLNLYLIINYFKGGKLRFKKIKPEAFEANRFYTVINKKSGEIVPMEVNFNFDDPNLIILPLAFGKRQGREFIWNDLLSLETGSLKLANGRVIEKTLYNRRTRQDEPALFVALTFERREVLDSSNIKPMNLIGVDRGENIPAVIALTDPEGCPLSRFKDSLGNPTHILRIGESYKEKQRTIQAKKEVEQRRAGGYSRKYASKAKNLADDMVRNTARDLLYYAVTQDAMLIFENLSRGFGRQGKRTFMAERQYTRMEDWLTAKLAYEGLPSKTYLSKTLAQYTSKTCSNCGFTITSADYDRVLEKLKKTATGWMTTINGKELKVEGQITYYNRYKRQNVVKDLSVELDRLSEESVNNDISSWTKGRSGEALSLLKKRFSHRPVQEKFVCLNCGFETHADEQAALNIARSWLFLRSQEYKKYQTNKTTGNTDKRAFVETWQSFYRKKLKEVWKPAV

SEQ ID NO: 41436 - protein, 978 aa, synthetic construct
  REGION 1..978: note = engineered CasX variant
QEIGRINKIRRRLVKDSNTKKAGKTGPMKTLLVRVMTPDLRERLENLRKKPENIPQPISNTSRANLNKLLTDYTEMKKAILHVYWEEFQKDPVGLMSRVAQPASKKIDQNKLKPEMDEKGNLTTAGFACSQCGQPLFVYKLEQVSEKGKAYTNYFGRCNVAEHEKLILLAQLKPEKDSDEAVTYSLGKFGQRALDFYSIHVTKESTHPVKPLAQIAGNRYASSPVGKALSDACMGTIASFLSKYQDIIIEHQKVVKGNQKRLESLRELAGKENLEYPSVTLPPQPHTKEGVDAYNEVIARVRMWVNLNLWQKLKLSRDDAKPLLRLKGFPSFPLVERQANEVDWWDMVCNVKKLINEKKEDGKVFWQNLAIYKRQEALRPYLSSEEDRKKGKKFARYQLGDLLLHLEKKHGEDWGKVYDEAWERIDKKVEGLSKHIKLEEERRSEDAQSKAALTDWLRAKASFVIEGLKEADKDEFCRCELKLQKWYGDLRGKPFAIEAENSILDISGFSKQYNCAFIWQKDGVKKLNLYLIINYFKGGKLRFKKIKPEAFEANRFYTVINKKSGEIVPMEVNFNFDDPNLIILPLAFGKRQGREFIWNDLLSLETGSLKLANGRVIEKTLYNRRTRQDEPALFVALTFERREVLDSSNIKPMNLIGVDRGENIPAVIALTDPEGCPLSRFKDSLGNPTHILRIGESYKEKQRTIQAKKEVEQRRAGGYSRKYASKAKNLADDMVRNTARDLLYYAVTQDAMLIFENLSRGFGRQGKRTFMAERQYTRMEDWLTAKLAYEGLPSKTYLSKTLAQYTSKTCSNCGFTITSADYDRVLEKLKKTATGWMTTINGKELKVEGQITYYNRYKRQNVVKDLSVELDRLSEESVNNDISSWTKGRSGEALSLLKKRFSHRPVQEKFVCLNCGFETHADEQAALNIARSWLFLRSQEYKKYQTNKTTGNTDKRAFVETWQSFYRKKLKEVWKPAV

SEQ ID NO: 41437 - protein, 978 aa, synthetic construct
  REGION 1..978: note = engineered CasX variant
QEIGRINKIRRRLVKDSNTKKAGKTGPMKTLLVRVMTPDLRERLENLRKKPENIPQPISNTSRANLNKLLTDYTEMKKAILHVYWEEFQKDPVGLMSRVAQPASKKIDQNKLKPEMDEKGNLTTAGFACSQCGQPLFVYKLEQVSEKGKAYTNYFGRCNVAEHEKLILLAQLKPEKDSDEAVTYSLGKFGQRALDFYSIHVTKESTHPVKPLAQIAGNRYASTPVGKALSDACMGTIASFLSKYQDIIIEHQKVVKGNQKRLESLRELAGKENLEYPSVTLPPQPHTKEGVDAYNEVIARVRMWVNLNLWQKLKLSRDDAKPLLRLKGFPSFPLVERQANEVDWWDMVCNVKKLINEKKEDGKVFWQNLAIYKRQEALRPYLSSEEDRKKGKKFARYQLGDLLLHLEKKHGEDWGKVYDEAWERIDKKVEGLSKHIKLEEERRSEDAQSKAALTDWLRAKASFVIEGLKEADKDEFCRCELKLQKWYGDLRGKPFAIEAENSILDISGFSKQYNCAFIWQKDGVKKLNLYLIINYFKGGKLRFKKIKPEAFEANRFYTVINKKSGEIVPMEVNFNFDDPNLIILPLAFGKRQGREFIWNDLLSLETGSLKLANGRVIEKTLYNRRTRQDEPALFVALTFERREVLDSSNIKPMNLIGVDRGENIPAVIALTDPEGCPLSRFKDSLGNPTHILRIGESYKEKQRTIQAKKEVEQRRAGGYSRKYASKAKNLADDMVRNTARDLLYYAVTQDAMLIFENLSRGFGRQGKRTFMAERQYTRMEDWLTAKLAYEGLPSKTYLSKTLAQYTSKTCSNCGFTITSADYDRVLEKLKKTATGWMTTINGKELKVEGQITYYNRYKRQNVVKDLSVELDRLSEESVNNDISSWTKGRSGEALSLLKKRFSHRPVQEKFVCLNCGFETHADEQAALNIARSWLFLRSQEYKKYQTNKTTGNTDKRAFVETWQSFYRKKLKEVWKPAV

SEQ ID NO: 41438 - protein, 978 aa, synthetic construct
  REGION 1..978: note = engineered CasX variant
QEIGRINKIRRRLVKDSNTKKAGKTGPMKTLLVRVMTPDLRERLENLRKKPENIPQPISNTSRANLNKLLTDYTEMKKAILHVYWEEFQKDPVGLMSRVAQPASKKIDQNKLKPEMDEKGNLTTAGFACSQCGQPLFVYKLEQVSEKGKAYTNYFGRCNVAEHEKLILLAQLKPEKDSDEAVTYSLGKFGQRALDFYSIHVTKESTHPVKPLAQIAGNRYASAPVGKALSDACMGTIASFLSKYQDIIIEHQKVVKGNQKRLESLRELAGKENLEYPSVTLPPQPHTKEGVDAYNEVIARVRMWVNLNLWQKLKLSRDDAKPLLRLKGFPSFPLVERQANEVDWWDMVCNVKKLINEKKEDGKVFWQNLAIYKRQEALRPYLSSEEDRKKGKKFARYQLGDLLLHLEKKHGEDWGKVYDEAWERIDKKVEGLSKHIKLEEERRSEDAQSKAALTDWLRAKASFVIEGLKEADKDEFCRCELKLQKWYGDLRGKPFAIEAENSILDISGFSKQYNCAFIWQKDGVKKLNLYLIINYFKGGKLRFKKIKPEAFEANRFYTVINKKSGEIVPMEVNFNFDDPNLIILPLAFGKRQGREFIWNDLLSLETGSLKLANGRVIEKTLYNRRTRQDEPALFVALTFERREVLDSSNIKPMNLIGVDRGENIPAVIALTDPEGCPLSRFKDSLGNPTHILRIGESYKEKQRTIQAKKEVEQRRAGGYSRKYASKAKNLADDMVRNTARDLLYYAVTQDAMLIFENLSRGFGRQGKRTFMAERQYTRMEDWLTAKLAYEGLPSKTYLSKTLAQYTSKTCSNCGFTITSADYDRVLEKLKKTATGWMTTINGKELKVEGQITYYNRYKRQNVVKDLSVELDRLSEESVNNDISSWTKGRSGEALSLLKKRFSHRPVQEKFVCLNCGFETHADEQAALNIARSWLFLRSQEYKKYQTNKTTGNTDKRAFVETWQSFYRKKLKEVWKPAV

SEQ ID NO: 41439 - protein, 978 aa, synthetic construct
  REGION 1..978: note = engineered CasX variant
QEIGRINKIRRRLVKDSNTKKAGKTGPMKTLLVRVMTPDLRERLENLRKKPENIPQPISNTSRANLNKLLTDYTEMKKAILHVYWEEFQKDPVGLMSRVAQPASKKIDQNKLKPEMDEKGNLTTAGFACSQCGQPLFVYKLEQVSEKGKAYTNYFGRCNVAEHEKLILLAQLKPEKDSDEAVTYSLGKFGQRALDFYSIHVTKESTHPVKPLAQIAGNRYASVPVGKALSDACMGTIASFLSKYQDIIIEHQKVVKGNQKRLESLRELAGKENLEYPSVTLPPQPHTKEGVDAYNEVIARVRMWVNLNLWQKLKLSRDDAKPLLRLKGFPSFPLVERQANEVDWWDMVCNVKKLINEKKEDGKVFWQNLAIYKRQEALRPYLSSEEDRKKGKKFARYQLGDLLLHLEKKHGEDWGKVYDEAWERIDKKVEGLSKHIKLEEERRSEDAQSKAALTDWLRAKASFVIEGLKEADKDEFCRCELKLQKWYGDLRGKPFAIEAENSILDISGFSKQYNCAFIWQKDGVKKLNLYLIINYFKGGKLRFKKIKPEAFEANRFYTVINKKSGEIVPMEVNFNFDDPNLIILPLAFGKRQGREFIWNDLLSLETGSLKLANGRVIEKTLYNRRTRQDEPALFVALTFERREVLDSSNIKPMNLIGVDRGENIPAVIALTDPEGCPLSRFKDSLGNPTHILRIGESYKEKQRTIQAKKEVEQRRAGGYSRKYASKAKNLADDMVRNTARDLLYYAVTQDAMLIFENLSRGFGRQGKRTFMAERQYTRMEDWLTAKLAYEGLPSKTYLSKTLAQYTSKTCSNCGFTITSADYDRVLEKLKKTATGWMTTINGKELKVEGQITYYNRYKRQNVVKDLSVELDRLSEESVNNDISSWTKGRSGEALSLLKKRFSHRPVQEKFVCLNCGFETHADEQAALNIARSWLFLRSQEYKKYQTNKTTGNTDKRAFVETWQSFYRKKLKEVWKPAV

SEQ ID NO: 41440 - protein, 978 aa, synthetic construct
  REGION 1..978: note = engineered CasX variant
QEIGRINKIRRRLVKDSNTKKAGKTGPMKTLLVRVMTPDLRERLENLRKKPENIPQPISNTSRANLNKLLTDYTEMKKAILHVYWEEFQKDPVGLMSRVAQPASKKIDQNKLKPEMDEKGNLTTAGFACSQCGQPLFVYKLEQVSEKGKAYTNYFGRCNVAEHEKLIKLAQLKPEKDSDEAVTYSLGKFGQRALDFYSIHVTKESTHPVKPLAQIAGNRYASGPVGKALSDACMGTIASFLSKYQDIIIEHQKVVKGNQKRLESLRELAGKENLEYPSVTLPPQPHTKEGVDAYNEVIARVRMWVNLNLWQKLKLSRDDAKPLLRLKGFPSFPLVERQANEVDWWDMVCNVKKLINEKKEDGKVFWQNLAIYKRQEALRPYLSSEEDRKKGKKFARYQLGDLLLHLEKKHGEDWGKVYDEAWERIDKKVEGLSKHIKLEEERRSEDAQSKAALTDWLRAKASFVIEGLKEADKDEFCRCELKLQKWYGDLRGKPFAIEAENSILDISGFSKQYNCAFIWQKDGVKKLNLYLIINYFKGGKLRFKKIKPEAFEANRFYTVINKKSGEIVPMEVNFNFDDPNLIILPLAFGKRQGREFIWNDLLSLETGSLKLANGRVIEKTLYNRRTRQDEPALFVALTFERREVLDSSNIKPMNLIGVDRGENIPAVIALTDPEGCPLSRFKDSLGNPTHILRIGESYKEKQRTIQAKKEVEQRRAGGYSRKYASKAKNLADDMVRNTARDLLYYAVTQDAMLIFENLSRGFGRQGKRTFMAERQYTRMEDWLTAKLAYEGLPSKTYLSKTLAQYTSKTCSNCGFTITSADYDRVLEKLKKTATGWMTTINGKELKVEGQITYYNRYKRQNVVKDLSVELDRLSEESVNNDISSWTKGRSGEALSLLKKRFSHRPVQEKFVCLNCGFETHADEQAALNIARSWLFLRSQEYKKYQTNKTTGNTDKRAFVETWQSFYRKKLKEVWKPAV

SEQ ID NO: 41441 - protein, 977 aa, synthetic construct
  REGION 1..977: note = engineered CasX variant
QEIGRINKIRRRLVKDSNTKKAGKTGPMKTLLVRVMTPDLRERLENLRKKPENIPQPISNTSRANLNKLLTDYTEMKKAILHVYWEEFQKDPVGLMSRVAQPASKKIDQNKLKPEMDEKGNLTTAGFACSQCGQPLFVYKLEQVSEKGKAYTNYFGRCNVAEHEKLILLAQLKPEKDSDEAVTYSLGKFGQRALDFYSIHVTKESTHPVKPLAQIAGNRYASPVGKALSDACMGTIASFLSKYQDIIIEHQKVVKGNQKRLESLRELAGKENLEYPSVTLPPQPHTKEGVDAYNEVIARVRMWVNLNLWQKLKLSRDDAKPLLRLKGFPSFPLVERQANEVDWWDMVCNVKKLINEKKEDGKVFWQNLAIYKRQEALRPYLSSEEDRKKGKKFARYQLGDLLLHLEKKHGEDWGKVYDEAWERIDKKVEGLSKHIKLEEERRSEDAQSKAALTDWLRAKASFVIEGLKEADKDEFCRCELKLQKWYGDLRGKPFAIEAENSILDISGFSKQYNCAFIWQKDGVKKLNLYLIINYFKGGKLRFKKIKPEAFEANRFYTVINKKSGEIVPMEVNFNFDDPNLIILPLAFGKRQGREFIWNDLLSLETGSLKLANGRVIEKTLYNRRTRQDEPALFVALTFERREVLDSSNIKPMNLIGVDRGENIPAVIALTDPEGCPLSRFKDSLGNPTHILRIGESYKEKQRTIQAKKEVEQRRAGGYSRKYASKAKNLADDMVRNTARDLLYYAVTQDAMLIFENLSRGFGRQGKRTFMAERQYTRMEDWLTAKLAYEGLPSKTYLSKTLAQYTSKTCSNCGFTITSADYDRVLEKLKKTATGWMTTINGKELKVEGQITYYNRYKRQNVVKDLSVELDRLSEESVNNDISSWTKGRSGEALSLLKKRFSHRPVQEKFVCLNCGFETHADEQAALNIARSWLFLRSQEYKKYQTNKTTGNTDKRAFVETWQSFYRKKLKEVWKPAV

SEQ ID NO: 41442 - protein, 978 aa, synthetic construct
  REGION 1..978: note = engineered CasX variant
QEIGRINKIRRRLVKDSNTKKAGKTGPMKTLLVRVMTPDLRERLENLRKKPENIPQPISNTSRANLNKLLTDYTEMKKAILHVYWEEFQKDPVGLMSRVAQPASKKIDQNKLKPEMDEKGNLTTAGFACSQCGQPLFVYKLEQVSEKGKAYTNYFGRCNVAEHEKLILLAQLKPEKDSDEAVTYSLGKFGQRALDFYSIHVTKESTHPVKPLAQIAGNRYASYPVGKALSDACMGTIASFLSKYQDIIIEHQKVVKGNQKRLESLRELAGKENLEYPSVTLPPQPHTKEGVDAYNEVIARVRMWVNLNLWQKLKLSRDDAKPLLRLKGFPSFPLVERQANEVDWWDMVCNVKKLINEKKEDGKVFWQNLAGYKRQEALRPYLSSEEDREKGKKFARYQLGDLLLHLEKKHGEDWGKVYDEAWERIDKKVEGLSKHIKLEEERRSEDAQSKAALTDWLRAKASFVIEGLKEADKDEFCRCELKLQKWYGDLRGKPFAIEAENSILDISGFSKQYNCAFIWQKDGVKKLNLYLIINYFKGGKLRFKKIKPEAFEANRFYTVINKKSGEIVPMEVNFNFDDPNLIILPLAFGKRQGREFIWNDLLSLETGSLKLANGRVIEKTLYNRRTRQDEPALFVALTFERREVLDSSNIKPMNLIGVDRGENIPAVIALTDPEGCPLSRFKDSLGNPTHILRIGESYKEKQRTIQAKKEVEQRRAGGYSRKYASKAKNLADDMVRNTARDLLYYAVTQDAMLIFENLSRGFGRQGKRTFMAERQYTRMEDWLTAKLAYEGLPSKTYLSKTLAQYTSKTCSNCGFTITSADYDRVLEKLKKTATGWMTTINGKELKVEGQITYYNRYKRQNVVKDLSVELDRLSEESVNNDISSWTKGRSGEALSLLKKRFSHRPVQEKFVCLNCGFETHADEQAALNIARSWLFLRSQEYKKYQTNKTTGNTDKRAFVETWQSFYRKKLKEVWKPAV

SEQ ID NO: 41443 - protein, 978 aa, synthetic construct
  REGION 1..978: note = engineered CasX variant
QEIGRINKIRRRLVKDSNTKKAGKTGPMKTLLVRVMTPDLRERLENLRKKPENIPQPISNTSRANLNKLLTDYTEMKKAILHVYWEEFQKDPVGLMSRVAQPASKKIDQNKLKPEMDEKGNLTTAGFACSQCGQPLFVYKLEQVSEKGKAYTNYFGRCNVAEHEKLILLAQLKPEKDSDEAVTYSLGKFGQRALDFYSIHVTKESTHPVKPLAQIAGNRYASHPVGKALSDACMGTIASFLSKYQDIIIEHQKVVKGNQKRLESLRELAGKENLEYPSVTLPPQPHTKEGVDAYNEVIARVRMWVNLNLWQKLKLSRDDAKPLLRLKGFPSFPLVERQANEVDWWDMVCNVKKLINEKKEDGKVFWQNLAGYKRQEALRPYLSSEEDREKGKKFARYQLGDLLLHLEKKHGEDWGKVYDEAWERIDKKVEGLSKHIKLEEERRSEDAQSKAALTDWLRAKASFVIEGLKEADKDEFCRCELKLQKWYGDLRGKPFAIEAENSILDISGFSKQYNCAFIWQKDGVKKLNLYLIINYFKGGKLRFKKIKPEAFEANRFYTVINKKSGEIVPMEVNFNFDDPNLIILPLAFGKRQGREFIWNDLLSLETGSLKLANGRVIEKTLYNRRTRQDEPALFVALTFERREVLDSSNIKPMNLIGVDRGENIPAVIALTDPEGCPLSRFKDSLGNPTHILRIGESYKEKQRTIQAKKEVEQRRAGGYSRKYASKAKNLADDMVRNTARDLLYYAVTQDAMLIFENLSRGFGRQGKRTFMAERQYTRMEDWLTAKLAYEGLPSKTYLSKTLAQYTSKTCSNCGFTITSADYDRVLEKLKKTATGWMTTINGKELKVEGQITYYNRYKRQNVVKDLSVELDRLSEESVNNDISSWTKGRSGEALSLLKKRFSHRPVQEKFVCLNCGFETHADEQAALNIARSWLFLRSQEYKKYQTNKTTGNTDKRAFVETWQSFYRKKLKEVWKPAV

SEQ ID NO: 41444 - protein, 978 aa, synthetic construct
  REGION 1..978: note = engineered CasX variant
QEIGRINKIRRRLVKDSNTKKAGKTGPMKTLLVRVMTPDLRERLENLRKKPENIPQPISNTSRANLNKLLTDYTEMKKAILHVYWEEFQKDPVGLMSRVAQPASKKIDQNKLKPEMDEKGNLTTAGFACSQCGQPLFVYKLEQVSEKGKAYTNYFGRCNVAEHEKLILLAQLKPEKDSDEAVTYSLGKFGQRALDFYSIHVTKESTHPVKPLAQIAGNRYASSPVGKALSDACMGTIASFLSKYQDIIIEHQKVVKGNQKRLESLRELAGKENLEYPSVTLPPQPHTKEGVDAYNEVIARVRMWVNLNLWQKLKLSRDDAKPLLRLKGFPSFPLVERQANEVDWWDMVCNVKKLINEKKEDGKVFWQNLAGYKRQEALRPYLSSEEDREKGKKFARYQLGDLLLHLEKKHGEDWGKVYDEAWERIDKKVEGLSKHIKLEEERRSEDAQSKAALTDWLRAKASFVIEGLKEADKDEFCRCELKLQKWYGDLRGKPFAIEAENSILDISGFSKQYNCAFIWQKDGVKKLNLYLIINYFKGGKLRFKKIKPEAFEANRFYTVINKKSGEIVPMEVNFNFDDPNLIILPLAFGKRQGREFIWNDLLSLETGSLKLANGRVIEKTLYNRRTRQDEPALFVALTFERREVLDSSNIKPMNLIGVDRGENIPAVIALTDPEGCPLSRFKDSLGNPTHILRIGESYKEKQRTIQAKKEVEQRRAGGYSRKYASKAKNLADDMVRNTARDLLYYAVTQDAMLIFENLSRGFGRQGKRTFMAERQYTRMEDWLTAKLAYEGLPSKTYLSKTLAQYTSKTCSNCGFTITSADYDRVLEKLKKTATGWMTTINGKELKVEGQITYYNRYKRQNVVKDLSVELDRLSEESVNNDISSWTKGRSGEALSLLKKRFSHRPVQEKFVCLNCGFETHADEQAALNIARSWLFLRSQEYKKYQTNKTTGNTDKRAFVETWQSFYRKKLKEVWKPAV

SEQ ID NO: 41445 - protein, 978 aa, synthetic construct
  REGION 1..978: note = engineered CasX variant
QEIGRINKIRRRLVKDSNTKKAGKTGPMKTLLVRVMTPDLRERLENLRKKPENIPQPISNTSRANLNKLLTDYTEMKKAILHVYWEEFQKDPVGLMSRVAQPASKKIDQNKLKPEMDEKGNLTTAGFACSQCGQPLFVYKLEQVSEKGKAYTNYFGRCNVAEHEKLILLAQLKPEKDSDEAVTYSLGKFGQRALDFYSIHVTKESTHPVKPLAQIAGNRYASTPVGKALSDACMGTIASFLSKYQDIIIEHQKVVKGNQKRLESLRELAGKENLEYPSVTLPPQPHTKEGVDAYNEVIARVRMWVNLNLWQKLKLSRDDAKPLLRLKGFPSFPLVERQANEVDWWDMVCNVKKLINEKKEDGKVFWQNLAGYKRQEALRPYLSSEEDREKGKKFARYQLGDLLLHLEKKHGEDWGKVYDEAWERIDKKVEGLSKHIKLEEERRSEDAQSKAALTDWLRAKASFVIEGLKEADKDEFCRCELKLQKWYGDLRGKPFAIEAENSILDISGFSKQYNCAFIWQKDGVKKLNLYLIINYFKGGKLRFKKIKPEAFEANRFYTVINKKSGEIVPMEVNFNFDDPNLIILPLAFGKRQGREFIWNDLLSLETGSLKLANGRVIEKTLYNRRTRQDEPALFVALTFERREVLDSSNIKPMNLIGVDRGENIPAVIALTDPEGCPLSRFKDSLGNPTHILRIGESYKEKQRTIQAKKEVEQRRAGGYSRKYASKAKNLADDMVRNTARDLLYYAVTQDAMLIFENLSRGFGRQGKRTFMAERQYTRMEDWLTAKLAYEGLPSKTYLSKTLAQYTSKTCSNCGFTITSADYDRVLEKLKKTATGWMTTINGKELKVEGQITYYNRYKRQNVVKDLSVELDRLSEESVNNDISSWTKGRSGEALSLLKKRFSHRPVQEKFVCLNCGFETHADEQAALNIARSWLFLRSQEYKKYQTNKTTGNTDKRAFVETWQSFYRKKLKEVWKPAV

SEQ ID NO: 41446 - protein, 978 aa, synthetic construct
  REGION 1..978: note = engineered CasX variant
QEIGRINKIRRRLVKDSNTKKAGKTGPMKTLLVRVMTPDLRERLENLRKKPENIPQPISNTSRANLNKLLTDYTEMKKAILHVYWEEFQKDPVGLMSRVAQPASKKIDQNKLKPEMDEKGNLTTAGFACSQCGQPLFVYKLEQVSEKGKAYTNYFGRCNVAEHEKLILLAQLKPEKDSDEAVTYSLGKFGQRALDFYSIHVTKESTHPVKPLAQIAGNRYASAPVGKALSDACMGTIASFLSKYQDIIIEHQKVVKGNQKRLESLRELAGKENLEYPSVTLPPQPHTKEGVDAYNEVIARVRMWVNLNLWQKLKLSRDDAKPLLRLKGFPSFPLVERQANEVDWWDMVCNVKKLINEKKEDGKVFWQNLAGYKRQEALRPYLSSEEDREKGKKFARYQLGDLLLHLEKKHGEDWGKVYDEAWERIDKKVEGLSKHIKLEEERRSEDAQSKAALTDWLRAKASFVIEGLKEADKDEFCRCELKLQKWYGDLRGKPFAIEAENSILDISGFSKQYNCAFIWQKDGVKKLNLYLIINYFKGGKLRFKKIKPEAFEANRFYTVINKKSGEIVPMEVNFNFDDPNLIILPLAFGKRQGREFIWNDLLSLETGSLKLANGRVIEKTLYNRRTRQDEPALFVALTFERREVLDSSNIKPMNLIGVDRGENIPAVIALTDPEGCPLSRFKDSLGNPTHILRIGESYKEKQRTIQAKKEVEQRRAGGYSRKYASKAKNLADDMVRNTARDLLYYAVTQDAMLIFENLSRGFGRQGKRTFMAERQYTRMEDWLTAKLAYEGLPSKTYLSKTLAQYTSKTCSNCGFTITSADYDRVLEKLKKTATGWMTTINGKELKVEGQITYYNRYKRQNVVKDLSVELDRLSEESVNNDISSWTKGRSGEALSLLKKRFSHRPVQEKFVCLNCGFETHADEQAALNIARSWLFLRSQEYKKYQTNKTTGNTDKRAFVETWQSFYRKKLKEVWKPAV

SEQ ID NO: 41447 - protein, 978 aa, synthetic construct
  REGION 1..978: note = engineered CasX variant
QEIGRINKIRRRLVKDSNTKKAGKTGPMKTLLVRVMTPDLRERLENLRKKPENIPQPISNTSRANLNKLLTDYTEMKKAILHVYWEEFQKDPVGLMSRVAQPASKKIDQNKLKPEMDEKGNLTTAGFACSQCGQPLFVYKLEQVSEKGKAYTNYFGRCNVAEHEKLILLAQLKPEKDSDEAVTYSLGKFGQRALDFYSIHVTKESTHPVKPLAQIAGNRYASVPVGKALSDACMGTIASFLSKYQDIIIEHQKVVKGNQKRLESLRELAGKENLEYPSVTLPPQPHTKEGVDAYNEVIARVRMWVNLNLWQKLKLSRDDAKPLLRLKGFPSFPLVERQANEVDWWDMVCNVKKLINEKKEDGKVFWQNLAGYKRQEALRPYLSSEEDREKGKKFARYQLGDLLLHLEKKHGEDWGKVYDEAWERIDKKVEGLSKHIKLEEERRSEDAQSKAALTDWLRAKASFVIEGLKEADKDEFCRCELKLQKWYGDLRGKPFAIEAENSILDISGFSKQYNCAFIWQKDGVKKLNLYLIINYFKGGKLRFKKIKPEAFEANRFYTVINKKSGEIVPMEVNFNFDDPNLIILPLAFGKRQGREFIWNDLLSLETGSLKLANGRVIEKTLYNRRTRQDEPALFVALTFERREVLDSSNIKPMNLIGVDRGENIPAVIALTDPEGCPLSRFKDSLGNPTHILRIGESYKEKQRTIQAKKEVEQRRAGGYSRKYASKAKNLADDMVRNTARDLLYYAVTQDAMLIFENLSRGFGRQGKRTFMAERQYTRMEDWLTAKLAYEGLPSKTYLSKTLAQYTSKTCSNCGFTITSADYDRVLEKLKKTATGWMTTINGKELKVEGQITYYNRYKRQNVVKDLSVELDRLSEESVNNDISSWTKGRSGEALSLLKKRFSHRPVQEKFVCLNCGFETHADEQAALNIARSWLFLRSQEYKKYQTNKTTGNTDKRAFVETWQSFYRKKLKEVWKPAV

SEQ ID NO: 41448 - protein, 978 aa, synthetic construct
  REGION 1..978: note = engineered CasX variant
QEIGRINKIRRRLVKDSNTKKAGKTGPMKTLLVRVMTPDLRERLENLRKKPENIPQPISNTSRANLNKLLTDYTEMKKAILHVYWEEFQKDPVGLMSRVAQPASKKIDQNKLKPEMDEKGNLTTAGFACSQCGQPLFVYKLEQVSEKGKAYTNYFGRCNVAEHEKLIKLAQLKPEKDSDEAVTYSLGKFGQRALDFYSIHVTKESTHPVKPLAQIAGNRYASGPVGKALSDACMGTIASFLSKYQDIIIEHQKVVKGNQKRLESLRELAGKENLEYPSVTLPPQPHTKEGVDAYNEVIARVRMWVNLNLWQKLKLSRDDAKPLLRLKGFPSFPLVERQANEVDWWDMVCNVKKLINEKKEDGKVFWQNLAGYKRQEALRPYLSSEEDREKGKKFARYQLGDLLLHLEKKHGEDWGKVYDEAWERIDKKVEGLSKHIKLEEERRSEDAQSKAALTDWLRAKASFVIEGLKEADKDEFCRCELKLQKWYGDLRGKPFAIEAENSILDISGFSKQYNCAFIWQKDGVKKLNLYLIINYFKGGKLRFKKIKPEAFEANRFYTVINKKSGEIVPMEVNFNFDDPNLIILPLAFGKRQGREFIWNDLLSLETGSLKLANGRVIEKTLYNRRTRQDEPALFVALTFERREVLDSSNIKPMNLIGVDRGENIPAVIALTDPEGCPLSRFKDSLGNPTHILRIGESYKEKQRTIQAKKEVEQRRAGGYSRKYASKAKNLADDMVRNTARDLLYYAVTQDAMLIFENLSRGFGRQGKRTFMAERQYTRMEDWLTAKLAYEGLPSKTYLSKTLAQYTSKTCSNCGFTITSADYDRVLEKLKKTATGWMTTINGKELKVEGQITYYNRYKRQNVVKDLSVELDRLSEESVNNDISSWTKGRSGEALSLLKKRFSHRPVQEKFVCLNCGFETHADEQAALNIARSWLFLRSQEYKKYQTNKTTGNTDKRAFVETWQSFYRKKLKEVWKPAV

SEQ ID NO: 41449 - protein, 977 aa, synthetic construct
  REGION 1..977: note = engineered CasX variant
QEIGRINKIRRRLVKDSNTKKAGKTGPMKTLLVRVMTPDLRERLENLRKKPENIPQPISNTSRANLNKLLTDYTEMKKAILHVYWEEFQKDPVGLMSRVAQPASKKIDQNKLKPEMDEKGNLTTAGFACSQCGQPLFVYKLEQVSEKGKAYTNYFGRCNVAEHEKLILLAQLKPEKDSDEAVTYSLGKFGQRALDFYSIHVTKESTHPVKPLAQIAGNRYASPVGKALSDACMGTIASFLSKYQDIIIEHQKVVKGNQKRLESLRELAGKENLEYPSVTLPPQPHTKEGVDAYNEVIARVRMWVNLNLWQKLKLSRDDAKPLLRLKGFPSFPLVERQANEVDWWDMVCNVKKLINEKKEDGKVFWQNLAGYKRQEALRPYLSSEEDREKGKKFARYQLGDLLLHLEKKHGEDWGKVYDEAWERIDKKVEGLSKHIKLEEERRSEDAQSKAALTDWLRAKASFVIEGLKEADKDEFCRCELKLQKWYGDLRGKPFAIEAENSILDISGFSKQYNCAFIWQKDGVKKLNLYLIINYFKGGKLRFKKIKPEAFEANRFYTVINKKSGEIVPMEVNFNFDDPNLIILPLAFGKRQGREFIWNDLLSLETGSLKLANGRVIEKTLYNRRTRQDEPALFVALTFERREVLDSSNIKPMNLIGVDRGENIPAVIALTDPEGCPLSRFKDSLGNPTHILRIGESYKEKQRTIQAKKEVEQRRAGGYSRKYASKAKNLADDMVRNTARDLLYYAVTQDAMLIFENLSRGFGRQGKRTFMAERQYTRMEDWLTAKLAYEGLPSKTYLSKTLAQYTSKTCSNCGFTITSADYDRVLEKLKKTATGWMTTINGKELKVEGQITYYNRYKRQNVVKDLSVELDRLSEESVNNDISSWTKGRSGEALSLLKKRFSHRPVQEKFVCLNCGFETHADEQAALNIARSWLFLRSQEYKKYQTNKTTGNTDKRAFVETWQSFYRKKLKEVWKPAV

SEQ ID NO: 41450 - protein, 978 aa, synthetic construct
  REGION 1..978: note = engineered CasX variant
QEIGRINKIRRRLVKDSNTKKAGKTGPMKTLLVRVMTPDLRERLENLRKKPENIPQPISNTSRANLNKLLTDYTEMKKAILHVYWEEFQKDPVGLMSRVAQPASKKIDQNKLKPEMDEKGNLTTAGFACSQCGQPLFVYKLEQVSEKGKAYTNYFGRCNVAEHEKLILLAQLKPEKDSDEAVTYSLGKFGQRALDFYSIHVTKESTHPVKPLAQIAGNRYASYPVGKALSDACMGTIASFLSKYQDIIIEHQKVVKGNQKRLESLRELAGKENLEYPSVTLPPQPHTKEGVDAYNEVIARVRMWVNLNLWQKLKLSRDDAKPLLRLKGFPSFPLVERQANEVDWWDMVCNVKKLINEKKEDGKVFWQNLAGYKRQEALRPYLSSEEDRKKGKKFARYQLGDLLLHLEKKHGEDWGKVYDEAWERIDKKVEGLSKHIKLEEERRSEDAQSKAALTDWLRAKASFVIEGLKEADKDEFCRCELKLQKWYGDLRGKPFAIEAENSILDISGFSKQYNCAFIWQKDGVKKLNLYLIINYFKGGKLRFKKIKPEAFEANRFYTVINKKSGEIVIMEVNFNFDDPNLIILPLAFGKRQGREFIWNDLLSLETGSLKLANGRVIEKTLYNRRTRQDEPALFVALTFERREVLDSSNIKPMNLIGVDRGENIPAVIALTDPEGCPLSRFKDSLGNPTHILRIGESYKEKQRTIQAKKEVEQRRAGGYSRKYASKAKNLADDMVRNTARDLLYYAVTQDAMLIFENLSRGFGRQGKRTFMAERQYTRMEDWLTAKLAYEGLPSKTYLSKTLAQYTSKTCSNCGFTITSADYDRVLEKLKKTATGWMTTINGKELKVEGQITYYNRYKRQNVVKDLSVELDRLSEESVNNDISSWTKGRSGEALSLLKKRFSHRPVQEKFVCLNCGFETHADEQAALNIARSWLFLRSQEYKKYQTNKTTGNTDKRAFVETWQSFYRKKLKEVWKPAV

SEQ ID NO: 41451 - protein, 978 aa, synthetic construct
  REGION 1..978: note = engineered CasX variant
QEIGRINKIRRRLVKDSNTKKAGKTGPMKTLLVRVMTPDLRERLENLRKKPENIPQPISNTSRANLNKLLTDYTEMKKAILHVYWEEFQKDPVGLMSRVAQPASKKIDQNKLKPEMDEKGNLTTAGFACSQCGQPLFVYKLEQVSEKGKAYTNYFGRCNVAEHEKLILLAQLKPEKDSDEAVTYSLGKFGQRALDFYSIHVTKESTHPVKPLAQIAGNRYASHPVGKALSDACMGTIASFLSKYQDIIIEHQKVVKGNQKRLESLRELAGKENLEYPSVTLPPQPHTKEGVDAYNEVIARVRMWVNLNLWQKLKLSRDDAKPLLRLKGFPSFPLVERQANEVDWWDMVCNVKKLINEKKEDGKVFWQNLAGYKRQEALRPYLSSEEDRKKGKKFARYQLGDLLLHLEKKHGEDWGKVYDEAWERIDKKVEGLSKHIKLEEERRSEDAQSKAALTDWLRAKASFVIEGLKEADKDEFCRCELKLQKWYGDLRGKPFAIEAENSILDISGFSKQYNCAFIWQKDGVKKLNLYLIINYFKGGKLRFKKIKPEAFEANRFYTVINKKSGEIVIMEVNFNFDDPNLIILPLAFGKRQGREFIWNDLLSLETGSLKLANGRVIEKTLYNRRTRQDEPALFVALTFERREVLDSSNIKPMNLIGVDRGENIPAVIALTDPEGCPLSRFKDSLGNPTHILRIGESYKEKQRTIQAKKEVEQRRAGGYSRKYASKAKNLADDMVRNTARDLLYYAVTQDAMLIFENLSRGFGRQGKRTFMAERQYTRMEDWLTAKLAYEGLPSKTYLSKTLAQYTSKTCSNCGFTITSADYDRVLEKLKKTATGWMTTINGKELKVEGQITYYNRYKRQNVVKDLSVELDRLSEESVNNDISSWTKGRSGEALSLLKKRFSHRPVQEKFVCLNCGFETHADEQAALNIARSWLFLRSQEYKKYQTNKTTGNTDKRAFVETWQSFYRKKLKEVWKPAV

SEQ ID NO: 41452 - protein, 978 aa, synthetic construct
  REGION 1..978: note = engineered CasX variant
QEIGRINKIRRRLVKDSNTKKAGKTGPMKTLLVRVMTPDLRERLENLRKKPENIPQPISNTSRANLNKLLTDYTEMKKAILHVYWEEFQKDPVGLMSRVAQPASKKIDQNKLKPEMDEKGNLTTAGFACSQCGQPLFVYKLEQVSEKGKAYTNYFGRCNVAEHEKLILLAQLKPEKDSDEAVTYSLGKFGQRALDFYSIHVTKESTHPVKPLAQIAGNRYASSPVGKALSDACMGTIASFLSKYQDIIIEHQKVVKGNQKRLESLRELAGKENLEYPSVTLPPQPHTKEGVDAYNEVIARVRMWVNLNLWQKLKLSRDDAKPLLRLKGFPSFPLVERQANEVDWWDMVCNVKKLINEKKEDGKVFWQNLAGYKRQEALRPYLSSEEDRKKGKKFARYQLGDLLLHLEKKHGEDWGKVYDEAWERIDKKVEGLSKHIKLEEERRSEDAQSKAALTDWLRAKASFVIEGLKEADKDEFCRCELKLQKWYGDLRGKPFAIEAENSILDISGFSKQYNCAFIWQKDGVKKLNLYLIINYFKGGKLRFKKIKPEAFEANRFYTVINKKSGEIVIMEVNFNFDDPNLIILPLAFGKRQGREFIWNDLLSLETGSLKLANGRVIEKTLYNRRTRQDEPALFVALTFERREVLDSSNIKPMNLIGVDRGENIPAVIALTDPEGCPLSRFKDSLGNPTHILRIGESYKEKQRTIQAKKEVEQRRAGGYSRKYASKAKNLADDMVRNTARDLLYYAVTQDAMLIFENLSRGFGRQGKRTFMAERQYTRMEDWLTAKLAYEGLPSKTYLSKTLAQYTSKTCSNCGFTITSADYDRVLEKLKKTATGWMTTINGKELKVEGQITYYNRYKRQNVVKDLSVELDRLSEESVNNDISSWTKGRSGEALSLLKKRFSHRPVQEKFVCLNCGFETHADEQAALNIARSWLFLRSQEYKKYQTNKTTGNTDKRAFVETWQSFYRKKLKEVWKPAV

SEQ ID NO: 41453 - protein, 978 aa, synthetic construct
  REGION 1..978: note = engineered CasX variant
QEIGRINKIRRRLVKDSNTKKAGKTGPMKTLLVRVMTPDLRERLENLRKKPENIPQPISNTSRANLNKLLTDYTEMKKAILHVYWEEFQKDPVGLMSRVAQPASKKIDQNKLKPEMDEKGNLTTAGFACSQCGQPLFVYKLEQVSEKGKAYTNYFGRCNVAEHEKLILLAQLKPEKDSDEAVTYSLGKFGQRALDFYSIHVTKESTHPVKPLAQIAGNRYASTPVGKALSDACMGTIASFLSKYQDIIIEHQKVVKGNQKRLESLRELAGKENLEYPSVTLPPQPHTKEGVDAYNEVIARVRMWVNLNLWQKLKLSRDDAKPLLRLKGFPSFPLVERQANEVDWWDMVCNVKKLINEKKEDGKVFWQNLAGYKRQEALRPYLSSEEDRKKGKKFARYQLGDLLLHLEKKHGEDWGKVYDEAWERIDKKVEGLSKHIKLEEERRSEDAQSKAALTDWLRAKASFVIEGLKEADKDEFCRCELKLQKWYGDLRGKPFAIEAENSILDISGFSKQYNCAFIWQKDGVKKLNLYLIINYFKGGKLRFKKIKPEAFEANRFYTVINKKSGEIVIMEVNFNFDDPNLIILPLAFGKRQGREFIWNDLLSLETGSLKLANGRVIEKTLYNRRTRQDEPALFVALTFERREVLDSSNIKPMNLIGVDRGENIPAVIALTDPEGCPLSRFKDSLGNPTHILRIGESYKEKQRTIQAKKEVEQRRAGGYSRKYASKAKNLADDMVRNTARDLLYYAVTQDAMLIFENLSRGFGRQGKRTFMAERQYTRMEDWLTAKLAYEGLPSKTYLSKTLAQYTSKTCSNCGFTITSADYDRVLEKLKKTATGWMTTINGKELKVEGQITYYNRYKRQNVVKDLSVELDRLSEESVNNDISSWTKGRSGEALSLLKKRFSHRPVQEKFVCLNCGFETHADEQAALNIARSWLFLRSQEYKKYQTNKTTGNTDKRAFVETWQSFYRKKLKEVWKPAV

SEQ ID NO: 41454 - protein, 978 aa, synthetic construct
  REGION 1..978: note = engineered CasX variant
QEIGRINKIRRRLVKDSNTKKAGKTGPMKTLLVRVMTPDLRERLENLRKKPENIPQPISNTSRANLNKLLTDYTEMKKAILHVYWEEFQKDPVGLMSRVAQPASKKIDQNKLKPEMDEKGNLTTAGFACSQCGQPLFVYKLEQVSEKGKAYTNYFGRCNVAEHEKLILLAQLKPEKDSDEAVTYSLGKFGQRALDFYSIHVTKESTHPVKPLAQIAGNRYASAPVGKALSDACMGTIASFLSKYQDIIIEHQKVVKGNQKRLESLRELAGKENLEYPSVTLPPQPHTKEGVDAYNEVIARVRMWVNLNLWQKLKLSRDDAKPLLRLKGFPSFPLVERQANEVDWWDMVCNVKKLINEKKEDGKVFWQNLAGYKRQEALRPYLSSEEDRKKGKKFARYQLGDLLLHLEKKHGEDWGKVYDEAWERIDKKVEGLSKHIKLEEERRSEDAQSKAALTDWLRAKASFVIEGLKEADKDEFCRCELKLQKWYGDLRGKPFAIEAENSILDISGFSKQYNCAFIWQKDGVKKLNLYLIINYFKGGKLRFKKIKPEAFEANRFYTVINKKSGEIVIMEVNFNFDDPNLIILPLAFGKRQGREFIWNDLLSLETGSLKLANGRVIEKTLYNRRTRQDEPALFVALTFERREVLDSSNIKPMNLIGVDRGENIPAVIALTDPEGCPLSRFKDSLGNPTHILRIGESYKEKQRTIQAKKEVEQRRAGGYSRKYASKAKNLADDMVRNTARDLLYYAVTQDAMLIFENLSRGFGRQGKRTFMAERQYTRMEDWLTAKLAYEGLPSKTYLSKTLAQYTSKTCSNCGFTITSADYDRVLEKLKKTATGWMTTINGKELKVEGQITYYNRYKRQNVVKDLSVELDRLSEESVNNDISSWTKGRSGEALSLLKKRFSHRPVQEKFVCLNCGFETHADEQAALNIARSWLFLRSQEYKKYQTNKTTGNTDKRAFVETWQSFYRKKLKEVWKPAV

SEQ ID NO: 41455 - protein, 978 aa, synthetic construct
  REGION 1..978: note = engineered CasX variant
QEIGRINKIRRRLVKDSNTKKAGKTGPMKTLLVRVMTPDLRERLENLRKKPENIPQPISNTSRANLNKLLTDYTEMKKAILHVYWEEFQKDPVGLMSRVAQPASKKIDQNKLKPEMDEKGNLTTAGFACSQCGQPLFVYKLEQVSEKGKAYTNYFGRCNVAEHEKLILLAQLKPEKDSDEAVTYSLGKFGQRALDFYSIHVTKESTHPVKPLAQIAGNRYASVPVGKALSDACMGTIASFLSKYQDIIIEHQKVVKGNQKRLESLRELAGKENLEYPSVTLPPQPHTKEGVDAYNEVIARVRMWVNLNLWQKLKLSRDDAKPLLRLKGFPSFPLVERQANEVDWWDMVCNVKKLINEKKEDGKVFWQNLAGYKRQEALRPYLSSEEDRKKGKKFARYQLGDLLLHLEKKHGEDWGKVYDEAWERIDKKVEGLSKHIKLEEERRSEDAQSKAALTDWLRAKASFVIEGLKEADKDEFCRCELKLQKWYGDLRGKPFAIEAENSILDISGFSKQYNCAFIWQKDGVKKLNLYLIINYFKGGKLRFKKIKPEAFEANRFYTVINKKSGEIVIMEVNFNFDDPNLIILPLAFGKRQGREFIWNDLLSLETGSLKLANGRVIEKTLYNRRTRQDEPALFVALTFERREVLDSSNIKPMNLIGVDRGENIPAVIALTDPEGCPLSRFKDSLGNPTHILRIGESYKEKQRTIQAKKEVEQRRAGGYSRKYASKAKNLADDMVRNTARDLLYYAVTQDAMLIFENLSRGFGRQGKRTFMAERQYTRMEDWLTAKLAYEGLPSKTYLSKTLAQYTSKTCSNCGFTITSADYDRVLEKLKKTATGWMTTINGKELKVEGQITYYNRYKRQNVVKDLSVELDRLSEESVNNDISSWTKGRSGEALSLLKKRFSHRPVQEKFVCLNCGFETHADEQAALNIARSWLFLRSQEYKKYQTNKTTGNTDKRAFVETWQSFYRKKLKEVWKPAV

SEQ ID NO: 41456 - protein, 978 aa, synthetic construct
  REGION 1..978: note = engineered CasX variant
QEIGRINKIRRRLVKDSNTKKAGKTGPMKTLLVRVMTPDLRERLENLRKKPENIPQPISNTSRANLNKLLTDYTEMKKAILHVYWEEFQKDPVGLMSRVAQPASKKIDQNKLKPEMDEKGNLTTAGFACSQCGQPLFVYKLEQVSEKGKAYTNYFGRCNVAEHEKLIKLAQLKPEKDSDEAVTYSLGKFGQRALDFYSIHVTKESTHPVKPLAQIAGNRYASGPVGKALSDACMGTIASFLSKYQDIIIEHQKVVKGNQKRLESLRELAGKENLEYPSVTLPPQPHTKEGVDAYNEVIARVRMWVNLNLWQKLKLSRDDAKPLLRLKGFPSFPLVERQANEVDWWDMVCNVKKLINEKKEDGKVFWQNLAGYKRQEALRPYLSSEEDRKKGKKFARYQLGDLLLHLEKKHGEDWGKVYDEAWERIDKKVEGLSKHIKLEEERRSEDAQSKAALTDWLRAKASFVIEGLKEADKDEFCRCELKLQKWYGDLRGKPFAIEAENSILDISGFSKQYNCAFIWQKDGVKKLNLYLIINYFKGGKLRFKKIKPEAFEANRFYTVINKKSGEIVIMEVNFNFDDPNLIILPLAFGKRQGREFIWNDLLSLETGSLKLANGRVIEKTLYNRRTRQDEPALFVALTFERREVLDSSNIKPMNLIGVDRGENIPAVIALTDPEGCPLSRFKDSLGNPTHILRIGESYKEKQRTIQAKKEVEQRRAGGYSRKYASKAKNLADDMVRNTARDLLYYAVTQDAMLIFENLSRGFGRQGKRTFMAERQYTRMEDWLTAKLAYEGLPSKTYLSKTLAQYTSKTCSNCGFTITSADYDRVLEKLKKTATGWMTTINGKELKVEGQITYYNRYKRQNVVKDLSVELDRLSEESVNNDISSWTKGRSGEALSLLKKRFSHRPVQEKFVCLNCGFETHADEQAALNIARSWLFLRSQEYKKYQTNKTTGNTDKRAFVETWQSFYRKKLKEVWKPAV

SEQ ID NO: 41457 - protein, 977 aa, synthetic construct
  REGION 1..977: note = engineered CasX variant
QEIGRINKIRRRLVKDSNTKKAGKTGPMKTLLVRVMTPDLRERLENLRKKPENIPQPISNTSRANLNKLLTDYTEMKKAILHVYWEEFQKDPVGLMSRVAQPASKKIDQNKLKPEMDEKGNLTTAGFACSQCGQPLFVYKLEQVSEKGKAYTNYFGRCNVAEHEKLILLAQLKPEKDSDEAVTYSLGKFGQRALDFYSIHVTKESTHPVKPLAQIAGNRYASPVGKALSDACMGTIASFLSKYQDIIIEHQKVVKGNQKRLESLRELAGKENLEYPSVTLPPQPHTKEGVDAYNEVIARVRMWVNLNLWQKLKLSRDDAKPLLRLKGFPSFPLVERQANEVDWWDMVCNVKKLINEKKEDGKVFWQNLAGYKRQEALRPYLSSEEDRKKGKKFARYQLGDLLLHLEKKHGEDWGKVYDEAWERIDKKVEGLSKHIKLEEERRSEDAQSKAALTDWLRAKASFVIEGLKEADKDEFCRCELKLQKWYGDLRGKPFAIEAENSILDISGFSKQYNCAFIWQKDGVKKLNLYLIINYFKGGKLRFKKIKPEAFEANRFYTVINKKSGEIVIMEVNFNFDDPNLIILPLAFGKRQGREFIWNDLLSLETGSLKLANGRVIEKTLYNRRTRQDEPALFVALTFERREVLDSSNIKPMNLIGVDRGENIPAVIALTDPEGCPLSRFKDSLGNPTHILRIGESYKEKQRTIQAKKEVEQRRAGGYSRKYASKAKNLADDMVRNTARDLLYYAVTQDAMLIFENLSRGFGRQGKRTFMAERQYTRMEDWLTAKLAYEGLPSKTYLSKTLAQYTSKTCSNCGFTITSADYDRVLEKLKKTATGWMTTINGKELKVEGQITYYNRYKRQNVVKDLSVELDRLSEESVNNDISSWTKGRSGEALSLLKKRFSHRPVQEKFVCLNCGFETHADEQAALNIARSWLFLRSQEYKKYQTNKTTGNTDKRAFVETWQSFYRKKLKEVWKPAV

SEQ ID NO: 41458 - protein, 979 aa, synthetic construct
  REGION 1..979: note = engineered CasX variant
QEIKGRINKIRRRLVKDSNTKKAGKTGPMKTLLVRVMTPDLRERLENLRKKPENIPQPISNTSRANLNKLLTDYTEMKKAILHVYWEEFQKDPVGLMSRVAQPASKKIDQNKLKPEMDEKGNLTTAGFACSQCGQPLFVYKLEQVSEKGKAYTNYFGRCNVAEHEKLILLAQLKPEKDSDEAVTYSLGKFGQRALDFYSIHVTKESTHPVKPLAQIAGNRYASYPVGKALSGACMGTIASFLSKYQDIIIEHQKVVKGNQKRLESLRELAGKENLEYPSVTLPPQPHTKEGVDAYNEVIARVRMWVNLNLWQKLKLSRDDAKPLLRLKGFPSFPLVERQANEVDWWDMVCNVKKLINEKKEDGKVFWQNLAGYKRQEALRPYLSSEEDRKKGKKFARYQLGDLLLHLEKKHGEDWGKVYDEAWERIDKKVEGLSKHIKLEEERRSEDAQSKAALTDWLRAKASFVIEGLKEADKDEFCRCELKLQKWYGDLRGKPFAIEAENSILDISGFSKQYNCAFIWQKDGVKKLNLYLIINYFKGGKLRFKKIKPEAFEANRFYTVINKKSGEIVPMEVNFNFDDPNLIILPLAFGKRQGREFIWNDLLSLETGSLKLANGRVIEKTLYNRRTRQDEPALFVALTFERREVLDSSNIKPMNLIGVDRGENIPAVIALTDPEGCPLSRFKDSLGNPTHILRIGESYKEKQRTIQAKKEVEQRRAGGYSRKYASKAKNLADDMVRNTARDLLYYAVTQDAMLIFENLSRGFGRQGKRTFMAERQYTRMEDWLTAKLAYEGLPSKTYLSKTLAQYTSKTCSNCGFTITSADYDRVLEKLKKTATGWMTTINGKELKVEGQITYYNRYKRQNVVKDLSVELDRLSEESVNNDISSWTKGRSGEALSLLKKRFSHRPVQEKFVCLNCGFETHADEQAALNIARSWLFLRSQEYKKYQTNKTTGNTDKRAFVETWQSFYRKKLKEVWKPAV

SEQ ID NO: 41459 - protein, 979 aa, synthetic construct
  REGION 1..979: note = engineered CasX variant
QEIKGRINKIRRRLVKDSNTKKAGKTGPMKTLLVRVMTPDLRERLENLRKKPENIPQPISNTSRANLNKLLTDYTEMKKAILHVYWEEFQKDPVGLMSRVAQPASKKIDQNKLKPEMDEKGNLTTAGFACSQCGQPLFVYKLEQVSEKGKAYTNYFGRCNVAEHEKLILLAQLKPEKDSDEAVTYSLGKFGQRALDFYSIHVTKESTHPVKPLAQIAGNRYASHPVGKALSGACMGTIASFLSKYQDIIIEHQKVVKGNQKRLESLRELAGKENLEYPSVTLPPQPHTKEGVDAYNEVIARVRMWVNLNLWQKLKLSRDDAKPLLRLKGFPSFPLVERQANEVDWWDMVCNVKKLINEKKEDGKVFWQNLAGYKRQEALRPYLSSEEDRKKGKKFARYQLGDLLLHLEKKHGEDWGKVYDEAWERIDKKVEGLSKHIKLEEERRSEDAQSKAALTDWLRAKASFVIEGLKEADKDEFCRCELKLQKWYGDLRGKPFAIEAENSILDISGFSKQYNCAFIWQKDGVKKLNLYLIINYFKGGKLRFKKIKPEAFEANRFYTVINKKSGEIVPMEVNFNFDDPNLIILPLAFGKRQGREFIWNDLLSLETGSLKLANGRVIEKTLYNRRTRQDEPALFVALTFERREVLDSSNIKPMNLIGVDRGENIPAVIALTDPEGCPLSRFKDSLGNPTHILRIGESYKEKQRTIQAKKEVEQRRAGGYSRKYASKAKNLADDMVRNTARDLLYYAVTQDAMLIFENLSRGFGRQGKRTFMAERQYTRMEDWLTAKLAYEGLPSKTYLSKTLAQYTSKTCSNCGFTITSADYDRVLEKLKKTATGWMTTINGKELKVEGQITYYNRYKRQNVVKDLSVELDRLSEESVNNDISSWTKGRSGEALSLLKKRFSHRPVQEKFVCLNCGFETHADEQAALNIARSWLFLRSQEYKKYQTNKTTGNTDKRAFVETWQSFYRKKLKEVWKPAV

SEQ ID NO: 41460 - protein, 979 aa, synthetic construct
  REGION 1..979: note = engineered CasX variant
QEIKGRINKIRRRLVKDSNTKKAGKTGPMKTLLVRVMTPDLRERLENLRKKPENIPQPISNTSRANLNKLLTDYTEMKKAILHVYWEEFQKDPVGLMSRVAQPASKKIDQNKLKPEMDEKGNLTTAGFACSQCGQPLFVYKLEQVSEKGKAYTNYFGRCNVAEHEKLILLAQLKPEKDSDEAVTYSLGKFGQRALDFYSIHVTKESTHPVKPLAQIAGNRYASSPVGKALSGACMGTIASFLSKYQDIIIEHQKVVKGNQKRLESLRELAGKENLEYPSVTLPPQPHTKEGVDAYNEVIARVRMWVNLNLWQKLKLSRDDAKPLLRLKGFPSFPLVERQANEVDWWDMVCNVKKLINEKKEDGKVFWQNLAGYKRQEALRPYLSSEEDRKKGKKFARYQLGDLLLHLEKKHGEDWGKVYDEAWERIDKKVEGLSKHIKLEEERRSEDAQSKAALTDWLRAKASFVIEGLKEADKDEFCRCELKLQKWYGDLRGKPFAIEAENSILDISGFSKQYNCAFIWQKDGVKKLNLYLIINYFKGGKLRFKKIKPEAFEANRFYTVINKKSGEIVPMEVNFNFDDPNLIILPLAFGKRQGREFIWNDLLSLETGSLKLANGRVIEKTLYNRRTRQDEPALFVALTFERREVLDSSNIKPMNLIGVDRGENIPAVIALTDPEGCPLSRFKDSLGNPTHILRIGESYKEKQRTIQAKKEVEQRRAGGYSRKYASKAKNLADDMVRNTARDLLYYAVTQDAMLIFENLSRGFGRQGKRTFMAERQYTRMEDWLTAKLAYEGLPSKTYLSKTLAQYTSKTCSNCGFTITSADYDRVLEKLKKTATGWMTTINGKELKVEGQITYYNRYKRQNVVKDLSVELDRLSEESVNNDISSWTKGRSGEALSLLKKRFSHRPVQEKFVCLNCGFETHADEQAALNIARSWLFLRSQEYKKYQTNKTTGNTDKRAFVETWQSFYRKKLKEVWKPAV

SEQ ID NO: 41461 - protein, 979 aa, synthetic construct
  REGION 1..979: note = engineered CasX variant
QEIKGRINKIRRRLVKDSNTKKAGKTGPMKTLLVRVMTPDLRERLENLRKKPENIPQPISNTSRANLNKLLTDYTEMKKAILHVYWEEFQKDPVGLMSRVAQPASKKIDQNKLKPEMDEKGNLTTAGFACSQCGQPLFVYKLEQVSEKGKAYTNYFGRCNVAEHEKLILLAQLKPEKDSDEAVTYSLGKFGQRALDFYSIHVTKESTHPVKPLAQIAGNRYASTPVGKALSGACMGTIASFLSKYQDIIIEHQKVVKGNQKRLESLRELAGKENLEYPSVTLPPQPHTKEGVDAYNEVIARVRMWVNLNLWQKLKLSRDDAKPLLRLKGFPSFPLVERQANEVDWWDMVCNVKKLINEKKEDGKVFWQNLAGYKRQEALRPYLSSEEDRKKGKKFARYQLGDLLLHLEKKHGEDWGKVYDEAWERIDKKVEGLSKHIKLEEERRSEDAQSKAALTDWLRAKASFVIEGLKEADKDEFCRCELKLQKWYGDLRGKPFAIEAENSILDISGFSKQYNCAFIWQKDGVKKLNLYLIINYFKGGKLRFKKIKPEAFEANRFYTVINKKSGEIVPMEVNFNFDDPNLIILPLAFGKRQGREFIWNDLLSLETGSLKLANGRVIEKTLYNRRTRQDEPALFVALTFERREVLDSSNIKPMNLIGVDRGENIPAVIALTDPEGCPLSRFKDSLGNPTHILRIGESYKEKQRTIQAKKEVEQRRAGGYSRKYASKAKNLADDMVRNTARDLLYYAVTQDAMLIFENLSRGFGRQGKRTFMAERQYTRMEDWLTAKLAYEGLPSKTYLSKTLAQYTSKTCSNCGFTITSADYDRVLEKLKKTATGWMTTINGKELKVEGQITYYNRYKRQNVVKDLSVELDRLSEESVNNDISSWTKGRSGEALSLLKKRFSHRPVQEKFVCLNCGFETHADEQAALNIARSWLFLRSQEYKKYQTNKTTGNTDKRAFVETWQSFYRKKLKEVWKPAV

SEQ ID NO: 41462 - protein, 979 aa, synthetic construct
  REGION 1..979: note = engineered CasX variant
QEIKGRINKIRRRLVKDSNTKKAGKTGPMKTLLVRVMTPDLRERLENLRKKPENIPQPISNTSRANLNKLLTDYTEMKKAILHVYWEEFQKDPVGLMSRVAQPASKKIDQNKLKPEMDEKGNLTTAGFACSQCGQPLFVYKLEQVSEKGKAYTNYFGRCNVAEHEKLILLAQLKPEKDSDEAVTYSLGKFGQRALDFYSIHVTKESTHPVKPLAQIAGNRYASAPVGKALSGACMGTIASFLSKYQDIIIEHQKVVKGNQKRLESLRELAGKENLEYPSVTLPPQPHTKEGVDAYNEVIARVRMWVNLNLWQKLKLSRDDAKPLLRLKGFPSFPLVERQANEVDWWDMVCNVKKLINEKKEDGKVFWQNLAGYKRQEALRPYLSSEEDRKKGKKFARYQLGDLLLHLEKKHGEDWGKVYDEAWERIDKKVEGLSKHIKLEEERRSEDAQSKAALTDWLRAKASFVIEGLKEADKDEFCRCELKLQKWYGDLRGKPFAIEAENSILDISGFSKQYNCAFIWQKDGVKKLNLYLIINYFKGGKLRFKKIKPEAFEANRFYTVINKKSGEIVPMEVNFNFDDPNLIILPLAFGKRQGREFIWNDLLSLETGSLKLANGRVIEKTLYNRRTRQDEPALFVALTFERREVLDSSNIKPMNLIGVDRGENIPAVIALTDPEGCPLSRFKDSLGNPTHILRIGESYKEKQRTIQAKKEVEQRRAGGYSRKYASKAKNLADDMVRNTARDLLYYAVTQDAMLIFENLSRGFGRQGKRTFMAERQYTRMEDWLTAKLAYEGLPSKTYLSKTLAQYTSKTCSNCGFTITSADYDRVLEKLKKTATGWMTTINGKELKVEGQITYYNRYKRQNVVKDLSVELDRLSEESVNNDISSWTKGRSGEALSLLKKRFSHRPVQEKFVCLNCGFETHADEQAALNIARSWLFLRSQEYKKYQTNKTTGNTDKRAFVETWQSFYRKKLKEVWKPAV

SEQ ID NO: 41463 - protein, 979 aa, synthetic construct
  REGION 1..979: note = engineered CasX variant
QEIKGRINKIRRRLVKDSNTKKAGKTGPMKTLLVRVMTPDLRERLENLRKKPENIPQPISNTSRANLNKLLTDYTEMKKAILHVYWEEFQKDPVGLMSRVAQPASKKIDQNKLKPEMDEKGNLTTAGFACSQCGQPLFVYKLEQVSEKGKAYTNYFGRCNVAEHEKLILLAQLKPEKDSDEAVTYSLGKFGQRALDFYSIHVTKESTHPVKPLAQIAGNRYASVPVGKALSGACMGTIASFLSKYQDIIIEHQKVVKGNQKRLESLRELAGKENLEYPSVTLPPQPHTKEGVDAYNEVIARVRMWVNLNLWQKLKLSRDDAKPLLRLKGFPSFPLVERQANEVDWWDMVCNVKKLINEKKEDGKVFWQNLAGYKRQEALRPYLSSEEDRKKGKKFARYQLGDLLLHLEKKHGEDWGKVYDEAWERIDKKVEGLSKHIKLEEERRSEDAQSKAALTDWLRAKASFVIEGLKEADKDEFCRCELKLQKWYGDLRGKPFAIEAENSILDISGFSKQYNCAFIWQKDGVKKLNLYLIINYFKGGKLRFKKIKPEAFEANRFYTVINKKSGEIVPMEVNFNFDDPNLIILPLAFGKRQGREFIWNDLLSLETGSLKLANGRVIEKTLYNRRTRQDEPALFVALTFERREVLDSSNIKPMNLIGVDRGENIPAVIALTDPEGCPLSRFKDSLGNPTHILRIGESYKEKQRTIQAKKEVEQRRAGGYSRKYASKAKNLADDMVRNTARDLLYYAVTQDAMLIFENLSRGFGRQGKRTFMAERQYTRMEDWLTAKLAYEGLPSKTYLSKTLAQYTSKTCSNCGFTITSADYDRVLEKLKKTATGWMTTINGKELKVEGQITYYNRYKRQNVVKDLSVELDRLSEESVNNDISSWTKGRSGEALSLLKKRFSHRPVQEKFVCLNCGFETHADEQAALNIARSWLFLRSQEYKKYQTNKTTGNTDKRAFVETWQSFYRKKLKEVWKPAV

SEQ ID NO: 41464 - protein, 979 aa, synthetic construct
  REGION 1..979: note = engineered CasX variant
QEIKGRINKIRRRLVKDSNTKKAGKTGPMKTLLVRVMTPDLRERLENLRKKPENIPQPISNTSRANLNKLLTDYTEMKKAILHVYWEEFQKDPVGLMSRVAQPASKKIDQNKLKPEMDEKGNLTTAGFACSQCGQPLFVYKLEQVSEKGKAYTNYFGRCNVAEHEKLIKLAQLKPEKDSDEAVTYSLGKFGQRALDFYSIHVTKESTHPVKPLAQIAGNRYASGPVGKALSGACMGTIASFLSKYQDIIIEHQKVVKGNQKRLESLRELAGKENLEYPSVTLPPQPHTKEGVDAYNEVIARVRMWVNLNLWQKLKLSRDDAKPLLRLKGFPSFPLVERQANEVDWWDMVCNVKKLINEKKEDGKVFWQNLAGYKRQEALRPYLSSEEDRKKGKKFARYQLGDLLLHLEKKHGEDWGKVYDEAWERIDKKVEGLSKHIKLEEERRSEDAQSKAALTDWLRAKASFVIEGLKEADKDEFCRCELKLQKWYGDLRGKPFAIEAENSILDISGFSKQYNCAFIWQKDGVKKLNLYLIINYFKGGKLRFKKIKPEAFEANRFYTVINKKSGEIVPMEVNFNFDDPNLIILPLAFGKRQGREFIWNDLLSLETGSLKLANGRVIEKTLYNRRTRQDEPALFVALTFERREVLDSSNIKPMNLIGVDRGENIPAVIALTDPEGCPLSRFKDSLGNPTHILRIGESYKEKQRTIQAKKEVEQRRAGGYSRKYASKAKNLADDMVRNTARDLLYYAVTQDAMLIFENLSRGFGRQGKRTFMAERQYTRMEDWLTAKLAYEGLPSKTYLSKTLAQYTSKTCSNCGFTITSADYDRVLEKLKKTATGWMTTINGKELKVEGQITYYNRYKRQNVVKDLSVELDRLSEESVNNDISSWTKGRSGEALSLLKKRFSHRPVQEKFVCLNCGFETHADEQAALNIARSWLFLRSQEYKKYQTNKTTGNTDKRAFVETWQSFYRKKLKEVWKPAV

SEQ ID NO: 41465 - protein, 978 aa, synthetic construct
  REGION 1..978: note = engineered CasX variant
QEIKGRINKIRRRLVKDSNTKKAGKTGPMKTLLVRVMTPDLRERLENLRKKPENIPQPISNTSRANLNKLLTDYTEMKKAILHVYWEEFQKDPVGLMSRVAQPASKKIDQNKLKPEMDEKGNLTTAGFACSQCGQPLFVYKLEQVSEKGKAYTNYFGRCNVAEHEKLILLAQLKPEKDSDEAVTYSLGKFGQRALDFYSIHVTKESTHPVKPLAQIAGNRYASPVGKALSGACMGTIASFLSKYQDIIIEHQKVVKGNQKRLESLRELAGKENLEYPSVTLPPQPHTKEGVDAYNEVIARVRMWVNLNLWQKLKLSRDDAKPLLRLKGFPSFPLVERQANEVDWWDMVCNVKKLINEKKEDGKVFWQNLAGYKRQEALRPYLSSEEDRKKGKKFARYQLGDLLLHLEKKHGEDWGKVYDEAWERIDKKVEGLSKHIKLEEERRSEDAQSKAALTDWLRAKASFVIEGLKEADKDEFCRCELKLQKWYGDLRGKPFAIEAENSILDISGFSKQYNCAFIWQKDGVKKLNLYLIINYFKGGKLRFKKIKPEAFEANRFYTVINKKSGEIVPMEVNFNFDDPNLIILPLAFGKRQGREFIWNDLLSLETGSLKLANGRVIEKTLYNRRTRQDEPALFVALTFERREVLDSSNIKPMNLIGVDRGENIPAVIALTDPEGCPLSRFKDSLGNPTHILRIGESYKEKQRTIQAKKEVEQRRAGGYSRKYASKAKNLADDMVRNTARDLLYYAVTQDAMLIFENLSRGFGRQGKRTFMAERQYTRMEDWLTAKLAYEGLPSKTYLSKTLAQYTSKTCSNCGFTITSADYDRVLEKLKKTATGWMTTINGKELKVEGQITYYNRYKRQNVVKDLSVELDRLSEESVNNDISSWTKGRSGEALSLLKKRFSHRPVQEKFVCLNCGFETHADEQAALNIARSWLFLRSQEYKKYQTNKTTGNTDKRAFVETWQSFYRKKLKEVWKPAV

SEQ ID NO: 41466 - protein, 979 aa, synthetic construct
  REGION 1..979: note = engineered CasX variant
QEIKGRINKIRRRLVKDSNTKKAGKTGPMKTLLVRVMTPDLRERLENLRKKPENIPQPISNTSRANLNKLLTDYTEMKKAILHVYWEEFQKDPVGLMSRVAQPASKKIDQNKLKPEMDEKGNLTTAGFACSQCGQPLFVYKLEQVSEKGKAYTNYFGRCNVAEHEKLILLAQLKPEKDSDEAVTYSLGKFGQRALDFYSIHVTKESTHPVKPLAQIAGNRYASYPVGKALSDACMGTIASFLSKYQDIIIEHQKVVKGNQKRLESLRELAGKENLEYPSVTLPPQPHTKEGVDAYNEVIARVRMWVNLNLWQKLKLSRDDAKPLLRLKNFPSFPLVERQANEVDWWDMVCNVKKLINEKKEDGKVFWQNLAGYKRQEALRPYLSSEEDRKKGKKFARYQLGDLLLHLEKKHGEDWGKVYDEAWERIDKKVEGLSKHIKLEEERRSEDAQSKAALTDWLRAKASFVIEGLKEADKDEFCRCELKLQKWYGDLRGKPFAIEAENSILDISGFSKQYNCAFIWQKDGVKKLNLYLIINYFKGGKLRFKKIKPEAFEANRFYTVINKKSGEIVPMEVNFNFDDPNLIILPLAFGKRQGREFIWNDLLSLETGSLKLANGRVIEKTLYNRRTRQDEPALFVALTFERREVLDSSNIKPMNLIGVDRGENIPAVIALTDPEGCPLSRFKDSLGNPTHILRIGESYKEKQRTIQAKKEVEQRRAGGYSRKYASKAKNLADDMVRNTARDLLYYAVTQDAMLIFENLSRGFGRQGKRTFMAERQYTRMEDWLTAKLAYEGLPSKTYLSKTLAQYTSKTCSNCGFTITSADYDRVLEKLKKTATGWMTTINGKELKVEGQITYYNRYKRQNVVKDLSVELDRLSEESVNNDISSWTKGRSGEALSLLKKRFSHRPVQEKFVCLNCGFETHADEQAALNIARSWLFLRSQEYKKYQTNKTTGNTDKRAFVETWQSFYRKKLKEVWKPAV

SEQ ID NO: 41467 - protein, 979 aa, synthetic construct
  REGION 1..979: note = engineered CasX variant
QEIKGRINKIRRRLVKDSNTKKAGKTGPMKTLLVRVMTPDLRERLENLRKKPENIPQPISNTSRANLNKLLTDYTEMKKAILHVYWEEFQKDPVGLMSRVAQPASKKIDQNKLKPEMDEKGNLTTAGFACSQCGQPLFVYKLEQVSEKGKAYTNYFGRCNVAEHEKLILLAQLKPEKDSDEAVTYSLGKFGQRALDFYSIHVTKESTHPVKPLAQIAGNRYASHPVGKALSDACMGTIASFLSKYQDIIIEHQKVVKGNQKRLESLRELAGKENLEYPSVTLPPQPHTKEGVDAYNEVIARVRMWVNLNLWQKLKLSRDDAKPLLRLKNFPSFPLVERQANEVDWWDMVCNVKKLINEKKEDGKVFWQNLAGYKRQEALRPYLSSEEDRKKGKKFARYQLGDLLLHLEKKHGEDWGKVYDEAWERIDKKVEGLSKHIKLEEERRSEDAQSKAALTDWLRAKASFVIEGLKEADKDEFCRCELKLQKWYGDLRGKPFAIEAENSILDISGFSKQYNCAFIWQKDGVKKLNLYLIINYFKGGKLRFKKIKPEAFEANRFYTVINKKSGEIVPMEVNFNFDDPNLIILPLAFGKRQGREFIWNDLLSLETGSLKLANGRVIEKTLYNRRTRQDEPALFVALTFERREVLDSSNIKPMNLIGVDRGENIPAVIALTDPEGCPLSRFKDSLGNPTHILRIGESYKEKQRTIQAKKEVEQRRAGGYSRKYASKAKNLADDMVRNTARDLLYYAVTQDAMLIFENLSRGFGRQGKRTFMAERQYTRMEDWLTAKLAYEGLPSKTYLSKTLAQYTSKTCSNCGFTITSADYDRVLEKLKKTATGWMTTINGKELKVEGQITYYNRYKRQNVVKDLSVELDRLSEESVNNDISSWTKGRSGEALSLLKKRFSHRPVQEKFVCLNCGFETHADEQAALNIARSWLFLRSQEYKKYQTNKTTGNTDKRAFVETWQSFYRKKLKEVWKPAV

SEQ ID NO: 41468 - protein, 979 aa, synthetic construct
  REGION 1..979: note = engineered CasX variant
QEIKGRINKIRRRLVKDSNTKKAGKTGPMKTLLVRVMTPDLRERLENLRKKPENIPQPISNTSRANLNKLLTDYTEMKKAILHVYWEEFQKDPVGLMSRVAQPASKKIDQNKLKPEMDEKGNLTTAGFACSQCGQPLFVYKLEQVSEKGKAYTNYFGRCNVAEHEKLILLAQLKPEKDSDEAVTYSLGKFGQRALDFYSIHVTKESTHPVKPLAQIAGNRYASSPVGKALSDACMGTIASFLSKYQDIIIEHQKVVKGNQKRLESLRELAGKENLEYPSVTLPPQPHTKEGVDAYNEVIARVRMWVNLNLWQKLKLSRDDAKPLLRLKNFPSFPLVERQANEVDWWDMVCNVKKLINEKKEDGKVFWQNLAGYKRQEALRPYLSSEEDRKKGKKFARYQLGDLLLHLEKKHGEDWGKVYDEAWERIDKKVEGLSKHIKLEEERRSEDAQSKAALTDWLRAKASFVIEGLKEADKDEFCRCELKLQKWYGDLRGKPFAIEAENSILDISGFSKQYNCAFIWQKDGVKKLNLYLIINYFKGGKLRFKKIKPEAFEANRFYTVINKKSGEIVPMEVNFNFDDPNLIILPLAFGKRQGREFIWNDLLSLETGSLKLANGRVIEKTLYNRRTRQDEPALFVALTFERREVLDSSNIKPMNLIGVDRGENIPAVIALTDPEGCPLSRFKDSLGNPTHILRIGESYKEKQRTIQAKKEVEQRRAGGYSRKYASKAKNLADDMVRNTARDLLYYAVTQDAMLIFENLSRGFGRQGKRTFMAERQYTRMEDWLTAKLAYEGLPSKTYLSKTLAQYTSKTCSNCGFTITSADYDRVLEKLKKTATGWMTTINGKELKVEGQITYYNRYKRQNVVKDLSVELDRLSEESVNNDISSWTKGRSGEALSLLKKRFSHRPVQEKFVCLNCGFETHADEQAALNIARSWLFLRSQEYKKYQTNKTTGNTDKRAFVETWQSFYRKKLKEVWKPAV

SEQ ID NO: 41469 - protein, 979 aa, synthetic construct
  REGION 1..979: note = engineered CasX variant
QEIKGRINKIRRRLVKDSNTKKAGKTGPMKTLLVRVMTPDLRERLENLRKKPENIPQPISNTSRANLNKLLTDYTEMKKAILHVYWEEFQKDPVGLMSRVAQPASKKIDQNKLKPEMDEKGNLTTAGFACSQCGQPLFVYKLEQVSEKGKAYTNYFGRCNVAEHEKLILLAQLKPEKDSDEAVTYSLGKFGQRALDFYSIHVTKESTHPVKPLAQIAGNRYASTPVGKALSDACMGTIASFLSKYQDIIIEHQKVVKGNQKRLESLRELAGKENLEYPSVTLPPQPHTKEGVDAYNEVIARVRMWVNLNLWQKLKLSRDDAKPLLRLKNFPSFPLVERQANEVDWWDMVCNVKKLINEKKEDGKVFWQNLAGYKRQEALRPYLSSEEDRKKGKKFARYQLGDLLLHLEKKHGEDWGKVYDEAWERIDKKVEGLSKHIKLEEERRSEDAQSKAALTDWLRAKASFVIEGLKEADKDEFCRCELKLQKWYGDLRGKPFAIEAENSILDISGFSKQYNCAFIWQKDGVKKLNLYLIINYFKGGKLRFKKIKPEAFEANRFYTVINKKSGEIVPMEVNFNFDDPNLIILPLAFGKRQGREFIWNDLLSLETGSLKLANGRVIEKTLYNRRTRQDEPALFVALTFERREVLDSSNIKPMNLIGVDRGENIPAVIALTDPEGCPLSRFKDSLGNPTHILRIGESYKEKQRTIQAKKEVEQRRAGGYSRKYASKAKNLADDMVRNTARDLLYYAVTQDAMLIFENLSRGFGRQGKRTFMAERQYTRMEDWLTAKLAYEGLPSKTYLSKTLAQYTSKTCSNCGFTITSADYDRVLEKLKKTATGWMTTINGKELKVEGQITYYNRYKRQNVVKDLSVELDRLSEESVNNDISSWTKGRSGEALSLLKKRFSHRPVQEKFVCLNCGFETHADEQAALNIARSWLFLRSQEYKKYQTNKTTGNTDKRAFVETWQSFYRKKLKEVWKPAV

SEQ ID NO: 41470 - protein, 979 aa, synthetic construct
  REGION 1..979: note = engineered CasX variant
QEIKGRINKIRRRLVKDSNTKKAGKTGPMKTLLVRVMTPDLRERLENLRKKPENIPQPISNTSRANLNKLLTDYTEMKKAILHVYWEEFQKDPVGLMSRVAQPASKKIDQNKLKPEMDEKGNLTTAGFACSQCGQPLFVYKLEQVSEKGKAYTNYFGRCNVAEHEKLILLAQLKPEKDSDEAVTYSLGKFGQRALDFYSIHVTKESTHPVKPLAQIAGNRYASAPVGKALSDACMGTIASFLSKYQDIIIEHQKVVKGNQKRLESLRELAGKENLEYPSVTLPPQPHTKEGVDAYNEVIARVRMWVNLNLWQKLKLSRDDAKPLLRLKNFPSFPLVERQANEVDWWDMVCNVKKLINEKKEDGKVFWQNLAGYKRQEALRPYLSSEEDRKKGKKFARYQLGDLLLHLEKKHGEDWGKVYDEAWERIDKKVEGLSKHIKLEEERRSEDAQSKAALTDWLRAKASFVIEGLKEADKDEFCRCELKLQKWYGDLRGKPFAIEAENSILDISGFSKQYNCAFIWQKDGVKKLNLYLIINYFKGGKLRFKKIKPEAFEANRFYTVINKKSGEIVPMEVNFNFDDPNLIILPLAFGKRQGREFIWNDLLSLETGSLKLANGRVIEKTLYNRRTRQDEPALFVALTFERREVLDSSNIKPMNLIGVDRGENIPAVIALTDPEGCPLSRFKDSLGNPTHILRIGESYKEKQRTIQAKKEVEQRRAGGYSRKYASKAKNLADDMVRNTARDLLYYAVTQDAMLIFENLSRGFGRQGKRTFMAERQYTRMEDWLTAKLAYEGLPSKTYLSKTLAQYTSKTCSNCGFTITSADYDRVLEKLKKTATGWMTTINGKELKVEGQITYYNRYKRQNVVKDLSVELDRLSEESVNNDISSWTKGRSGEALSLLKKRFSHRPVQEKFVCLNCGFETHADEQAALNIARSWLFLRSQEYKKYQTNKTTGNTDKRAFVETWQSFYRKKLKEVWKPAV

SEQ ID NO: 41471 - protein, 979 aa, synthetic construct
  REGION 1..979: note = engineered CasX variant
QEIKGRINKIRRRLVKDSNTKKAGKTGPMKTLLVRVMTPDLRERLENLRKKPENIPQPISNTSRANLNKLLTDYTEMKKAILHVYWEEFQKDPVGLMSRVAQPASKKIDQNKLKPEMDEKGNLTTAGFACSQCGQPLFVYKLEQVSEKGKAYTNYFGRCNVAEHEKLILLAQLKPEKDSDEAVTYSLGKFGQRALDFYSIHVTKESTHPVKPLAQIAGNRYASVPVGKALSDACMGTIASFLSKYQDIIIEHQKVVKGNQKRLESLRELAGKENLEYPSVTLPPQPHTKEGVDAYNEVIARVRMWVNLNLWQKLKLSRDDAKPLLRLKNFPSFPLVERQANEVDWWDMVCNVKKLINEKKEDGKVFWQNLAGYKRQEALRPYLSSEEDRKKGKKFARYQLGDLLLHLEKKHGEDWGKVYDEAWERIDKKVEGLSKHIKLEEERRSEDAQSKAALTDWLRAKASFVIEGLKEADKDEFCRCELKLQKWYGDLRGKPFAIEAENSILDISGFSKQYNCAFIWQKDGVKKLNLYLIINYFKGGKLRFKKIKPEAFEANRFYTVINKKSGEIVPMEVNFNFDDPNLIILPLAFGKRQGREFIWNDLLSLETGSLKLANGRVIEKTLYNRRTRQDEPALFVALTFERREVLDSSNIKPMNLIGVDRGENIPAVIALTDPEGCPLSRFKDSLGNPTHILRIGESYKEKQRTIQAKKEVEQRRAGGYSRKYASKAKNLADDMVRNTARDLLYYAVTQDAMLIFENLSRGFGRQGKRTFMAERQYTRMEDWLTAKLAYEGLPSKTYLSKTLAQYTSKTCSNCGFTITSADYDRVLEKLKKTATGWMTTINGKELKVEGQITYYNRYKRQNVVKDLSVELDRLSEESVNNDISSWTKGRSGEALSLLKKRFSHRPVQEKFVCLNCGFETHADEQAALNIARSWLFLRSQEYKKYQTNKTTGNTDKRAFVETWQSFYRKKLKEVWKPAV

SEQ ID NO: 41472 - protein, 979 aa, synthetic construct
  REGION 1..979: note = engineered CasX variant
QEIKGRINKIRRRLVKDSNTKKAGKTGPMKTLLVRVMTPDLRERLENLRKKPENIPQPISNTSRANLNKLLTDYTEMKKAILHVYWEEFQKDPVGLMSRVAQPASKKIDQNKLKPEMDEKGNLTTAGFACSQCGQPLFVYKLEQVSEKGKAYTNYFGRCNVAEHEKLIKLAQLKPEKDSDEAVTYSLGKFGQRALDFYSIHVTKESTHPVKPLAQIAGNRYASGPVGKALSDACMGTIASFLSKYQDIIIEHQKVVKGNQKRLESLRELAGKENLEYPSVTLPPQPHTKEGVDAYNEVIARVRMWVNLNLWQKLKLSRDDAKPLLRLKNFPSFPLVERQANEVDWWDMVCNVKKLINEKKEDGKVFWQNLAGYKRQEALRPYLSSEEDRKKGKKFARYQLGDLLLHLEKKHGEDWGKVYDEAWERIDKKVEGLSKHIKLEEERRSEDAQSKAALTDWLRAKASFVIEGLKEADKDEFCRCELKLQKWYGDLRGKPFAIEAENSILDISGFSKQYNCAFIWQKDGVKKLNLYLIINYFKGGKLRFKKIKPEAFEANRFYTVINKKSGEIVPMEVNFNFDDPNLIILPLAFGKRQGREFIWNDLLSLETGSLKLANGRVIEKTLYNRRTRQDEPALFVALTFERREVLDSSNIKPMNLIGVDRGENIPAVIALTDPEGCPLSRFKDSLGNPTHILRIGESYKEKQRTIQAKKEVEQRRAGGYSRKYASKAKNLADDMVRNTARDLLYYAVTQDAMLIFENLSRGFGRQGKRTFMAERQYTRMEDWLTAKLAYEGLPSKTYLSKTLAQYTSKTCSNCGFTITSADYDRVLEKLKKTATGWMTTINGKELKVEGQITYYNRYKRQNVVKDLSVELDRLSEESVNNDISSWTKGRSGEALSLLKKRFSHRPVQEKFVCLNCGFETHADEQAALNIARSWLFLRSQEYKKYQTNKTTGNTDKRAFVETWQSFYRKKLKEVWKPAV

SEQ ID NO: 41473 - protein, 978 aa, synthetic construct
  REGION 1..978: note = engineered CasX variant
QEIKGRINKIRRRLVKDSNTKKAGKTGPMKTLLVRVMTPDLRERLENLRKKPENIPQPISNTSRANLNKLLTDYTEMKKAILHVYWEEFQKDPVGLMSRVAQPASKKIDQNKLKPEMDEKGNLTTAGFACSQCGQPLFVYKLEQVSEKGKAYTNYFGRCNVAEHEKLILLAQLKPEKDSDEAVTYSLGKFGQRALDFYSIHVTKESTHPVKPLAQIAGNRYASPVGKALSDACMGTIASFLSKYQDIIIEHQKVVKGNQKRLESLRELAGKENLEYPSVTLPPQPHTKEGVDAYNEVIARVRMWVNLNLWQKLKLSRDDAKPLLRLKNFPSFPLVERQANEVDWWDMVCNVKKLINEKKEDGKVFWQNLAGYKRQEALRPYLSSEEDRKKGKKFARYQLGDLLLHLEKKHGEDWGKVYDEAWERIDKKVEGLSKHIKLEEERRSEDAQSKAALTDWLRAKASFVIEGLKEADKDEFCRCELKLQKWYGDLRGKPFAIEAENSILDISGFSKQYNCAFIWQKDGVKKLNLYLIINYFKGGKLRFKKIKPEAFEANRFYTVINKKSGEIVPMEVNFNFDDPNLIILPLAFGKRQGREFIWNDLLSLETGSLKLANGRVIEKTLYNRRTRQDEPALFVALTFERREVLDSSNIKPMNLIGVDRGENIPAVIALTDPEGCPLSRFKDSLGNPTHILRIGESYKEKQRTIQAKKEVEQRRAGGYSRKYASKAKNLADDMVRNTARDLLYYAVTQDAMLIFENLSRGFGRQGKRTFMAERQYTRMEDWLTAKLAYEGLPSKTYLSKTLAQYTSKTCSNCGFTITSADYDRVLEKLKKTATGWMTTINGKELKVEGQITYYNRYKRQNVVKDLSVELDRLSEESVNNDISSWTKGRSGEALSLLKKRFSHRPVQEKFVCLNCGFETHADEQAALNIARSWLFLRSQEYKKYQTNKTTGNTDKRAFVETWQSFYRKKLKEVWKPAV

SEQ ID NO: 41474 - protein, 979 aa, synthetic construct
  REGION 1..979: note = engineered CasX variant
QEIKGRINKIRRRLVKDSNTKKAGKTGPMKTLLVRVMTPDLRERLENLRKKPENIPQPISNTSRANLNKLLTDYTEMKKAILHVYWEEFQKDPVGLMSRVAQPASKKIDQNKLKPEMDEKGNLTTAGFACSQCGQPLFVYKLEQVSEKGKAYTNYFGRCNVAEHEKLILLAQLKPEKDSDEAVTYSLGKFGQRALDFYSIHVTKESTHPVKPLAQIAGNRYASYPVGKALSDACMGTIASFLSKYQDIIIEHQKVVKGNQKRLESLRELAGKENLEYPSVTLPPQPHTKEGVDAYNEVIARVRMWVNLNLWQKLKLSRDDAKPLLRLKGFPSFPLVERQANEVDWWDMVCNVKKLINEKKEDGKVFWQNLAGYKRQEALRPYLSSEEDRKKGKKFARYQLGDLLNHLEKKHGEDWGKVYDEAWERIDKKVEGLSKHIKLEEERRSEDAQSKAALTDWLRAKASFVIEGLKEADKDEFCRCELKLQKWYGDLRGKPFAIEAENSILDISGFSKQYNCAFIWQKDGVKKLNLYLIINYFKGGKLRFKKIKPEAFEANRFYTVINKKSGEIVPMEVNFNFDDPNLIILPLAFGKRQGREFIWNDLLSLETGSLKLANGRVIEKTLYNRRTRQDEPALFVALTFERREVLDSSNIKPMNLIGVDRGENIPAVIALTDPEGCPLSRFKDSLGNPTHILRIGESYKEKQRTIQAKKEVEQRRAGGYSRKYASKAKNLADDMVRNTARDLLYYAVTQDAMLIFENLSRGFGRQGKRTFMAERQYTRMEDWLTAKLAYEGLPSKTYLSKTLAQYTSKTCSNCGFTITSADYDRVLEKLKKTATGWMTTINGKELKVEGQITYYNRYKRQNVVKDLSVELDRLSEESVNNDISSWTKGRSGEALSLLKKRFSHRPVQEKFVCLNCGFETHADEQAALNIARSWLFLRSQEYKKYQTNKTTGNTDKRAFVETWQSFYRKKLKEVWKPAV

SEQ ID NO: 41475 - protein, 979 aa, synthetic construct
  REGION 1..979: note = engineered CasX variant
QEIKGRINKIRRRLVKDSNTKKAGKTGPMKTLLVRVMTPDLRERLENLRKKPENIPQPISNTSRANLNKLLTDYTEMKKAILHVYWEEFQKDPVGLMSRVAQPASKKIDQNKLKPEMDEKGNLTTAGFACSQCGQPLFVYKLEQVSEKGKAYTNYFGRCNVAEHEKLILLAQLKPEKDSDEAVTYSLGKFGQRALDFYSIHVTKESTHPVKPLAQIAGNRYASHPVGKALSDACMGTIASFLSKYQDIIIEHQKVVKGNQKRLESLRELAGKENLEYPSVTLPPQPHTKEGVDAYNEVIARVRMWVNLNLWQKLKLSRDDAKPLLRLKGFPSFPLVERQANEVDWWDMVCNVKKLINEKKEDGKVFWQNLAGYKRQEALRPYLSSEEDRKKGKKFARYQLGDLLNHLEKKHGEDWGKVYDEAWERIDKKVEGLSKHIKLEEERRSEDAQSKAALTDWLRAKASFVIEGLKEADKDEFCRCELKLQKWYGDLRGKPFAIEAENSILDISGFSKQYNCAFIWQKDGVKKLNLYLIINYFKGGKLRFKKIKPEAFEANRFYTVINKKSGEIVPMEVNFNFDDPNLIILPLAFGKRQGREFIWNDLLSLETGSLKLANGRVIEKTLYNRRTRQDEPALFVALTFERREVLDSSNIKPMNLIGVDRGENIPAVIALTDPEGCPLSRFKDSLGNPTHILRIGESYKEKQRTIQAKKEVEQRRAGGYSRKYASKAKNLADDMVRNTARDLLYYAVTQDAMLIFENLSRGFGRQGKRTFMAERQYTRMEDWLTAKLAYEGLPSKTYLSKTLAQYTSKTCSNCGFTITSADYDRVLEKLKKTATGWMTTINGKELKVEGQITYYNRYKRQNVVKDLSVELDRLSEESVNNDISSWTKGRSGEALSLLKKRFSHRPVQEKFVCLNCGFETHADEQAALNIARSWLFLRSQEYKKYQTNKTTGNTDKRAFVETWQSFYRKKLKEVWKPAV

SEQ ID NO: 41476 - protein, 979 aa, synthetic construct
  REGION 1..979: note = engineered CasX variant
QEIKGRINKIRRRLVKDSNTKKAGKTGPMKTLLVRVMTPDLRERLENLRKKPENIPQPISNTSRANLNKLLTDYTEMKKAILHVYWEEFQKDPVGLMSRVAQPASKKIDQNKLKPEMDEKGNLTTAGFACSQCGQPLFVYKLEQVSEKGKAYTNYFGRCNVAEHEKLILLAQLKPEKDSDEAVTYSLGKFGQRALDFYSIHVTKESTHPVKPLAQIAGNRYASSPVGKALSDACMGTIASFLSKYQDIIIEHQKVVKGNQKRLESLRELAGKENLEYPSVTLPPQPHTKEGVDAYNEVIARVRMWVNLNLWQKLKLSRDDAKPLLRLKGFPSFPLVERQANEVDWWDMVCNVKKLINEKKEDGKVFWQNLAGYKRQEALRPYLSSEEDRKKGKKFARYQLGDLLNHLEKKHGEDWGKVYDEAWERIDKKVEGLSKHIKLEEERRSEDAQSKAALTDWLRAKASFVIEGLKEADKDEFCRCELKLQKWYGDLRGKPFAIEAENSILDISGFSKQYNCAFIWQKDGVKKLNLYLIINYFKGGKLRFKKIKPEAFEANRFYTVINKKSGEIVPMEVNFNFDDPNLIILPLAFGKRQGREFIWNDLLSLETGSLKLANGRVIEKTLYNRRTRQDEPALFVALTFERREVLDSSNIKPMNLIGVDRGENIPAVIALTDPEGCPLSRFKDSLGNPTHILRIGESYKEKQRTIQAKKEVEQRRAGGYSRKYASKAKNLADDMVRNTARDLLYYAVTQDAMLIFENLSRGFGRQGKRTFMAERQYTRMEDWLTAKLAYEGLPSKTYLSKTLAQYTSKTCSNCGFTITSADYDRVLEKLKKTATGWMTTINGKELKVEGQITYYNRYKRQNVVKDLSVELDRLSEESVNNDISSWTKGRSGEALSLLKKRFSHRPVQEKFVCLNCGFETHADEQAALNIARSWLFLRSQEYKKYQTNKTTGNTDKRAFVETWQSFYRKKLKEVWKPAV

SEQ ID NO: 41477 - protein, 979 aa, synthetic construct
  REGION 1..979: note = engineered CasX variant
QEIKGRINKIRRRLVKDSNTKKAGKTGPMKTLLVRVMTPDLRERLENLRKKPENIPQPISNTSRANLNKLLTDYTEMKKAILHVYWEEFQKDPVGLMSRVAQPASKKIDQNKLKPEMDEKGNLTTAGFACSQCGQPLFVYKLEQVSEKGKAYTNYFGRCNVAEHEKLILLAQLKPEKDSDEAVTYSLGKFGQRALDFYSIHVTKESTHPVKPLAQIAGNRYASTPVGKALSDACMGTIASFLSKYQDIIIEHQKVVKGNQKRLESLRELAGKENLEYPSVTLPPQPHTKEGVDAYNEVIARVRMWVNLNLWQKLKLSRDDAKPLLRLKGFPSFPLVERQANEVDWWDMVCNVKKLINEKKEDGKVFWQNLAGYKRQEALRPYLSSEEDRKKGKKFARYQLGDLLNHLEKKHGEDWGKVYDEAWERIDKKVEGLSKHIKLEEERRSEDAQSKAALTDWLRAKASFVIEGLKEADKDEFCRCELKLQKWYGDLRGKPFAIEAENSILDISGFSKQYNCAFIWQKDGVKKLNLYLIINYFKGGKLRFKKIKPEAFEANRFYTVINKKSGEIVPMEVNFNFDDPNLIILPLAFGKRQGREFIWNDLLSLETGSLKLANGRVIEKTLYNRRTRQDEPALFVALTFERREVLDSSNIKPMNLIGVDRGENIPAVIALTDPEGCPLSRFKDSLGNPTHILRIGESYKEKQRTIQAKKEVEQRRAGGYSRKYASKAKNLADDMVRNTARDLLYYAVTQDAMLIFENLSRGFGRQGKRTFMAERQYTRMEDWLTAKLAYEGLPSKTYLSKTLAQYTSKTCSNCGFTITSADYDRVLEKLKKTATGWMTTINGKELKVEGQITYYNRYKRQNVVKDLSVELDRLSEESVNNDISSWTKGRSGEALSLLKKRFSHRPVQEKFVCLNCGFETHADEQAALNIARSWLFLRSQEYKKYQTNKTTGNTDKRAFVETWQSFYRKKLKEVWKPAV

SEQ ID NO: 41478 - protein, 979 aa, synthetic construct
  REGION 1..979: note = engineered CasX variant
QEIKGRINKIRRRLVKDSNTKKAGKTGPMKTLLVRVMTPDLRERLENLRKKPENIPQPISNTSRANLNKLLTDYTEMKKAILHVYWEEFQKDPVGLMSRVAQPASKKIDQNKLKPEMDEKGNLTTAGFACSQCGQPLFVYKLEQVSEKGKAYTNYFGRCNVAEHEKLILLAQLKPEKDSDEAVTYSLGKFGQRALDFYSIHVTKESTHPVKPLAQIAGNRYASAPVGKALSDACMGTIASFLSKYQDIIIEHQKVVKGNQKRLESLRELAGKENLEYPSVTLPPQPHTKEGVDAYNEVIARVRMWVNLNLWQKLKLSRDDAKPLLRLKGFPSFPLVERQANEVDWWDMVCNVKKLINEKKEDGKVFWQNLAGYKRQEALRPYLSSEEDRKKGKKFARYQLGDLLNHLEKKHGEDWGKVYDEAWERIDKKVEGLSKHIKLEEERRSEDAQSKAALTDWLRAKASFVIEGLKEADKDEFCRCELKLQKWYGDLRGKPFAIEAENSILDISGFSKQYNCAFIWQKDGVKKLNLYLIINYFKGGKLRFKKIKPEAFEANRFYTVINKKSGEIVPMEVNFNFDDPNLIILPLAFGKRQGREFIWNDLLSLETGSLKLANGRVIEKTLYNRRTRQDEPALFVALTFERREVLDSSNIKPMNLIGVDRGENIPAVIALTDPEGCPLSRFKDSLGNPTHILRIGESYKEKQRTIQAKKEVEQRRAGGYSRKYASKAKNLADDMVRNTARDLLYYAVTQDAMLIFENLSRGFGRQGKRTFMAERQYTRMEDWLTAKLAYEGLPSKTYLSKTLAQYTSKTCSNCGFTITSADYDRVLEKLKKTATGWMTTINGKELKVEGQITYYNRYKRQNVVKDLSVELDRLSEESVNNDISSWTKGRSGEALSLLKKRFSHRPVQEKFVCLNCGFETHADEQAALNIARSWLFLRSQEYKKYQTNKTTGNTDKRAFVETWQSFYRKKLKEVWKPAV

SEQ ID NO: 41479 - protein, 979 aa, synthetic construct
  REGION 1..979: note = engineered CasX variant
QEIKGRINKIRRRLVKDSNTKKAGKTGPMKTLLVRVMTPDLRERLENLRKKPENIPQPISNTSRANLNKLLTDYTEMKKAILHVYWEEFQKDPVGLMSRVAQPASKKIDQNKLKPEMDEKGNLTTAGFACSQCGQPLFVYKLEQVSEKGKAYTNYFGRCNVAEHEKLILLAQLKPEKDSDEAVTYSLGKFGQRALDFYSIHVTKESTHPVKPLAQIAGNRYASVPVGKALSDACMGTIASFLSKYQDIIIEHQKVVKGNQKRLESLRELAGKENLEYPSVTLPPQPHTKEGVDAYNEVIARVRMWVNLNLWQKLKLSRDDAKPLLRLKGFPSFPLVERQANEVDWWDMVCNVKKLINEKKEDGKVFWQNLAGYKRQEALRPYLSSEEDRKKGKKFARYQLGDLLNHLEKKHGEDWGKVYDEAWERIDKKVEGLSKHIKLEEERRSEDAQSKAALTDWLRAKASFVIEGLKEADKDEFCRCELKLQKWYGDLRGKPFAIEAENSILDISGFSKQYNCAFIWQKDGVKKLNLYLIINYFKGGKLRFKKIKPEAFEANRFYTVINKKSGEIVPMEVNFNFDDPNLIILPLAFGKRQGREFIWNDLLSLETGSLKLANGRVIEKTLYNRRTRQDEPALFVALTFERREVLDSSNIKPMNLIGVDRGENIPAVIALTDPEGCPLSRFKDSLGNPTHILRIGESYKEKQRTIQAKKEVEQRRAGGYSRKYASKAKNLADDMVRNTARDLLYYAVTQDAMLIFENLSRGFGRQGKRTFMAERQYTRMEDWLTAKLAYEGLPSKTYLSKTLAQYTSKTCSNCGFTITSADYDRVLEKLKKTATGWMTTINGKELKVEGQITYYNRYKRQNVVKDLSVELDRLSEESVNNDISSWTKGRSGEALSLLKKRFSHRPVQEKFVCLNCGFETHADEQAALNIARSWLFLRSQEYKKYQTNKTTGNTDKRAFVETWQSFYRKKLKEVWKPAV

SEQ ID NO: 41480 - protein, 979 aa, synthetic construct
  REGION 1..979: note = engineered CasX variant
QEIKGRINKIRRRLVKDSNTKKAGKTGPMKTLLVRVMTPDLRERLENLRKKPENIPQPISNTSRANLNKLLTDYTEMKKAILHVYWEEFQKDPVGLMSRVAQPASKKIDQNKLKPEMDEKGNLTTAGFACSQCGQPLFVYKLEQVSEKGKAYTNYFGRCNVAEHEKLIKLAQLKPEKDSDEAVTYSLGKFGQRALDFYSIHVTKESTHPVKPLAQIAGNRYASGPVGKALSDACMGTIASFLSKYQDIIIEHQKVVKGNQKRLESLRELAGKENLEYPSVTLPPQPHTKEGVDAYNEVIARVRMWVNLNLWQKLKLSRDDAKPLLRLKGFPSFPLVERQANEVDWWDMVCNVKKLINEKKEDGKVFWQNLAGYKRQEALRPYLSSEEDRKKGKKFARYQLGDLLNHLEKKHGEDWGKVYDEAWERIDKKVEGLSKHIKLEEERRSEDAQSKAALTDWLRAKASFVIEGLKEADKDEFCRCELKLQKWYGDLRGKPFAIEAENSILDISGFSKQYNCAFIWQKDGVKKLNLYLIINYFKGGKLRFKKIKPEAFEANRFYTVINKKSGEIVPMEVNFNFDDPNLIILPLAFGKRQGREFIWNDLLSLETGSLKLANGRVIEKTLYNRRTRQDEPALFVALTFERREVLDSSNIKPMNLIGVDRGENIPAVIALTDPEGCPLSRFKDSLGNPTHILRIGESYKEKQRTIQAKKEVEQRRAGGYSRKYASKAKNLADDMVRNTARDLLYYAVTQDAMLIFENLSRGFGRQGKRTFMAERQYTRMEDWLTAKLAYEGLPSKTYLSKTLAQYTSKTCSNCGFTITSADYDRVLEKLKKTATGWMTTINGKELKVEGQITYYNRYKRQNVVKDLSVELDRLSEESVNNDISSWTKGRSGEALSLLKKRFSHRPVQEKFVCLNCGFETHADEQAALNIARSWLFLRSQEYKKYQTNKTTGNTDKRAFVETWQSFYRKKLKEVWKPAV

SEQ ID NO: 41481 - protein, 978 aa, synthetic construct
  REGION 1..978: note = engineered CasX variant
QEIKGRINKIRRRLVKDSNTKKAGKTGPMKTLLVRVMTPDLRERLENLRKKPENIPQPISNTSRANLNKLLTDYTEMKKAILHVYWEEFQKDPVGLMSRVAQPASKKIDQNKLKPEMDEKGNLTTAGFACSQCGQPLFVYKLEQVSEKGKAYTNYFGRCNVAEHEKLILLAQLKPEKDSDEAVTYSLGKFGQRALDFYSIHVTKESTHPVKPLAQIAGNRYASPVGKALSDACMGTIASFLSKYQDIIIEHQKVVKGNQKRLESLRELAGKENLEYPSVTLPPQPHTKEGVDAYNEVIARVRMWVNLNLWQKLKLSRDDAKPLLRLKGFPSFPLVERQANEVDWWDMVCNVKKLINEKKEDGKVFWQNLAGYKRQEALRPYLSSEEDRKKGKKFARYQLGDLLNHLEKKHGEDWGKVYDEAWERIDKKVEGLSKHIKLEEERRSEDAQSKAALTDWLRAKASFVIEGLKEADKDEFCRCELKLQKWYGDLRGKPFAIEAENSILDISGFSKQYNCAFIWQKDGVKKLNLYLIINYFKGGKLRFKKIKPEAFEANRFYTVINKKSGEIVPMEVNFNFDDPNLIILPLAFGKRQGREFIWNDLLSLETGSLKLANGRVIEKTLYNRRTRQDEPALFVALTFERREVLDSSNIKPMNLIGVDRGENIPAVIALTDPEGCPLSRFKDSLGNPTHILRIGESYKEKQRTIQAKKEVEQRRAGGYSRKYASKAKNLADDMVRNTARDLLYYAVTQDAMLIFENLSRGFGRQGKRTFMAERQYTRMEDWLTAKLAYEGLPSKTYLSKTLAQYTSKTCSNCGFTITSADYDRVLEKLKKTATGWMTTINGKELKVEGQITYYNRYKRQNVVKDLSVELDRLSEESVNNDISSWTKGRSGEALSLLKKRFSHRPVQEKFVCLNCGFETHADEQAALNIARSWLFLRSQEYKKYQTNKTTGNTDKRAFVETWQSFYRKKLKEVWKPAV

SEQ ID NO: 41482 - protein, 979 aa, synthetic construct
  REGION 1..979: note = engineered CasX variant
QEIKGRINKIRRRLVKDSNTKKAGKTGPMKTLLVRVMTPDLRERLENLRKKPENIPQPISNTSRANLNKLLTDYTEMKKAILHVYWEEFQKDPVGLMSRVAQPASKKIDQNKLKPEMDEKGNLTTAGFACSQCGQPLFVYKLEQVSEKGKAYTNYFGRCNVAEHEKLILLAQLKPEKDSDEAVTYSLGKFGQRALDFYSIHVTKESTHPVKPLAQIAGNRYASYPVGKALSDACMGTIASFLSKYQDIIIEHQKVVKGNQKRLESLRELAGKENLEYPSVTLPPQPHTKEGVDAYNEVIARVRMWVNLNLWQKLKLSRDDAKPLLRLKGFPSFPLVERQANEVDWWDMVCNVKKLINEKKEDGKVFWQNLAGYKRQEALRPYLSSEEDRKKGKKFARYQLGDLLWHLEKKHGEDWGKVYDEAWERIDKKVEGLSKHIKLEEERRSEDAQSKAALTDWLRAKASFVIEGLKEADKDEFCRCELKLQKWYGDLRGKPFAIEAENSILDISGFSKQYNCAFIWQKDGVKKLNLYLIINYFKGGKLRFKKIKPEAFEANRFYTVINKKSGEIVPMEVNFNFDDPNLIILPLAFGKRQGREFIWNDLLSLETGSLKLANGRVIEKTLYNRRTRQDEPALFVALTFERREVLDSSNIKPMNLIGVDRGENIPAVIALTDPEGCPLSRFKDSLGNPTHILRIGESYKEKQRTIQAKKEVEQRRAGGYSRKYASKAKNLADDMVRNTARDLLYYAVTQDAMLIFENLSRGFGRQGKRTFMAERQYTRMEDWLTAKLAYEGLPSKTYLSKTLAQYTSKTCSNCGFTITSADYDRVLEKLKKTATGWMTTINGKELKVEGQITYYNRYKRQNVVKDLSVELDRLSEESVNNDISSWTKGRSGEALSLLKKRFSHRPVQEKFVCLNCGFETHADEQAALNIARSWLFLRSQEYKKYQTNKTTGNTDKRAFVETWQSFYRKKLKEVWKPAV

SEQ ID NO: 41483 - protein, 979 aa, synthetic construct
  REGION 1..979: note = engineered CasX variant
QEIKGRINKIRRRLVKDSNTKKAGKTGPMKTLLVRVMTPDLRERLENLRKKPENIPQPISNTSRANLNKLLTDYTEMKKAILHVYWEEFQKDPVGLMSRVAQPASKKIDQNKLKPEMDEKGNLTTAGFACSQCGQPLFVYKLEQVSEKGKAYTNYFGRCNVAEHEKLILLAQLKPEKDSDEAVTYSLGKFGQRALDFYSIHVTKESTHPVKPLAQIAGNRYASHPVGKALSDACMGTIASFLSKYQDIIIEHQKVVKGNQKRLESLRELAGKENLEYPSVTLPPQPHTKEGVDAYNEVIARVRMWVNLNLWQKLKLSRDDAKPLLRLKGFPSFPLVERQANEVDWWDMVCNVKKLINEKKEDGKVFWQNLAGYKRQEALRPYLSSEEDRKKGKKFARYQLGDLLWHLEKKHGEDWGKVYDEAWERIDKKVEGLSKHIKLEEERRSEDAQSKAALTDWLRAKASFVIEGLKEADKDEFCRCELKLQKWYGDLRGKPFAIEAENSILDISGFSKQYNCAFIWQKDGVKKLNLYLIINYFKGGKLRFKKIKPEAFEANRFYTVINKKSGEIVPMEVNFNFDDPNLIILPLAFGKRQGREFIWNDLLSLETGSLKLANGRVIEKTLYNRRTRQDEPALFVALTFERREVLDSSNIKPMNLIGVDRGENIPAVIALTDPEGCPLSRFKDSLGNPTHILRIGESYKEKQRTIQAKKEVEQRRAGGYSRKYASKAKNLADDMVRNTARDLLYYAVTQDAMLIFENLSRGFGRQGKRTFMAERQYTRMEDWLTAKLAYEGLPSKTYLSKTLAQYTSKTCSNCGFTITSADYDRVLEKLKKTATGWMTTINGKELKVEGQITYYNRYKRQNVVKDLSVELDRLSEESVNNDISSWTKGRSGEALSLLKKRFSHRPVQEKFVCLNCGFETHADEQAALNIARSWLFLRSQEYKKYQTNKTTGNTDKRAFVETWQSFYRKKLKEVWKPAV

SEQ ID NO: 41484 - protein, 979 aa, synthetic construct
  REGION 1..979: note = engineered CasX variant
QEIKGRINKIRRRLVKDSNTKKAGKTGPMKTLLVRVMTPDLRERLENLRKKPENIPQPISNTSRANLNKLLTDYTEMKKAILHVYWEEFQKDPVGLMSRVAQPASKKIDQNKLKPEMDEKGNLTTAGFACSQCGQPLFVYKLEQVSEKGKAYTNYFGRCNVAEHEKLILLAQLKPEKDSDEAVTYSLGKFGQRALDFYSIHVTKESTHPVKPLAQIAGNRYASSPVGKALSDACMGTIASFLSKYQDIIIEHQKVVKGNQKRLESLRELAGKENLEYPSVTLPPQPHTKEGVDAYNEVIARVRMWVNLNLWQKLKLSRDDAKPLLRLKGFPSFPLVERQANEVDWWDMVCNVKKLINEKKEDGKVFWQNLAGYKRQEALRPYLSSEEDRKKGKKFARYQLGDLLWHLEKKHGEDWGKVYDEAWERIDKKVEGLSKHIKLEEERRSEDAQSKAALTDWLRAKASFVIEGLKEADKDEFCRCELKLQKWYGDLRGKPFAIEAENSILDISGFSKQYNCAFIWQKDGVKKLNLYLIINYFKGGKLRFKKIKPEAFEANRFYTVINKKSGEIVPMEVNFNFDDPNLIILPLAFGKRQGREFIWNDLLSLETGSLKLANGRVIEKTLYNRRTRQDEPALFVALTFERREVLDSSNIKPMNLIGVDRGENIPAVIALTDPEGCPLSRFKDSLGNPTHILRIGESYKEKQRTIQAKKEVEQRRAGGYSRKYASKAKNLADDMVRNTARDLLYYAVTQDAMLIFENLSRGFGRQGKRTFMAERQYTRMEDWLTAKLAYEGLPSKTYLSKTLAQYTSKTCSNCGFTITSADYDRVLEKLKKTATGWMTTINGKELKVEGQITYYNRYKRQNVVKDLSVELDRLSEESVNNDISSWTKGRSGEALSLLKKRFSHRPVQEKFVCLNCGFETHADEQAALNIARSWLFLRSQEYKKYQTNKTTGNTDKRAFVETWQSFYRKKLKEVWKPAV

SEQ ID NO: 41485 - protein, 979 aa, synthetic construct
  REGION 1..979: note = engineered CasX variant
QEIKGRINKIRRRLVKDSNTKKAGKTGPMKTLLVRVMTPDLRERLENLRKKPENIPQPISNTSRANLNKLLTDYTEMKKAILHVYWEEFQKDPVGLMSRVAQPASKKIDQNKLKPEMDEKGNLTTAGFACSQCGQPLFVYKLEQVSEKGKAYTNYFGRCNVAEHEKLILLAQLKPEKDSDEAVTYSLGKFGQRALDFYSIHVTKESTHPVKPLAQIAGNRYASTPVGKALSDACMGTIASFLSKYQDIIIEHQKVVKGNQKRLESLRELAGKENLEYPSVTLPPQPHTKEGVDAYNEVIARVRMWVNLNLWQKLKLSRDDAKPLLRLKGFPSFPLVERQANEVDWWDMVCNVKKLINEKKEDGKVFWQNLAGYKRQEALRPYLSSEEDRKKGKKFARYQLGDLLWHLEKKHGEDWGKVYDEAWERIDKKVEGLSKHIKLEEERRSEDAQSKAALTDWLRAKASFVIEGLKEADKDEFCRCELKLQKWYGDLRGKPFAIEAENSILDISGFSKQYNCAFIWQKDGVKKLNLYLIINYFKGGKLRFKKIKPEAFEANRFYTVINKKSGEIVPMEVNFNFDDPNLIILPLAFGKRQGREFIWNDLLSLETGSLKLANGRVIEKTLYNRRTRQDEPALFVALTFERREVLDSSNIKPMNLIGVDRGENIPAVIALTDPEGCPLSRFKDSLGNPTHILRIGESYKEKQRTIQAKKEVEQRRAGGYSRKYASKAKNLADDMVRNTARDLLYYAVTQDAMLIFENLSRGFGRQGKRTFMAERQYTRMEDWLTAKLAYEGLPSKTYLSKTLAQYTSKTCSNCGFTITSADYDRVLEKLKKTATGWMTTINGKELKVEGQITYYNRYKRQNVVKDLSVELDRLSEESVNNDISSWTKGRSGEALSLLKKRFSHRPVQEKFVCLNCGFETHADEQAALNIARSWLFLRSQEYKKYQTNKTTGNTDKRAFVETWQSFYRKKLKEVWKPAV

SEQ ID NO: 41486 - protein, 979 aa, synthetic construct
  REGION 1..979: note = engineered CasX variant
QEIKGRINKIRRRLVKDSNTKKAGKTGPMKTLLVRVMTPDLRERLENLRKKPENIPQPISNTSRANLNKLLTDYTEMKKAILHVYWEEFQKDPVGLMSRVAQPASKKIDQNKLKPEMDEKGNLTTAGFACSQCGQPLFVYKLEQVSEKGKAYTNYFGRCNVAEHEKLILLAQLKPEKDSDEAVTYSLGKFGQRALDFYSIHVTKESTHPVKPLAQIAGNRYASAPVGKALSDACMGTIASFLSKYQDIIIEHQKVVKGNQKRLESLRELAGKENLEYPSVTLPPQPHTKEGVDAYNEVIARVRMWVNLNLWQKLKLSRDDAKPLLRLKGFPSFPLVERQANEVDWWDMVCNVKKLINEKKEDGKVFWQNLAGYKRQEALRPYLSSEEDRKKGKKFARYQLGDLLWHLEKKHGEDWGKVYDEAWERIDKKVEGLSKHIKLEEERRSEDAQSKAALTDWLRAKASFVIEGLKEADKDEFCRCELKLQKWYGDLRGKPFAIEAENSILDISGFSKQYNCAFIWQKDGVKKLNLYLIINYFKGGKLRFKKIKPEAFEANRFYTVINKKSGEIVPMEVNFNFDDPNLIILPLAFGKRQGREFIWNDLLSLETGSLKLANGRVIEKTLYNRRTRQDEPALFVALTFERREVLDSSNIKPMNLIGVDRGENIPAVIALTDPEGCPLSRFKDSLGNPTHILRIGESYKEKQRTIQAKKEVEQRRAGGYSRKYASKAKNLADDMVRNTARDLLYYAVTQDAMLIFENLSRGFGRQGKRTFMAERQYTRMEDWLTAKLAYEGLPSKTYLSKTLAQYTSKTCSNCGFTITSADYDRVLEKLKKTATGWMTTINGKELKVEGQITYYNRYKRQNVVKDLSVELDRLSEESVNNDISSWTKGRSGEALSLLKKRFSHRPVQEKFVCLNCGFETHADEQAALNIARSWLFLRSQEYKKYQTNKTTGNTDKRAFVETWQSFYRKKLKEVWKPAV

SEQ ID NO: 41487 - protein, 979 aa, synthetic construct
  REGION 1..979: note = engineered CasX variant
QEIKGRINKIRRRLVKDSNTKKAGKTGPMKTLLVRVMTPDLRERLENLRKKPENIPQPISNTSRANLNKLLTDYTEMKKAILHVYWEEFQKDPVGLMSRVAQPASKKIDQNKLKPEMDEKGNLTTAGFACSQCGQPLFVYKLEQVSEKGKAYTNYFGRCNVAEHEKLILLAQLKPEKDSDEAVTYSLGKFGQRALDFYSIHVTKESTHPVKPLAQIAGNRYASVPVGKALSDACMGTIASFLSKYQDIIIEHQKVVKGNQKRLESLRELAGKENLEYPSVTLPPQPHTKEGVDAYNEVIARVRMWVNLNLWQKLKLSRDDAKPLLRLKGFPSFPLVERQANEVDWWDMVCNVKKLINEKKEDGKVFWQNLAGYKRQEALRPYLSSEEDRKKGKKFARYQLGDLLWHLEKKHGEDWGKVYDEAWERIDKKVEGLSKHIKLEEERRSEDAQSKAALTDWLRAKASFVIEGLKEADKDEFCRCELKLQKWYGDLRGKPFAIEAENSILDISGFSKQYNCAFIWQKDGVKKLNLYLIINYFKGGKLRFKKIKPEAFEANRFYTVINKKSGEIVPMEVNFNFDDPNLIILPLAFGKRQGREFIWNDLLSLETGSLKLANGRVIEKTLYNRRTRQDEPALFVALTFERREVLDSSNIKPMNLIGVDRGENIPAVIALTDPEGCPLSRFKDSLGNPTHILRIGESYKEKQRTIQAKKEVEQRRAGGYSRKYASKAKNLADDMVRNTARDLLYYAVTQDAMLIFENLSRGFGRQGKRTFMAERQYTRMEDWLTAKLAYEGLPSKTYLSKTLAQYTSKTCSNCGFTITSADYDRVLEKLKKTATGWMTTINGKELKVEGQITYYNRYKRQNVVKDLSVELDRLSEESVNNDISSWTKGRSGEALSLLKKRFSHRPVQEKFVCLNCGFETHADEQAALNIARSWLFLRSQEYKKYQTNKTTGNTDKRAFVETWQSFYRKKLKEVWKPAV

SEQ ID NO: 41488 - protein, 979 aa, synthetic construct
  REGION 1..979: note = engineered CasX variant
QEIKGRINKIRRRLVKDSNTKKAGKTGPMKTLLVRVMTPDLRERLENLRKKPENIPQPISNTSRANLNKLLTDYTEMKKAILHVYWEEFQKDPVGLMSRVAQPASKKIDQNKLKPEMDEKGNLTTAGFACSQCGQPLFVYKLEQVSEKGKAYTNYFGRCNVAEHEKLIKLAQLKPEKDSDEAVTYSLGKFGQRALDFYSIHVTKESTHPVKPLAQIAGNRYASGPVGKALSDACMGTIASFLSKYQDIIIEHQKVVKGNQKRLESLRELAGKENLEYPSVTLPPQPHTKEGVDAYNEVIARVRMWVNLNLWQKLKLSRDDAKPLLRLKGFPSFPLVERQANEVDWWDMVCNVKKLINEKKEDGKVFWQNLAGYKRQEALRPYLSSEEDRKKGKKFARYQLGDLLWHLEKKHGEDWGKVYDEAWERIDKKVEGLSKHIKLEEERRSEDAQSKAALTDWLRAKASFVIEGLKEADKDEFCRCELKLQKWYGDLRGKPFAIEAENSILDISGFSKQYNCAFIWQKDGVKKLNLYLIINYFKGGKLRFKKIKPEAFEANRFYTVINKKSGEIVPMEVNFNFDDPNLIILPLAFGKRQGREFIWNDLLSLETGSLKLANGRVIEKTLYNRRTRQDEPALFVALTFERREVLDSSNIKPMNLIGVDRGENIPAVIALTDPEGCPLSRFKDSLGNPTHILRIGESYKEKQRTIQAKKEVEQRRAGGYSRKYASKAKNLADDMVRNTARDLLYYAVTQDAMLIFENLSRGFGRQGKRTFMAERQYTRMEDWLTAKLAYEGLPSKTYLSKTLAQYTSKTCSNCGFTITSADYDRVLEKLKKTATGWMTTINGKELKVEGQITYYNRYKRQNVVKDLSVELDRLSEESVNNDISSWTKGRSGEALSLLKKRFSHRPVQEKFVCLNCGFETHADEQAALNIARSWLFLRSQEYKKYQTNKTTGNTDKRAFVETWQSFYRKKLKEVWKPAV

SEQ ID NO: 41489 - protein, 978 aa, synthetic construct
  REGION 1..978: note = engineered CasX variant
QEIKGRINKIRRRLVKDSNTKKAGKTGPMKTLLVRVMTPDLRERLENLRKKPENIPQPISNTSRANLNKLLTDYTEMKKAILHVYWEEFQKDPVGLMSRVAQPASKKIDQNKLKPEMDEKGNLTTAGFACSQCGQPLFVYKLEQVSEKGKAYTNYFGRCNVAEHEKLILLAQLKPEKDSDEAVTYSLGKFGQRALDFYSIHVTKESTHPVKPLAQIAGNRYASPVGKALSDACMGTIASFLSKYQDIIIEHQKVVKGNQKRLESLRELAGKENLEYPSVTLPPQPHTKEGVDAYNEVIARVRMWVNLNLWQKLKLSRDDAKPLLRLKGFPSFPLVERQANEVDWWDMVCNVKKLINEKKEDGKVFWQNLAGYKRQEALRPYLSSEEDRKKGKKFARYQLGDLLWHLEKKHGEDWGKVYDEAWERIDKKVEGLSKHIKLEEERRSEDAQSKAALTDWLRAKASFVIEGLKEADKDEFCRCELKLQKWYGDLRGKPFAIEAENSILDISGFSKQYNCAFIWQKDGVKKLNLYLIINYFKGGKLRFKKIKPEAFEANRFYTVINKKSGEIVPMEVNFNFDDPNLIILPLAFGKRQGREFIWNDLLSLETGSLKLANGRVIEKTLYNRRTRQDEPALFVALTFERREVLDSSNIKPMNLIGVDRGENIPAVIALTDPEGCPLSRFKDSLGNPTHILRIGESYKEKQRTIQAKKEVEQRRAGGYSRKYASKAKNLADDMVRNTARDLLYYAVTQDAMLIFENLSRGFGRQGKRTFMAERQYTRMEDWLTAKLAYEGLPSKTYLSKTLAQYTSKTCSNCGFTITSADYDRVLEKLKKTATGWMTTINGKELKVEGQITYYNRYKRQNVVKDLSVELDRLSEESVNNDISSWTKGRSGEALSLLKKRFSHRPVQEKFVCLNCGFETHADEQAALNIARSWLFLRSQEYKKYQTNKTTGNTDKRAFVETWQSFYRKKLKEVWKPAV

SEQ ID NO: 41490 - protein, 979 aa, synthetic construct
  REGION 1..979: note = engineered CasX variant
QEIKGRINKIRRRLVKDSNTKKAGKTGPMKTLLVRVMTPDLRERLENLRKKPENIPQPISNTSRANLNKLLTDYTEMKKAILHVYWEEFQKDPVGLMSRVAQPASKKIDQNKLKPEMDEKGNLTTAGFACSQCGQPLFVYKLEQVSEKGKAYTNYFGRCNVAEHEKLILLAQLKPEKDSDEAVTYSLGKFGQRALDFYSIHVTKESTHPVKPLAQIAGNRYASYPVGKALSDACMGTIASFLSKYQDIIIEHQKVVKGNQKRLESLRELAGKENLEYPSVTLPPQPHTKEGVDAYNEVIARVRMWVNLNLWQKLKLSRDDAKPLLRLKGFPSFPLVERQANEVDWWDMVCNVKKLINEKKEDGKVFWQNLAGYKRQEALRPYLSSEEDRKKGKKFARYQLGDLLLHLYKKHGEDWGKVYDEAWERIDKKVEGLSKHIKLEEERRSEDAQSKAALTDWLRAKASFVIEGLKEADKDEFCRCELKLQKWYGDLRGKPFAIEAENSILDISGFSKQYNCAFIWQKDGVKKLNLYLIINYFKGGKLRFKKIKPEAFEANRFYTVINKKSGEIVPMEVNFNFDDPNLIILPLAFGKRQGREFIWNDLLSLETGSLKLANGRVIEKTLYNRRTRQDEPALFVALTFERREVLDSSNIKPMNLIGVDRGENIPAVIALTDPEGCPLSRFKDSLGNPTHILRIGESYKEKQRTIQAKKEVEQRRAGGYSRKYASKAKNLADDMVRNTARDLLYYAVTQDAMLIFENLSRGFGRQGKRTFMAERQYTRMEDWLTAKLAYEGLPSKTYLSKTLAQYTSKTCSNCGFTITSADYDRVLEKLKKTATGWMTTINGKELKVEGQITYYNRYKRQNVVKDLSVELDRLSEESVNNDISSWTKGRSGEALSLLKKRFSHRPVQEKFVCLNCGFETHADEQAALNIARSWLFLRSQEYKKYQTNKTTGNTDKRAFVETWQSFYRKKLKEVWKPAV

SEQ ID NO: 41491 - protein, 979 aa, synthetic construct
  REGION 1..979: note = engineered CasX variant
QEIKGRINKIRRRLVKDSNTKKAGKTGPMKTLLVRVMTPDLRERLENLRKKPENIPQPISNTSRANLNKLLTDYTEMKKAILHVYWEEFQKDPVGLMSRVAQPASKKIDQNKLKPEMDEKGNLTTAGFACSQCGQPLFVYKLEQVSEKGKAYTNYFGRCNVAEHEKLILLAQLKPEKDSDEAVTYSLGKFGQRALDFYSIHVTKESTHPVKPLAQIAGNRYASHPVGKALSDACMGTIASFLSKYQDIIIEHQKVVKGNQKRLESLRELAGKENLEYPSVTLPPQPHTKEGVDAYNEVIARVRMWVNLNLWQKLKLSRDDAKPLLRLKGFPSFPLVERQANEVDWWDMVCNVKKLINEKKEDGKVFWQNLAGYKRQEALRPYLSSEEDRKKGKKFARYQLGDLLLHLYKKHGEDWGKVYDEAWERIDKKVEGLSKHIKLEEERRSEDAQSKAALTDWLRAKASFVIEGLKEADKDEFCRCELKLQKWYGDLRGKPFAIEAENSILDISGFSKQYNCAFIWQKDGVKKLNLYLIINYFKGGKLRFKKIKPEAFEANRFYTVINKKSGEIVPMEVNFNFDDPNLIILPLAFGKRQGREFIWNDLLSLETGSLKLANGRVIEKTLYNRRTRQDEPALFVALTFERREVLDSSNIKPMNLIGVDRGENIPAVIALTDPEGCPLSRFKDSLGNPTHILRIGESYKEKQRTIQAKKEVEQRRAGGYSRKYASKAKNLADDMVRNTARDLLYYAVTQDAMLIFENLSRGFGRQGKRTFMAERQYTRMEDWLTAKLAYEGLPSKTYLSKTLAQYTSKTCSNCGFTITSADYDRVLEKLKKTATGWMTTINGKELKVEGQITYYNRYKRQNVVKDLSVELDRLSEESVNNDISSWTKGRSGEALSLLKKRFSHRPVQEKFVCLNCGFETHADEQAALNIARSWLFLRSQEYKKYQTNKTTGNTDKRAFVETWQSFYRKKLKEVWKPAV

SEQ ID NO: 41492 - protein, 979 aa, synthetic construct
  REGION 1..979: note = engineered CasX variant
QEIKGRINKIRRRLVKDSNTKKAGKTGPMKTLLVRVMTPDLRERLENLRKKPENIPQPISNTSRANLNKLLTDYTEMKKAILHVYWEEFQKDPVGLMSRVAQPASKKIDQNKLKPEMDEKGNLTTAGFACSQCGQPLFVYKLEQVSEKGKAYTNYFGRCNVAEHEKLILLAQLKPEKDSDEAVTYSLGKFGQRALDFYSIHVTKESTHPVKPLAQIAGNRYASSPVGKALSDACMGTIASFLSKYQDIIIEHQKVVKGNQKRLESLRELAGKENLEYPSVTLPPQPHTKEGVDAYNEVIARVRMWVNLNLWQKLKLSRDDAKPLLRLKGFPSFPLVERQANEVDWWDMVCNVKKLINEKKEDGKVFWQNLAGYKRQEALRPYLSSEEDRKKGKKFARYQLGDLLLHLYKKHGEDWGKVYDEAWERIDKKVEGLSKHIKLEEERRSEDAQSKAALTDWLRAKASFVIEGLKEADKDEFCRCELKLQKWYGDLRGKPFAIEAENSILDISGFSKQYNCAFIWQKDGVKKLNLYLIINYFKGGKLRFKKIKPEAFEANRFYTVINKKSGEIVPMEVNFNFDDPNLIILPLAFGKRQGREFIWNDLLSLETGSLKLANGRVIEKTLYNRRTRQDEPALFVALTFERREVLDSSNIKPMNLIGVDRGENIPAVIALTDPEGCPLSRFKDSLGNPTHILRIGESYKEKQRTIQAKKEVEQRRAGGYSRKYASKAKNLADDMVRNTARDLLYYAVTQDAMLIFENLSRGFGRQGKRTFMAERQYTRMEDWLTAKLAYEGLPSKTYLSKTLAQYTSKTCSNCGFTITSADYDRVLEKLKKTATGWMTTINGKELKVEGQITYYNRYKRQNVVKDLSVELDRLSEESVNNDISSWTKGRSGEALSLLKKRFSHRPVQEKFVCLNCGFETHADEQAALNIARSWLFLRSQEYKKYQTNKTTGNTDKRAFVETWQSFYRKKLKEVWKPAV

SEQ ID NO: 41493 - protein, 979 aa, synthetic construct
  REGION 1..979: note = engineered CasX variant
QEIKGRINKIRRRLVKDSNTKKAGKTGPMKTLLVRVMTPDLRERLENLRKKPENIPQPISNTSRANLNKLLTDYTEMKKAILHVYWEEFQKDPVGLMSRVAQPASKKIDQNKLKPEMDEKGNLTTAGFACSQCGQPLFVYKLEQVSEKGKAYTNYFGRCNVAEHEKLILLAQLKPEKDSDEAVTYSLGKFGQRALDFYSIHVTKESTHPVKPLAQIAGNRYASTPVGKALSDACMGTIASFLSKYQDIIIEHQKVVKGNQKRLESLRELAGKENLEYPSVTLPPQPHTKEGVDAYNEVIARVRMWVNLNLWQKLKLSRDDAKPLLRLKGFPSFPLVERQANEVDWWDMVCNVKKLINEKKEDGKVFWQNLAGYKRQEALRPYLSSEEDRKKGKKFARYQLGDLLLHLYKKHGEDWGKVYDEAWERIDKKVEGLSKHIKLEEERRSEDAQSKAALTDWLRAKASFVIEGLKEADKDEFCRCELKLQKWYGDLRGKPFAIEAENSILDISGFSKQYNCAFIWQKDGVKKLNLYLIINYFKGGKLRFKKIKPEAFEANRFYTVINKKSGEIVPMEVNFNFDDPNLIILPLAFGKRQGREFIWNDLLSLETGSLKLANGRVIEKTLYNRRTRQDEPALFVALTFERREVLDSSNIKPMNLIGVDRGENIPAVIALTDPEGCPLSRFKDSLGNPTHILRIGESYKEKQRTIQAKKEVEQRRAGGYSRKYASKAKNLADDMVRNTARDLLYYAVTQDAMLIFENLSRGFGRQGKRTFMAERQYTRMEDWLTAKLAYEGLPSKTYLSKTLAQYTSKTCSNCGFTITSADYDRVLEKLKKTATGWMTTINGKELKVEGQITYYNRYKRQNVVKDLSVELDRLSEESVNNDISSWTKGRSGEALSLLKKRFSHRPVQEKFVCLNCGFETHADEQAALNIARSWLFLRSQEYKKYQTNKTTGNTDKRAFVETWQSFYRKKLKEVWKPAV

SEQ ID NO: 41494 - protein, 979 aa, synthetic construct
  REGION 1..979: note = engineered CasX variant
QEIKGRINKIRRRLVKDSNTKKAGKTGPMKTLLVRVMTPDLRERLENLRKKPENIPQPISNTSRANLNKLLTDYTEMKKAILHVYWEEFQKDPVGLMSRVAQPASKKIDQNKLKPEMDEKGNLTTAGFACSQCGQPLFVYKLEQVSEKGKAYTNYFGRCNVAEHEKLILLAQLKPEKDSDEAVTYSLGKFGQRALDFYSIHVTKESTHPVKPLAQIAGNRYASAPVGKALSDACMGTIASFLSKYQDIIIEHQKVVKGNQKRLESLRELAGKENLEYPSVTLPPQPHTKEGVDAYNEVIARVRMWVNLNLWQKLKLSRDDAKPLLRLKGFPSFPLVERQANEVDWWDMVCNVKKLINEKKEDGKVFWQNLAGYKRQEALRPYLSSEEDRKKGKKFARYQLGDLLLHLYKKHGEDWGKVYDEAWERIDKKVEGLSKHIKLEEERRSEDAQSKAALTDWLRAKASFVIEGLKEADKDEFCRCELKLQKWYGDLRGKPFAIEAENSILDISGFSKQYNCAFIWQKDGVKKLNLYLIINYFKGGKLRFKKIKPEAFEANRFYTVINKKSGEIVPMEVNFNFDDPNLIILPLAFGKRQGREFIWNDLLSLETGSLKLANGRVIEKTLYNRRTRQDEPALFVALTFERREVLDSSNIKPMNLIGVDRGENIPAVIALTDPEGCPLSRFKDSLGNPTHILRIGESYKEKQRTIQAKKEVEQRRAGGYSRKYASKAKNLADDMVRNTARDLLYYAVTQDAMLIFENLSRGFGRQGKRTFMAERQYTRMEDWLTAKLAYEGLPSKTYLSKTLAQYTSKTCSNCGFTITSADYDRVLEKLKKTATGWMTTINGKELKVEGQITYYNRYKRQNVVKDLSVELDRLSEESVNNDISSWTKGRSGEALSLLKKRFSHRPVQEKFVCLNCGFETHADEQAALNIARSWLFLRSQEYKKYQTNKTTGNTDKRAFVETWQSFYRKKLKEVWKPAV

SEQ ID NO: 41495 - protein, 979 aa, synthetic construct
  REGION 1..979: note = engineered CasX variant
QEIKGRINKIRRRLVKDSNTKKAGKTGPMKTLLVRVMTPDLRERLENLRKKPENIPQPISNTSRANLNKLLTDYTEMKKAILHVYWEEFQKDPVGLMSRVAQPASKKIDQNKLKPEMDEKGNLTTAGFACSQCGQPLFVYKLEQVSEKGKAYTNYFGRCNVAEHEKLILLAQLKPEKDSDEAVTYSLGKFGQRALDFYSIHVTKESTHPVKPLAQIAGNRYASVPVGKALSDACMGTIASFLSKYQDIIIEHQKVVKGNQKRLESLRELAGKENLEYPSVTLPPQPHTKEGVDAYNEVIARVRMWVNLNLWQKLKLSRDDAKPLLRLKGFPSFPLVERQANEVDWWDMVCNVKKLINEKKEDGKVFWQNLAGYKRQEALRPYLSSEEDRKKGKKFARYQLGDLLLHLYKKHGEDWGKVYDEAWERIDKKVEGLSKHIKLEEERRSEDAQSKAALTDWLRAKASFVIEGLKEADKDEFCRCELKLQKWYGDLRGKPFAIEAENSILDISGFSKQYNCAFIWQKDGVKKLNLYLIINYFKGGKLRFKKIKPEAFEANRFYTVINKKSGEIVPMEVNFNFDDPNLIILPLAFGKRQGREFIWNDLLSLETGSLKLANGRVIEKTLYNRRTRQDEPALFVALTFERREVLDSSNIKPMNLIGVDRGENIPAVIALTDPEGCPLSRFKDSLGNPTHILRIGESYKEKQRTIQAKKEVEQRRAGGYSRKYASKAKNLADDMVRNTARDLLYYAVTQDAMLIFENLSRGFGRQGKRTFMAERQYTRMEDWLTAKLAYEGLPSKTYLSKTLAQYTSKTCSNCGFTITSADYDRVLEKLKKTATGWMTTINGKELKVEGQITYYNRYKRQNVVKDLSVELDRLSEESVNNDISSWTKGRSGEALSLLKKRFSHRPVQEKFVCLNCGFETHADEQAALNIARSWLFLRSQEYKKYQTNKTTGNTDKRAFVETWQSFYRKKLKEVWKPAV

SEQ ID NO: 41496 - protein, 979 aa, synthetic construct
  REGION 1..979: note = engineered CasX variant
QEIKGRINKIRRRLVKDSNTKKAGKTGPMKTLLVRVMTPDLRERLENLRKKPENIPQPISNTSRANLNKLLTDYTEMKKAILHVYWEEFQKDPVGLMSRVAQPASKKIDQNKLKPEMDEKGNLTTAGFACSQCGQPLFVYKLEQVSEKGKAYTNYFGRCNVAEHEKLIKLAQLKPEKDSDEAVTYSLGKFGQRALDFYSIHVTKESTHPVKPLAQIAGNRYASGPVGKALSDACMGTIASFLSKYQDIIIEHQKVVKGNQKRLESLRELAGKENLEYPSVTLPPQPHTKEGVDAYNEVIARVRMWVNLNLWQKLKLSRDDAKPLLRLKGFPSFPLVERQANEVDWWDMVCNVKKLINEKKEDGKVFWQNLAGYKRQEALRPYLSSEEDRKKGKKFARYQLGDLLLHLYKKHGEDWGKVYDEAWERIDKKVEGLSKHIKLEEERRSEDAQSKAALTDWLRAKASFVIEGLKEADKDEFCRCELKLQKWYGDLRGKPFAIEAENSILDISGFSKQYNCAFIWQKDGVKKLNLYLIINYFKGGKLRFKKIKPEAFEANRFYTVINKKSGEIVPMEVNFNFDDPNLIILPLAFGKRQGREFIWNDLLSLETGSLKLANGRVIEKTLYNRRTRQDEPALFVALTFERREVLDSSNIKPMNLIGVDRGENIPAVIALTDPEGCPLSRFKDSLGNPTHILRIGESYKEKQRTIQAKKEVEQRRAGGYSRKYASKAKNLADDMVRNTARDLLYYAVTQDAMLIFENLSRGFGRQGKRTFMAERQYTRMEDWLTAKLAYEGLPSKTYLSKTLAQYTSKTCSNCGFTITSADYDRVLEKLKKTATGWMTTINGKELKVEGQITYYNRYKRQNVVKDLSVELDRLSEESVNNDISSWTKGRSGEALSLLKKRFSHRPVQEKFVCLNCGFETHADEQAALNIARSWLFLRSQEYKKYQTNKTTGNTDKRAFVETWQSFYRKKLKEVWKPAV

SEQ ID NO: 41497 - protein, 978 aa, synthetic construct
  REGION 1..978: note = engineered CasX variant
QEIKGRINKIRRRLVKDSNTKKAGKTGPMKTLLVRVMTPDLRERLENLRKKPENIPQPISNTSRANLNKLLTDYTEMKKAILHVYWEEFQKDPVGLMSRVAQPASKKIDQNKLKPEMDEKGNLTTAGFACSQCGQPLFVYKLEQVSEKGKAYTNYFGRCNVAEHEKLILLAQLKPEKDSDEAVTYSLGKFGQRALDFYSIHVTKESTHPVKPLAQIAGNRYASPVGKALSDACMGTIASFLSKYQDIIIEHQKVVKGNQKRLESLRELAGKENLEYPSVTLPPQPHTKEGVDAYNEVIARVRMWVNLNLWQKLKLSRDDAKPLLRLKGFPSFPLVERQANEVDWWDMVCNVKKLINEKKEDGKVFWQNLAGYKRQEALRPYLSSEEDRKKGKKFARYQLGDLLLHLYKKHGEDWGKVYDEAWERIDKKVEGLSKHIKLEEERRSEDAQSKAALTDWLRAKASFVIEGLKEADKDEFCRCELKLQKWYGDLRGKPFAIEAENSILDISGFSKQYNCAFIWQKDGVKKLNLYLIINYFKGGKLRFKKIKPEAFEANRFYTVINKKSGEIVPMEVNFNFDDPNLIILPLAFGKRQGREFIWNDLLSLETGSLKLANGRVIEKTLYNRRTRQDEPALFVALTFERREVLDSSNIKPMNLIGVDRGENIPAVIALTDPEGCPLSRFKDSLGNPTHILRIGESYKEKQRTIQAKKEVEQRRAGGYSRKYASKAKNLADDMVRNTARDLLYYAVTQDAMLIFENLSRGFGRQGKRTFMAERQYTRMEDWLTAKLAYEGLPSKTYLSKTLAQYTSKTCSNCGFTITSADYDRVLEKLKKTATGWMTTINGKELKVEGQITYYNRYKRQNVVKDLSVELDRLSEESVNNDISSWTKGRSGEALSLLKKRFSHRPVQEKFVCLNCGFETHADEQAALNIARSWLFLRSQEYKKYQTNKTTGNTDKRAFVETWQSFYRKKLKEVWKPAV

SEQ ID NO: 41498 - protein, 979 aa, synthetic construct
  REGION 1..979: note = engineered CasX variant
QEIKGRINKIRRRLVKDSNTKKAGKTGPMKTLLVRVMTPDLRERLENLRKKPENIPQPISNTSRANLNKLLTDYTEMKKAILHVYWEEFQKDPVGLMSRVAQPASKKIDQNKLKPEMDEKGNLTTAGFACSQCGQPLFVYKLEQVSEKGKAYTNYFGRCNVAEHEKLILLAQLKPEKDSDEAVTYSLGKFGQRALDFYSIHVTKESTHPVKPLAQIAGNRYASYPVGKALSDACMGTIASFLSKYQDIIIEHQKVVKGNQKRLESLRELAGKENLEYPSVTLPPQPHTKEGVDAYNEVIARVRMWVNLNLWQKLKLSRDDAKPLLRLKGFPSFPLVERQANEVDWWDMVCNVKKLINEKKEDGKVFWQNLAGYKRQEALRPYLSSEEDRKKGKKFARYQLGDLLLHLEKKHPEDWGKVYDEAWERIDKKVEGLSKHIKLEEERRSEDAQSKAALTDWLRAKASFVIEGLKEADKDEFCRCELKLQKWYGDLRGKPFAIEAENSILDISGFSKQYNCAFIWQKDGVKKLNLYLIINYFKGGKLRFKKIKPEAFEANRFYTVINKKSGEIVPMEVNFNFDDPNLIILPLAFGKRQGREFIWNDLLSLETGSLKLANGRVIEKTLYNRRTRQDEPALFVALTFERREVLDSSNIKPMNLIGVDRGENIPAVIALTDPEGCPLSRFKDSLGNPTHILRIGESYKEKQRTIQAKKEVEQRRAGGYSRKYASKAKNLADDMVRNTARDLLYYAVTQDAMLIFENLSRGFGRQGKRTFMAERQYTRMEDWLTAKLAYEGLPSKTYLSKTLAQYTSKTCSNCGFTITSADYDRVLEKLKKTATGWMTTINGKELKVEGQITYYNRYKRQNVVKDLSVELDRLSEESVNNDISSWTKGRSGEALSLLKKRFSHRPVQEKFVCLNCGFETHADEQAALNIARSWLFLRSQEYKKYQTNKTTGNTDKRAFVETWQSFYRKKLKEVWKPAV

SEQ ID NO: 41499 - protein, 979 aa, synthetic construct
  REGION 1..979: note = engineered CasX variant
QEIKGRINKIRRRLVKDSNTKKAGKTGPMKTLLVRVMTPDLRERLENLRKKPENIPQPISNTSRANLNKLLTDYTEMKKAILHVYWEEFQKDPVGLMSRVAQPASKKIDQNKLKPEMDEKGNLTTAGFACSQCGQPLFVYKLEQVSEKGKAYTNYFGRCNVAEHEKLILLAQLKPEKDSDEAVTYSLGKFGQRALDFYSIHVTKESTHPVKPLAQIAGNRYASHPVGKALSDACMGTIASFLSKYQDIIIEHQKVVKGNQKRLESLRELAGKENLEYPSVTLPPQPHTKEGVDAYNEVIARVRMWVNLNLWQKLKLSRDDAKPLLRLKGFPSFPLVERQANEVDWWDMVCNVKKLINEKKEDGKVFWQNLAGYKRQEALRPYLSSEEDRKKGKKFARYQLGDLLLHLEKKHPEDWGKVYDEAWERIDKKVEGLSKHIKLEEERRSEDAQSKAALTDWLRAKASFVIEGLKEADKDEFCRCELKLQKWYGDLRGKPFAIEAENSILDISGFSKQYNCAFIWQKDGVKKLNLYLIINYFKGGKLRFKKIKPEAFEANRFYTVINKKSGEIVPMEVNFNFDDPNLIILPLAFGKRQGREFIWNDLLSLETGSLKLANGRVIEKTLYNRRTRQDEPALFVALTFERREVLDSSNIKPMNLIGVDRGENIPAVIALTDPEGCPLSRFKDSLGNPTHILRIGESYKEKQRTIQAKKEVEQRRAGGYSRKYASKAKNLADDMVRNTARDLLYYAVTQDAMLIFENLSRGFGRQGKRTFMAERQYTRMEDWLTAKLAYEGLPSKTYLSKTLAQYTSKTCSNCGFTITSADYDRVLEKLKKTATGWMTTINGKELKVEGQITYYNRYKRQNVVKDLSVELDRLSEESVNNDISSWTKGRSGEALSLLKKRFSHRPVQEKFVCLNCGFETHADEQAALNIARSWLFLRSQEYKKYQTNKTTGNTDKRAFVETWQSFYRKKLKEVWKPAV

SEQ ID NO: 41500 - protein, 979 aa, synthetic construct
  REGION 1..979: note = engineered CasX variant
QEIKGRINKIRRRLVKDSNTKKAGKTGPMKTLLVRVMTPDLRERLENLRKKPENIPQPISNTSRANLNKLLTDYTEMKKAILHVYWEEFQKDPVGLMSRVAQPASKKIDQNKLKPEMDEKGNLTTAGFACSQCGQPLFVYKLEQVSEKGKAYTNYFGRCNVAEHEKLILLAQLKPEKDSDEAVTYSLGKFGQRALDFYSIHVTKESTHPVKPLAQIAGNRYASSPVGKALSDACMGTIASFLSKYQDIIIEHQKVVKGNQKRLESLRELAGKENLEYPSVTLPPQPHTKEGVDAYNEVIARVRMWVNLNLWQKLKLSRDDAKPLLRLKGFPSFPLVERQANEVDWWDMVCNVKKLINEKKEDGKVFWQNLAGYKRQEALRPYLSSEEDRKKGKKFARYQLGDLLLHLEKKHPEDWGKVYDEAWERIDKKVEGLSKHIKLEEERRSEDAQSKAALTDWLRAKASFVIEGLKEADKDEFCRCELKLQKWYGDLRGKPFAIEAENSILDISGFSKQYNCAFIWQKDGVKKLNLYLIINYFKGGKLRFKKIKPEAFEANRFYTVINKKSGEIVPMEVNFNFDDPNLIILPLAFGKRQGREFIWNDLLSLETGSLKLANGRVIEKTLYNRRTRQDEPALFVALTFERREVLDSSNIKPMNLIGVDRGENIPAVIALTDPEGCPLSRFKDSLGNPTHILRIGESYKEKQRTIQAKKEVEQRRAGGYSRKYASKAKNLADDMVRNTARDLLYYAVTQDAMLIFENLSRGFGRQGKRTFMAERQYTRMEDWLTAKLAYEGLPSKTYLSKTLAQYTSKTCSNCGFTITSADYDRVLEKLKKTATGWMTTINGKELKVEGQITYYNRYKRQNVVKDLSVELDRLSEESVNNDISSWTKGRSGEALSLLKKRFSHRPVQEKFVCLNCGFETHADEQAALNIARSWLFLRSQEYKKYQTNKTTGNTDKRAFVETWQSFYRKKLKEVWKPAV

SEQ ID NO: 41501 - protein, 979 aa, synthetic construct
  REGION 1..979: note = engineered CasX variant
QEIKGRINKIRRRLVKDSNTKKAGKTGPMKTLLVRVMTPDLRERLENLRKKPENIPQPISNTSRANLNKLLTDYTEMKKAILHVYWEEFQKDPVGLMSRVAQPASKKIDQNKLKPEMDEKGNLTTAGFACSQCGQPLFVYKLEQVSEKGKAYTNYFGRCNVAEHEKLILLAQLKPEKDSDEAVTYSLGKFGQRALDFYSIHVTKESTHPVKPLAQIAGNRYASTPVGKALSDACMGTIASFLSKYQDIIIEHQKVVKGNQKRLESLRELAGKENLEYPSVTLPPQPHTKEGVDAYNEVIARVRMWVNLNLWQKLKLSRDDAKPLLRLKGFPSFPLVERQANEVDWWDMVCNVKKLINEKKEDGKVFWQNLAGYKRQEALRPYLSSEEDRKKGKKFARYQLGDLLLHLEKKHPEDWGKVYDEAWERIDKKVEGLSKHIKLEEERRSEDAQSKAALTDWLRAKASFVIEGLKEADKDEFCRCELKLQKWYGDLRGKPFAIEAENSILDISGFSKQYNCAFIWQKDGVKKLNLYLIINYFKGGKLRFKKIKPEAFEANRFYTVINKKSGEIVPMEVNFNFDDPNLIILPLAFGKRQGREFIWNDLLSLETGSLKLANGRVIEKTLYNRRTRQDEPALFVALTFERREVLDSSNIKPMNLIGVDRGENIPAVIALTDPEGCPLSRFKDSLGNPTHILRIGESYKEKQRTIQAKKEVEQRRAGGYSRKYASKAKNLADDMVRNTARDLLYYAVTQDAMLIFENLSRGFGRQGKRTFMAERQYTRMEDWLTAKLAYEGLPSKTYLSKTLAQYTSKTCSNCGFTITSADYDRVLEKLKKTATGWMTTINGKELKVEGQITYYNRYKRQNVVKDLSVELDRLSEESVNNDISSWTKGRSGEALSLLKKRFSHRPVQEKFVCLNCGFETHADEQAALNIARSWLFLRSQEYKKYQTNKTTGNTDKRAFVETWQSFYRKKLKEVWKPAV

SEQ ID NO: 41502 - protein, 979 aa, synthetic construct
  REGION 1..979: note = engineered CasX variant
QEIKGRINKIRRRLVKDSNTKKAGKTGPMKTLLVRVMTPDLRERLENLRKKPENIPQPISNTSRANLNKLLTDYTEMKKAILHVYWEEFQKDPVGLMSRVAQPASKKIDQNKLKPEMDEKGNLTTAGFACSQCGQPLFVYKLEQVSEKGKAYTNYFGRCNVAEHEKLILLAQLKPEKDSDEAVTYSLGKFGQRALDFYSIHVTKESTHPVKPLAQIAGNRYASAPVGKALSDACMGTIASFLSKYQDIIIEHQKVVKGNQKRLESLRELAGKENLEYPSVTLPPQPHTKEGVDAYNEVIARVRMWVNLNLWQKLKLSRDDAKPLLRLKGFPSFPLVERQANEVDWWDMVCNVKKLINEKKEDGKVFWQNLAGYKRQEALRPYLSSEEDRKKGKKFARYQLGDLLLHLEKKHPEDWGKVYDEAWERIDKKVEGLSKHIKLEEERRSEDAQSKAALTDWLRAKASFVIEGLKEADKDEFCRCELKLQKWYGDLRGKPFAIEAENSILDISGFSKQYNCAFIWQKDGVKKLNLYLIINYFKGGKLRFKKIKPEAFEANRFYTVINKKSGEIVPMEVNFNFDDPNLIILPLAFGKRQGREFIWNDLLSLETGSLKLANGRVIEKTLYNRRTRQDEPALFVALTFERREVLDSSNIKPMNLIGVDRGENIPAVIALTDPEGCPLSRFKDSLGNPTHILRIGESYKEKQRTIQAKKEVEQRRAGGYSRKYASKAKNLADDMVRNTARDLLYYAVTQDAMLIFENLSRGFGRQGKRTFMAERQYTRMEDWLTAKLAYEGLPSKTYLSKTLAQYTSKTCSNCGFTITSADYDRVLEKLKKTATGWMTTINGKELKVEGQITYYNRYKRQNVVKDLSVELDRLSEESVNNDISSWTKGRSGEALSLLKKRFSHRPVQEKFVCLNCGFETHADEQAALNIARSWLFLRSQEYKKYQTNKTTGNTDKRAFVETWQSFYRKKLKEVWKPAV

SEQ ID NO: 41503 - protein, 979 aa, synthetic construct
  REGION 1..979: note = engineered CasX variant
QEIKGRINKIRRRLVKDSNTKKAGKTGPMKTLLVRVMTPDLRERLENLRKKPENIPQPISNTSRANLNKLLTDYTEMKKAILHVYWEEFQKDPVGLMSRVAQPASKKIDQNKLKPEMDEKGNLTTAGFACSQCGQPLFVYKLEQVSEKGKAYTNYFGRCNVAEHEKLILLAQLKPEKDSDEAVTYSLGKFGQRALDFYSIHVTKESTHPVKPLAQIAGNRYASVPVGKALSDACMGTIASFLSKYQDIIIEHQKVVKGNQKRLESLRELAGKENLEYPSVTLPPQPHTKEGVDAYNEVIARVRMWVNLNLWQKLKLSRDDAKPLLRLKGFPSFPLVERQANEVDWWDMVCNVKKLINEKKEDGKVFWQNLAGYKRQEALRPYLSSEEDRKKGKKFARYQLGDLLLHLEKKHPEDWGKVYDEAWERIDKKVEGLSKHIKLEEERRSEDAQSKAALTDWLRAKASFVIEGLKEADKDEFCRCELKLQKWYGDLRGKPFAIEAENSILDISGFSKQYNCAFIWQKDGVKKLNLYLIINYFKGGKLRFKKIKPEAFEANRFYTVINKKSGEIVPMEVNFNFDDPNLIILPLAFGKRQGREFIWNDLLSLETGSLKLANGRVIEKTLYNRRTRQDEPALFVALTFERREVLDSSNIKPMNLIGVDRGENIPAVIALTDPEGCPLSRFKDSLGNPTHILRIGESYKEKQRTIQAKKEVEQRRAGGYSRKYASKAKNLADDMVRNTARDLLYYAVTQDAMLIFENLSRGFGRQGKRTFMAERQYTRMEDWLTAKLAYEGLPSKTYLSKTLAQYTSKTCSNCGFTITSADYDRVLEKLKKTATGWMTTINGKELKVEGQITYYNRYKRQNVVKDLSVELDRLSEESVNNDISSWTKGRSGEALSLLKKRFSHRPVQEKFVCLNCGFETHADEQAALNIARSWLFLRSQEYKKYQTNKTTGNTDKRAFVETWQSFYRKKLKEVWKPAV

SEQ ID NO: 41504 - protein, 979 aa, synthetic construct
  REGION 1..979: note = engineered CasX variant
QEIKGRINKIRRRLVKDSNTKKAGKTGPMKTLLVRVMTPDLRERLENLRKKPENIPQPISNTSRANLNKLLTDYTEMKKAILHVYWEEFQKDPVGLMSRVAQPASKKIDQNKLKPEMDEKGNLTTAGFACSQCGQPLFVYKLEQVSEKGKAYTNYFGRCNVAEHEKLIKLAQLKPEKDSDEAVTYSLGKFGQRALDFYSIHVTKESTHPVKPLAQIAGNRYASGPVGKALSDACMGTIASFLSKYQDIIIEHQKVVKGNQKRLESLRELAGKENLEYPSVTLPPQPHTKEGVDAYNEVIARVRMWVNLNLWQKLKLSRDDAKPLLRLKGFPSFPLVERQANEVDWWDMVCNVKKLINEKKEDGKVFWQNLAGYKRQEALRPYLSSEEDRKKGKKFARYQLGDLLLHLEKKHPEDWGKVYDEAWERIDKKVEGLSKHIKLEEERRSEDAQSKAALTDWLRAKASFVIEGLKEADKDEFCRCELKLQKWYGDLRGKPFAIEAENSILDISGFSKQYNCAFIWQKDGVKKLNLYLIINYFKGGKLRFKKIKPEAFEANRFYTVINKKSGEIVPMEVNFNFDDPNLIILPLAFGKRQGREFIWNDLLSLETGSLKLANGRVIEKTLYNRRTRQDEPALFVALTFERREVLDSSNIKPMNLIGVDRGENIPAVIALTDPEGCPLSRFKDSLGNPTHILRIGESYKEKQRTIQAKKEVEQRRAGGYSRKYASKAKNLADDMVRNTARDLLYYAVTQDAMLIFENLSRGFGRQGKRTFMAERQYTRMEDWLTAKLAYEGLPSKTYLSKTLAQYTSKTCSNCGFTITSADYDRVLEKLKKTATGWMTTINGKELKVEGQITYYNRYKRQNVVKDLSVELDRLSEESVNNDISSWTKGRSGEALSLLKKRFSHRPVQEKFVCLNCGFETHADEQAALNIARSWLFLRSQEYKKYQTNKTTGNTDKRAFVETWQSFYRKKLKEVWKPAV

SEQ ID NO: 41505 - protein, 978 aa, synthetic construct
  REGION 1..978: note = engineered CasX variant
QEIKGRINKIRRRLVKDSNTKKAGKTGPMKTLLVRVMTPDLRERLENLRKKPENIPQPISNTSRANLNKLLTDYTEMKKAILHVYWEEFQKDPVGLMSRVAQPASKKIDQNKLKPEMDEKGNLTTAGFACSQCGQPLFVYKLEQVSEKGKAYTNYFGRCNVAEHEKLILLAQLKPEKDSDEAVTYSLGKFGQRALDFYSIHVTKESTHPVKPLAQIAGNRYASPVGKALSDACMGTIASFLSKYQDIIIEHQKVVKGNQKRLESLRELAGKENLEYPSVTLPPQPHTKEGVDAYNEVIARVRMWVNLNLWQKLKLSRDDAKPLLRLKGFPSFPLVERQANEVDWWDMVCNVKKLINEKKEDGKVFWQNLAGYKRQEALRPYLSSEEDRKKGKKFARYQLGDLLLHLEKKHPEDWGKVYDEAWERIDKKVEGLSKHIKLEEERRSEDAQSKAALTDWLRAKASFVIEGLKEADKDEFCRCELKLQKWYGDLRGKPFAIEAENSILDISGFSKQYNCAFIWQKDGVKKLNLYLIINYFKGGKLRFKKIKPEAFEANRFYTVINKKSGEIVPMEVNFNFDDPNLIILPLAFGKRQGREFIWNDLLSLETGSLKLANGRVIEKTLYNRRTRQDEPALFVALTFERREVLDSSNIKPMNLIGVDRGENIPAVIALTDPEGCPLSRFKDSLGNPTHILRIGESYKEKQRTIQAKKEVEQRRAGGYSRKYASKAKNLADDMVRNTARDLLYYAVTQDAMLIFENLSRGFGRQGKRTFMAERQYTRMEDWLTAKLAYEGLPSKTYLSKTLAQYTSKTCSNCGFTITSADYDRVLEKLKKTATGWMTTINGKELKVEGQITYYNRYKRQNVVKDLSVELDRLSEESVNNDISSWTKGRSGEALSLLKKRFSHRPVQEKFVCLNCGFETHADEQAALNIARSWLFLRSQEYKKYQTNKTTGNTDKRAFVETWQSFYRKKLKEVWKPAV

SEQ ID NO: 41506 - protein, 980 aa, synthetic construct
  REGION 1..980: note = engineered CasX variant
QEIKGRINKIRRRLVKDSNTKKAGKTGPMKTLLVRVMTPDLRERLENLRKKPENIPQPISNTSRANLNKLLTDYTEMKKAILHVYWEEFQKDPVGLMSRVAQPASKKIDQNKLKPEMDEKGNLTTAGFACSQCGQPLFVYKLEQVSEKGKAYTNYFGRCNVAEHEKLILLAQLKPEKDSDEAVTYSLGKFGQRALDFYSIHVTKESTHPVKPLAQIAGNRYASYPVGKALSDACMGTIASFLSKYQDIIIEHQKVVKGNQKRLESLRELAGKENLEYPSVTLPPQPHTKEGVDAYNEVIARVRMWVNLNLWQKLKLSRDDAKPLLRLKGFPSFPLVERQANEVDWWDMVCNVKKLINEKKEDGKVFWQNLAGYKRQEALRPYLSSEEDRKKGKKFARYQLGDLLLHLEKKHGERDWGKVYDEAWERIDKKVEGLSKHIKLEEERRSEDAQSKAALTDWLRAKASFVIEGLKEADKDEFCRCELKLQKWYGDLRGKPFAIEAENSILDISGFSKQYNCAFIWQKDGVKKLNLYLIINYFKGGKLRFKKIKPEAFEANRFYTVINKKSGEIVPMEVNFNFDDPNLIILPLAFGKRQGREFIWNDLLSLETGSLKLANGRVIEKTLYNRRTRQDEPALFVALTFERREVLDSSNIKPMNLIGVDRGENIPAVIALTDPEGCPLSRFKDSLGNPTHILRIGESYKEKQRTIQAKKEVEQRRAGGYSRKYASKAKNLADDMVRNTARDLLYYAVTQDAMLIFENLSRGFGRQGKRTFMAERQYTRMEDWLTAKLAYEGLPSKTYLSKTLAQYTSKTCSNCGFTITSADYDRVLEKLKKTATGWMTTINGKELKVEGQITYYNRYKRQNVVKDLSVELDRLSEESVNNDISSWTKGRSGEALSLLKKRFSHRPVQEKFVCLNCGFETHADEQAALNIARSWLFLRSQEYKKYQTNKTTGNTDKRAFVETWQSFYRKKLKEVWKPAV

SEQ ID NO: 41507 - protein, 980 aa, synthetic construct
  REGION 1..980: note = engineered CasX variant
QEIKGRINKIRRRLVKDSNTKKAGKTGPMKTLLVRVMTPDLRERLENLRKKPENIPQPISNTSRANLNKLLTDYTEMKKAILHVYWEEFQKDPVGLMSRVAQPASKKIDQNKLKPEMDEKGNLTTAGFACSQCGQPLFVYKLEQVSEKGKAYTNYFGRCNVAEHEKLILLAQLKPEKDSDEAVTYSLGKFGQRALDFYSIHVTKESTHPVKPLAQIAGNRYASHPVGKALSDACMGTIASFLSKYQDIIIEHQKVVKGNQKRLESLRELAGKENLEYPSVTLPPQPHTKEGVDAYNEVIARVRMWVNLNLWQKLKLSRDDAKPLLRLKGFPSFPLVERQANEVDWWDMVCNVKKLINEKKEDGKVFWQNLAGYKRQEALRPYLSSEEDRKKGKKFARYQLGDLLLHLEKKHGERDWGKVYDEAWERIDKKVEGLSKHIKLEEERRSEDAQSKAALTDWLRAKASFVIEGLKEADKDEFCRCELKLQKWYGDLRGKPFAIEAENSILDISGFSKQYNCAFIWQKDGVKKLNLYLIINYFKGGKLRFKKIKPEAFEANRFYTVINKKSGEIVPMEVNFNFDDPNLIILPLAFGKRQGREFIWNDLLSLETGSLKLANGRVIEKTLYNRRTRQDEPALFVALTFERREVLDSSNIKPMNLIGVDRGENIPAVIALTDPEGCPLSRFKDSLGNPTHILRIGESYKEKQRTIQAKKEVEQRRAGGYSRKYASKAKNLADDMVRNTARDLLYYAVTQDAMLIFENLSRGFGRQGKRTFMAERQYTRMEDWLTAKLAYEGLPSKTYLSKTLAQYTSKTCSNCGFTITSADYDRVLEKLKKTATGWMTTINGKELKVEGQITYYNRYKRQNVVKDLSVELDRLSEESVNNDISSWTKGRSGEALSLLKKRFSHRPVQEKFVCLNCGFETHADEQAALNIARSWLFLRSQEYKKYQTNKTTGNTDKRAFVETWQSFYRKKLKEVWKPAV

SEQ ID NO: 41508 - protein, 980 aa, synthetic construct
  REGION 1..980: note = engineered CasX variant
QEIKGRINKIRRRLVKDSNTKKAGKTGPMKTLLVRVMTPDLRERLENLRKKPENIPQPISNTSRANLNKLLTDYTEMKKAILHVYWEEFQKDPVGLMSRVAQPASKKIDQNKLKPEMDEKGNLTTAGFACSQCGQPLFVYKLEQVSEKGKAYTNYFGRCNVAEHEKLILLAQLKPEKDSDEAVTYSLGKFGQRALDFYSIHVTKESTHPVKPLAQIAGNRYASSPVGKALSDACMGTIASFLSKYQDIIIEHQKVVKGNQKRLESLRELAGKENLEYPSVTLPPQPHTKEGVDAYNEVIARVRMWVNLNLWQKLKLSRDDAKPLLRLKGFPSFPLVERQANEVDWWDMVCNVKKLINEKKEDGKVFWQNLAGYKRQEALRPYLSSEEDRKKGKKFARYQLGDLLLHLEKKHGERDWGKVYDEAWERIDKKVEGLSKHIKLEEERRSEDAQSKAALTDWLRAKASFVIEGLKEADKDEFCRCELKLQKWYGDLRGKPFAIEAENSILDISGFSKQYNCAFIWQKDGVKKLNLYLIINYFKGGKLRFKKIKPEAFEANRFYTVINKKSGEIVPMEVNFNFDDPNLIILPLAFGKRQGREFIWNDLLSLETGSLKLANGRVIEKTLYNRRTRQDEPALFVALTFERREVLDSSNIKPMNLIGVDRGENIPAVIALTDPEGCPLSRFKDSLGNPTHILRIGESYKEKQRTIQAKKEVEQRRAGGYSRKYASKAKNLADDMVRNTARDLLYYAVTQDAMLIFENLSRGFGRQGKRTFMAERQYTRMEDWLTAKLAYEGLPSKTYLSKTLAQYTSKTCSNCGFTITSADYDRVLEKLKKTATGWMTTINGKELKVEGQITYYNRYKRQNVVKDLSVELDRLSEESVNNDISSWTKGRSGEALSLLKKRFSHRPVQEKFVCLNCGFETHADEQAALNIARSWLFLRSQEYKKYQTNKTTGNTDKRAFVETWQSFYRKKLKEVWKPAV

SEQ ID NO: 41509 - protein, 980 aa, synthetic construct
  REGION 1..980: note = engineered CasX variant
QEIKGRINKIRRRLVKDSNTKKAGKTGPMKTLLVRVMTPDLRERLENLRKKPENIPQPISNTSRANLNKLLTDYTEMKKAILHVYWEEFQKDPVGLMSRVAQPASKKIDQNKLKPEMDEKGNLTTAGFACSQCGQPLFVYKLEQVSEKGKAYTNYFGRCNVAEHEKLILLAQLKPEKDSDEAVTYSLGKFGQRALDFYSIHVTKESTHPVKPLAQIAGNRYASTPVGKALSDACMGTIASFLSKYQDIIIEHQKVVKGNQKRLESLRELAGKENLEYPSVTLPPQPHTKEGVDAYNEVIARVRMWVNLNLWQKLKLSRDDAKPLLRLKGFPSFPLVERQANEVDWWDMVCNVKKLINEKKEDGKVFWQNLAGYKRQEALRPYLSSEEDRKKGKKFARYQLGDLLLHLEKKHGERDWGKVYDEAWERIDKKVEGLSKHIKLEEERRSEDAQSKAALTDWLRAKASFVIEGLKEADKDEFCRCELKLQKWYGDLRGKPFAIEAENSILDISGFSKQYNCAFIWQKDGVKKLNLYLIINYFKGGKLRFKKIKPEAFEANRFYTVINKKSGEIVPMEVNFNFDDPNLIILPLAFGKRQGREFIWNDLLSLETGSLKLANGRVIEKTLYNRRTRQDEPALFVALTFERREVLDSSNIKPMNLIGVDRGENIPAVIALTDPEGCPLSRFKDSLGNPTHILRIGESYKEKQRTIQAKKEVEQRRAGGYSRKYASKAKNLADDMVRNTARDLLYYAVTQDAMLIFENLSRGFGRQGKRTFMAERQYTRMEDWLTAKLAYEGLPSKTYLSKTLAQYTSKTCSNCGFTITSADYDRVLEKLKKTATGWMTTINGKELKVEGQITYYNRYKRQNVVKDLSVELDRLSEESVNNDISSWTKGRSGEALSLLKKRFSHRPVQEKFVCLNCGFETHADEQAALNIARSWLFLRSQEYKKYQTNKTTGNTDKRAFVETWQSFYRKKLKEVWKPAV

SEQ ID NO: 41510 - protein, 980 aa, synthetic construct
  REGION 1..980: note = engineered CasX variant
QEIKGRINKIRRRLVKDSNTKKAGKTGPMKTLLVRVMTPDLRERLENLRKKPENIPQPISNTSRANLNKLLTDYTEMKKAILHVYWEEFQKDPVGLMSRVAQPASKKIDQNKLKPEMDEKGNLTTAGFACSQCGQPLFVYKLEQVSEKGKAYTNYFGRCNVAEHEKLILLAQLKPEKDSDEAVTYSLGKFGQRALDFYSIHVTKESTHPVKPLAQIAGNRYASAPVGKALSDACMGTIASFLSKYQDIIIEHQKVVKGNQKRLESLRELAGKENLEYPSVTLPPQPHTKEGVDAYNEVIARVRMWVNLNLWQKLKLSRDDAKPLLRLKGFPSFPLVERQANEVDWWDMVCNVKKLINEKKEDGKVFWQNLAGYKRQEALRPYLSSEEDRKKGKKFARYQLGDLLLHLEKKHGERDWGKVYDEAWERIDKKVEGLSKHIKLEEERRSEDAQSKAALTDWLRAKASFVIEGLKEADKDEFCRCELKLQKWYGDLRGKPFAIEAENSILDISGFSKQYNCAFIWQKDGVKKLNLYLIINYFKGGKLRFKKIKPEAFEANRFYTVINKKSGEIVPMEVNFNFDDPNLIILPLAFGKRQGREFIWNDLLSLETGSLKLANGRVIEKTLYNRRTRQDEPALFVALTFERREVLDSSNIKPMNLIGVDRGENIPAVIALTDPEGCPLSRFKDSLGNPTHILRIGESYKEKQRTIQAKKEVEQRRAGGYSRKYASKAKNLADDMVRNTARDLLYYAVTQDAMLIFENLSRGFGRQGKRTFMAERQYTRMEDWLTAKLAYEGLPSKTYLSKTLAQYTSKTCSNCGFTITSADYDRVLEKLKKTATGWMTTINGKELKVEGQITYYNRYKRQNVVKDLSVELDRLSEESVNNDISSWTKGRSGEALSLLKKRFSHRPVQEKFVCLNCGFETHADEQAALNIARSWLFLRSQEYKKYQTNKTTGNTDKRAFVETWQSFYRKKLKEVWKPAV

SEQ ID NO: 41511 - protein, 980 aa, synthetic construct
  REGION 1..980: note = engineered CasX variant
QEIKGRINKIRRRLVKDSNTKKAGKTGPMKTLLVRVMTPDLRERLENLRKKPENIPQPISNTSRANLNKLLTDYTEMKKAILHVYWEEFQKDPVGLMSRVAQPASKKIDQNKLKPEMDEKGNLTTAGFACSQCGQPLFVYKLEQVSEKGKAYTNYFGRCNVAEHEKLILLAQLKPEKDSDEAVTYSLGKFGQRALDFYSIHVTKESTHPVKPLAQIAGNRYASVPVGKALSDACMGTIASFLSKYQDIIIEHQKVVKGNQKRLESLRELAGKENLEYPSVTLPPQPHTKEGVDAYNEVIARVRMWVNLNLWQKLKLSRDDAKPLLRLKGFPSFPLVERQANEVDWWDMVCNVKKLINEKKEDGKVFWQNLAGYKRQEALRPYLSSEEDRKKGKKFARYQLGDLLLHLEKKHGERDWGKVYDEAWERIDKKVEGLSKHIKLEEERRSEDAQSKAALTDWLRAKASFVIEGLKEADKDEFCRCELKLQKWYGDLRGKPFAIEAENSILDISGFSKQYNCAFIWQKDGVKKLNLYLIINYFKGGKLRFKKIKPEAFEANRFYTVINKKSGEIVPMEVNFNFDDPNLIILPLAFGKRQGREFIWNDLLSLETGSLKLANGRVIEKTLYNRRTRQDEPALFVALTFERREVLDSSNIKPMNLIGVDRGENIPAVIALTDPEGCPLSRFKDSLGNPTHILRIGESYKEKQRTIQAKKEVEQRRAGGYSRKYASKAKNLADDMVRNTARDLLYYAVTQDAMLIFENLSRGFGRQGKRTFMAERQYTRMEDWLTAKLAYEGLPSKTYLSKTLAQYTSKTCSNCGFTITSADYDRVLEKLKKTATGWMTTINGKELKVEGQITYYNRYKRQNVVKDLSVELDRLSEESVNNDISSWTKGRSGEALSLLKKRFSHRPVQEKFVCLNCGFETHADEQAALNIARSWLFLRSQEYKKYQTNKTTGNTDKRAFVETWQSFYRKKLKEVWKPAV

SEQ ID NO: 41512 - protein, 980 aa, synthetic construct
  REGION 1..980: note = engineered CasX variant
QEIKGRINKIRRRLVKDSNTKKAGKTGPMKTLLVRVMTPDLRERLENLRKKPENIPQPISNTSRANLNKLLTDYTEMKKAILHVYWEEFQKDPVGLMSRVAQPASKKIDQNKLKPEMDEKGNLTTAGFACSQCGQPLFVYKLEQVSEKGKAYTNYFGRCNVAEHEKLIKLAQLKPEKDSDEAVTYSLGKFGQRALDFYSIHVTKESTHPVKPLAQIAGNRYASGPVGKALSDACMGTIASFLSKYQDIIIEHQKVVKGNQKRLESLRELAGKENLEYPSVTLPPQPHTKEGVDAYNEVIARVRMWVNLNLWQKLKLSRDDAKPLLRLKGFPSFPLVERQANEVDWWDMVCNVKKLINEKKEDGKVFWQNLAGYKRQEALRPYLSSEEDRKKGKKFARYQLGDLLLHLEKKHGERDWGKVYDEAWERIDKKVEGLSKHIKLEEERRSEDAQSKAALTDWLRAKASFVIEGLKEADKDEFCRCELKLQKWYGDLRGKPFAIEAENSILDISGFSKQYNCAFIWQKDGVKKLNLYLIINYFKGGKLRFKKIKPEAFEANRFYTVINKKSGEIVPMEVNFNFDDPNLIILPLAFGKRQGREFIWNDLLSLETGSLKLANGRVIEKTLYNRRTRQDEPALFVALTFERREVLDSSNIKPMNLIGVDRGENIPAVIALTDPEGCPLSRFKDSLGNPTHILRIGESYKEKQRTIQAKKEVEQRRAGGYSRKYASKAKNLADDMVRNTARDLLYYAVTQDAMLIFENLSRGFGRQGKRTFMAERQYTRMEDWLTAKLAYEGLPSKTYLSKTLAQYTSKTCSNCGFTITSADYDRVLEKLKKTATGWMTTINGKELKVEGQITYYNRYKRQNVVKDLSVELDRLSEESVNNDISSWTKGRSGEALSLLKKRFSHRPVQEKFVCLNCGFETHADEQAALNIARSWLFLRSQEYKKYQTNKTTGNTDKRAFVETWQSFYRKKLKEVWKPAV

SEQ ID NO: 41513 - protein, 979 aa, synthetic construct
  REGION 1..979: note = engineered CasX variant
QEIKGRINKIRRRLVKDSNTKKAGKTGPMKTLLVRVMTPDLRERLENLRKKPENIPQPISNTSRANLNKLLTDYTEMKKAILHVYWEEFQKDPVGLMSRVAQPASKKIDQNKLKPEMDEKGNLTTAGFACSQCGQPLFVYKLEQVSEKGKAYTNYFGRCNVAEHEKLILLAQLKPEKDSDEAVTYSLGKFGQRALDFYSIHVTKESTHPVKPLAQIAGNRYASPVGKALSDACMGTIASFLSKYQDIIIEHQKVVKGNQKRLESLRELAGKENLEYPSVTLPPQPHTKEGVDAYNEVIARVRMWVNLNLWQKLKLSRDDAKPLLRLKGFPSFPLVERQANEVDWWDMVCNVKKLINEKKEDGKVFWQNLAGYKRQEALRPYLSSEEDRKKGKKFARYQLGDLLLHLEKKHGERDWGKVYDEAWERIDKKVEGLSKHIKLEEERRSEDAQSKAALTDWLRAKASFVIEGLKEADKDEFCRCELKLQKWYGDLRGKPFAIEAENSILDISGFSKQYNCAFIWQKDGVKKLNLYLIINYFKGGKLRFKKIKPEAFEANRFYTVINKKSGEIVPMEVNFNFDDPNLIILPLAFGKRQGREFIWNDLLSLETGSLKLANGRVIEKTLYNRRTRQDEPALFVALTFERREVLDSSNIKPMNLIGVDRGENIPAVIALTDPEGCPLSRFKDSLGNPTHILRIGESYKEKQRTIQAKKEVEQRRAGGYSRKYASKAKNLADDMVRNTARDLLYYAVTQDAMLIFENLSRGFGRQGKRTFMAERQYTRMEDWLTAKLAYEGLPSKTYLSKTLAQYTSKTCSNCGFTITSADYDRVLEKLKKTATGWMTTINGKELKVEGQITYYNRYKRQNVVKDLSVELDRLSEESVNNDISSWTKGRSGEALSLLKKRFSHRPVQEKFVCLNCGFETHADEQAALNIARSWLFLRSQEYKKYQTNKTTGNTDKRAFVETWQSFYRKKLKEVWKPAV

SEQ ID NO: 41514 - protein, 980 aa, synthetic construct
  REGION 1..980: note = engineered CasX variant
QEIKGRINKIRRRLVKDSNTKKAGKTGPMKTLLVRVMTPDLRERLENLRKKPENIPQPISNTSRANLNKLLTDYTEMKKAILHVYWEEFQKDPVGLMSRVAQPASKKIDQNKLKPEMDEKGNLTTAGFACSQCGQPLFVYKLEQVSEKGKAYTNYFGRCNVAEHEKLILLAQLKPEKDSDEAVTYSLGKFGQRALDFYSIHVTKESTHPVKPLAQIAGNRYASYPVGKALSDACMGTIASFLSKYQDIIIEHQKVVKGNQKRLESLRELAGKENLEYPSVTLPPQPHTKEGVDAYNEVIARVRMWVNLNLWQKLKLSRDDAKPLLRLKGFPSFPLVERQANEVDWWDMVCNVKKLINEKKEDGKVFWQNLAGYKRQEALRPYLSSEEDRKKGKKFARYQLGDLLLHLEKKHGEYDWGKVYDEAWERIDKKVEGLSKHIKLEEERRSEDAQSKAALTDWLRAKASFVIEGLKEADKDEFCRCELKLQKWYGDLRGKPFAIEAENSILDISGFSKQYNCAFIWQKDGVKKLNLYLIINYFKGGKLRFKKIKPEAFEANRFYTVINKKSGEIVPMEVNFNFDDPNLIILPLAFGKRQGREFIWNDLLSLETGSLKLANGRVIEKTLYNRRTRQDEPALFVALTFERREVLDSSNIKPMNLIGVDRGENIPAVIALTDPEGCPLSRFKDSLGNPTHILRIGESYKEKQRTIQAKKEVEQRRAGGYSRKYASKAKNLADDMVRNTARDLLYYAVTQDAMLIFENLSRGFGRQGKRTFMAERQYTRMEDWLTAKLAYEGLPSKTYLSKTLAQYTSKTCSNCGFTITSADYDRVLEKLKKTATGWMTTINGKELKVEGQITYYNRYKRQNVVKDLSVELDRLSEESVNNDISSWTKGRSGEALSLLKKRFSHRPVQEKFVCLNCGFETHADEQAALNIARSWLFLRSQEYKKYQTNKTTGNTDKRAFVETWQSFYRKKLKEVWKPAV

SEQ ID NO: 41515 - protein, 980 aa, synthetic construct
  REGION 1..980: note = engineered CasX variant
QEIKGRINKIRRRLVKDSNTKKAGKTGPMKTLLVRVMTPDLRERLENLRKKPENIPQPISNTSRANLNKLLTDYTEMKKAILHVYWEEFQKDPVGLMSRVAQPASKKIDQNKLKPEMDEKGNLTTAGFACSQCGQPLFVYKLEQVSEKGKAYTNYFGRCNVAEHEKLILLAQLKPEKDSDEAVTYSLGKFGQRALDFYSIHVTKESTHPVKPLAQIAGNRYASHPVGKALSDACMGTIASFLSKYQDIIIEHQKVVKGNQKRLESLRELAGKENLEYPSVTLPPQPHTKEGVDAYNEVIARVRMWVNLNLWQKLKLSRDDAKPLLRLKGFPSFPLVERQANEVDWWDMVCNVKKLINEKKEDGKVFWQNLAGYKRQEALRPYLSSEEDRKKGKKFARYQLGDLLLHLEKKHGEYDWGKVYDEAWERIDKKVEGLSKHIKLEEERRSEDAQSKAALTDWLRAKASFVIEGLKEADKDEFCRCELKLQKWYGDLRGKPFAIEAENSILDISGFSKQYNCAFIWQKDGVKKLNLYLIINYFKGGKLRFKKIKPEAFEANRFYTVINKKSGEIVPMEVNFNFDDPNLIILPLAFGKRQGREFIWNDLLSLETGSLKLANGRVIEKTLYNRRTRQDEPALFVALTFERREVLDSSNIKPMNLIGVDRGENIPAVIALTDPEGCPLSRFKDSLGNPTHILRIGESYKEKQRTIQAKKEVEQRRAGGYSRKYASKAKNLADDMVRNTARDLLYYAVTQDAMLIFENLSRGFGRQGKRTFMAERQYTRMEDWLTAKLAYEGLPSKTYLSKTLAQYTSKTCSNCGFTITSADYDRVLEKLKKTATGWMTTINGKELKVEGQITYYNRYKRQNVVKDLSVELDRLSEESVNNDISSWTKGRSGEALSLLKKRFSHRPVQEKFVCLNCGFETHADEQAALNIARSWLFLRSQEYKKYQTNKTTGNTDKRAFVETWQSFYRKKLKEVWKPAV

SEQ ID NO: 41516 - protein, 980 aa, synthetic construct
  REGION 1..980: note = engineered CasX variant
QEIKGRINKIRRRLVKDSNTKKAGKTGPMKTLLVRVMTPDLRERLENLRKKPENIPQPISNTSRANLNKLLTDYTEMKKAILHVYWEEFQKDPVGLMSRVAQPASKKIDQNKLKPEMDEKGNLTTAGFACSQCGQPLFVYKLEQVSEKGKAYTNYFGRCNVAEHEKLILLAQLKPEKDSDEAVTYSLGKFGQRALDFYSIHVTKESTHPVKPLAQIAGNRYASSPVGKALSDACMGTIASFLSKYQDIIIEHQKVVKGNQKRLESLRELAGKENLEYPSVTLPPQPHTKEGVDAYNEVIARVRMWVNLNLWQKLKLSRDDAKPLLRLKGFPSFPLVERQANEVDWWDMVCNVKKLINEKKEDGKVFWQNLAGYKRQEALRPYLSSEEDRKKGKKFARYQLGDLLLHLEKKHGEYDWGKVYDEAWERIDKKVEGLSKHIKLEEERRSEDAQSKAALTDWLRAKASFVIEGLKEADKDEFCRCELKLQKWYGDLRGKPFAIEAENSILDISGFSKQYNCAFIWQKDGVKKLNLYLIINYFKGGKLRFKKIKPEAFEANRFYTVINKKSGEIVPMEVNFNFDDPNLIILPLAFGKRQGREFIWNDLLSLETGSLKLANGRVIEKTLYNRRTRQDEPALFVALTFERREVLDSSNIKPMNLIGVDRGENIPAVIALTDPEGCPLSRFKDSLGNPTHILRIGESYKEKQRTIQAKKEVEQRRAGGYSRKYASKAKNLADDMVRNTARDLLYYAVTQDAMLIFENLSRGFGRQGKRTFMAERQYTRMEDWLTAKLAYEGLPSKTYLSKTLAQYTSKTCSNCGFTITSADYDRVLEKLKKTATGWMTTINGKELKVEGQITYYNRYKRQNVVKDLSVELDRLSEESVNNDISSWTKGRSGEALSLLKKRFSHRPVQEKFVCLNCGFETHADEQAALNIARSWLFLRSQEYKKYQTNKTTGNTDKRAFVETWQSFYRKKLKEVWKPAV

SEQ ID NO: 41517 - protein, 980 aa, synthetic construct
  REGION 1..980: note = engineered CasX variant
QEIKGRINKIRRRLVKDSNTKKAGKTGPMKTLLVRVMTPDLRERLENLRKKPENIPQPISNTSRANLNKLLTDYTEMKKAILHVYWEEFQKDPVGLMSRVAQPASKKIDQNKLKPEMDEKGNLTTAGFACSQCGQPLFVYKLEQVSEKGKAYTNYFGRCNVAEHEKLILLAQLKPEKDSDEAVTYSLGKFGQRALDFYSIHVTKESTHPVKPLAQIAGNRYASTPVGKALSDACMGTIASFLSKYQDIIIEHQKVVKGNQKRLESLRELAGKENLEYPSVTLPPQPHTKEGVDAYNEVIARVRMWVNLNLWQKLKLSRDDAKPLLRLKGFPSFPLVERQANEVDWWDMVCNVKKLINEKKEDGKVFWQNLAGYKRQEALRPYLSSEEDRKKGKKFARYQLGDLLLHLEKKHGEYDWGKVYDEAWERIDKKVEGLSKHIKLEEERRSEDAQSKAALTDWLRAKASFVIEGLKEADKDEFCRCELKLQKWYGDLRGKPFAIEAENSILDISGFSKQYNCAFIWQKDGVKKLNLYLIINYFKGGKLRFKKIKPEAFEANRFYTVINKKSGEIVPMEVNFNFDDPNLIILPLAFGKRQGREFIWNDLLSLETGSLKLANGRVIEKTLYNRRTRQDEPALFVALTFERREVLDSSNIKPMNLIGVDRGENIPAVIALTDPEGCPLSRFKDSLGNPTHILRIGESYKEKQRTIQAKKEVEQRRAGGYSRKYASKAKNLADDMVRNTARDLLYYAVTQDAMLIFENLSRGFGRQGKRTFMAERQYTRMEDWLTAKLAYEGLPSKTYLSKTLAQYTSKTCSNCGFTITSADYDRVLEKLKKTATGWMTTINGKELKVEGQITYYNRYKRQNVVKDLSVELDRLSEESVNNDISSWTKGRSGEALSLLKKRFSHRPVQEKFVCLNCGFETHADEQAALNIARSWLFLRSQEYKKYQTNKTTGNTDKRAFVETWQSFYRKKLKEVWKPAV

SEQ ID NO: 41518 - protein, 980 aa, synthetic construct
  REGION 1..980: note = engineered CasX variant
QEIKGRINKIRRRLVKDSNTKKAGKTGPMKTLLVRVMTPDLRERLENLRKKPENIPQPISNTSRANLNKLLTDYTEMKKAILHVYWEEFQKDPVGLMSRVAQPASKKIDQNKLKPEMDEKGNLTTAGFACSQCGQPLFVYKLEQVSEKGKAYTNYFGRCNVAEHEKLILLAQLKPEKDSDEAVTYSLGKFGQRALDFYSIHVTKESTHPVKPLAQIAGNRYASAPVGKALSDACMGTIASFLSKYQDIIIEHQKVVKGNQKRLESLRELAGKENLEYPSVTLPPQPHTKEGVDAYNEVIARVRMWVNLNLWQKLKLSRDDAKPLLRLKGFPSFPLVERQANEVDWWDMVCNVKKLINEKKEDGKVFWQNLAGYKRQEALRPYLSSEEDRKKGKKFARYQLGDLLLHLEKKHGEYDWGKVYDEAWERIDKKVEGLSKHIKLEEERRSEDAQSKAALTDWLRAKASFVIEGLKEADKDEFCRCELKLQKWYGDLRGKPFAIEAENSILDISGFSKQYNCAFIWQKDGVKKLNLYLIINYFKGGKLRFKKIKPEAFEANRFYTVINKKSGEIVPMEVNFNFDDPNLIILPLAFGKRQGREFIWNDLLSLETGSLKLANGRVIEKTLYNRRTRQDEPALFVALTFERREVLDSSNIKPMNLIGVDRGENIPAVIALTDPEGCPLSRFKDSLGNPTHILRIGESYKEKQRTIQAKKEVEQRRAGGYSRKYASKAKNLADDMVRNTARDLLYYAVTQDAMLIFENLSRGFGRQGKRTFMAERQYTRMEDWLTAKLAYEGLPSKTYLSKTLAQYTSKTCSNCGFTITSADYDRVLEKLKKTATGWMTTINGKELKVEGQITYYNRYKRQNVVKDLSVELDRLSEESVNNDISSWTKGRSGEALSLLKKRFSHRPVQEKFVCLNCGFETHADEQAALNIARSWLFLRSQEYKKYQTNKTTGNTDKRAFVETWQSFYRKKLKEVWKPAV

SEQ ID NO: 41519 - protein, 980 aa, synthetic construct
  REGION 1..980: note = engineered CasX variant
QEIKGRINKIRRRLVKDSNTKKAGKTGPMKTLLVRVMTPDLRERLENLRKKPENIPQPISNTSRANLNKLLTDYTEMKKAILHVYWEEFQKDPVGLMSRVAQPASKKIDQNKLKPEMDEKGNLTTAGFACSQCGQPLFVYKLEQVSEKGKAYTNYFGRCNVAEHEKLILLAQLKPEKDSDEAVTYSLGKFGQRALDFYSIHVTKESTHPVKPLAQIAGNRYASVPVGKALSDACMGTIASFLSKYQDIIIEHQKVVKGNQKRLESLRELAGKENLEYPSVTLPPQPHTKEGVDAYNEVIARVRMWVNLNLWQKLKLSRDDAKPLLRLKGFPSFPLVERQANEVDWWDMVCNVKKLINEKKEDGKVFWQNLAGYKRQEALRPYLSSEEDRKKGKKFARYQLGDLLLHLEKKHGEYDWGKVYDEAWERIDKKVEGLSKHIKLEEERRSEDAQSKAALTDWLRAKASFVIEGLKEADKDEFCRCELKLQKWYGDLRGKPFAIEAENSILDISGFSKQYNCAFIWQKDGVKKLNLYLIINYFKGGKLRFKKIKPEAFEANRFYTVINKKSGEIVPMEVNFNFDDPNLIILPLAFGKRQGREFIWNDLLSLETGSLKLANGRVIEKTLYNRRTRQDEPALFVALTFERREVLDSSNIKPMNLIGVDRGENIPAVIALTDPEGCPLSRFKDSLGNPTHILRIGESYKEKQRTIQAKKEVEQRRAGGYSRKYASKAKNLADDMVRNTARDLLYYAVTQDAMLIFENLSRGFGRQGKRTFMAERQYTRMEDWLTAKLAYEGLPSKTYLSKTLAQYTSKTCSNCGFTITSADYDRVLEKLKKTATGWMTTINGKELKVEGQITYYNRYKRQNVVKDLSVELDRLSEESVNNDISSWTKGRSGEALSLLKKRFSHRPVQEKFVCLNCGFETHADEQAALNIARSWLFLRSQEYKKYQTNKTTGNTDKRAFVETWQSFYRKKLKEVWKPAV

SEQ ID NO: 41520 - protein, 980 aa, synthetic construct
  REGION 1..980: note = engineered CasX variant
QEIKGRINKIRRRLVKDSNTKKAGKTGPMKTLLVRVMTPDLRERLENLRKKPENIPQPISNTSRANLNKLLTDYTEMKKAILHVYWEEFQKDPVGLMSRVAQPASKKIDQNKLKPEMDEKGNLTTAGFACSQCGQPLFVYKLEQVSEKGKAYTNYFGRCNVAEHEKLIKLAQLKPEKDSDEAVTYSLGKFGQRALDFYSIHVTKESTHPVKPLAQIAGNRYASGPVGKALSDACMGTIASFLSKYQDIIIEHQKVVKGNQKRLESLRELAGKENLEYPSVTLPPQPHTKEGVDAYNEVIARVRMWVNLNLWQKLKLSRDDAKPLLRLKGFPSFPLVERQANEVDWWDMVCNVKKLINEKKEDGKVFWQNLAGYKRQEALRPYLSSEEDRKKGKKFARYQLGDLLLHLEKKHGEYDWGKVYDEAWERIDKKVEGLSKHIKLEEERRSEDAQSKAALTDWLRAKASFVIEGLKEADKDEFCRCELKLQKWYGDLRGKPFAIEAENSILDISGFSKQYNCAFIWQKDGVKKLNLYLIINYFKGGKLRFKKIKPEAFEANRFYTVINKKSGEIVPMEVNFNFDDPNLIILPLAFGKRQGREFIWNDLLSLETGSLKLANGRVIEKTLYNRRTRQDEPALFVALTFERREVLDSSNIKPMNLIGVDRGENIPAVIALTDPEGCPLSRFKDSLGNPTHILRIGESYKEKQRTIQAKKEVEQRRAGGYSRKYASKAKNLADDMVRNTARDLLYYAVTQDAMLIFENLSRGFGRQGKRTFMAERQYTRMEDWLTAKLAYEGLPSKTYLSKTLAQYTSKTCSNCGFTITSADYDRVLEKLKKTATGWMTTINGKELKVEGQITYYNRYKRQNVVKDLSVELDRLSEESVNNDISSWTKGRSGEALSLLKKRFSHRPVQEKFVCLNCGFETHADEQAALNIARSWLFLRSQEYKKYQTNKTTGNTDKRAFVETWQSFYRKKLKEVWKPAV

SEQ ID NO: 41521 - protein, 979 aa, synthetic construct
  REGION 1..979: note = engineered CasX variant
QEIKGRINKIRRRLVKDSNTKKAGKTGPMKTLLVRVMTPDLRERLENLRKKPENIPQPISNTSRANLNKLLTDYTEMKKAILHVYWEEFQKDPVGLMSRVAQPASKKIDQNKLKPEMDEKGNLTTAGFACSQCGQPLFVYKLEQVSEKGKAYTNYFGRCNVAEHEKLILLAQLKPEKDSDEAVTYSLGKFGQRALDFYSIHVTKESTHPVKPLAQIAGNRYASPVGKALSDACMGTIASFLSKYQDIIIEHQKVVKGNQKRLESLRELAGKENLEYPSVTLPPQPHTKEGVDAYNEVIARVRMWVNLNLWQKLKLSRDDAKPLLRLKGFPSFPLVERQANEVDWWDMVCNVKKLINEKKEDGKVFWQNLAGYKRQEALRPYLSSEEDRKKGKKFARYQLGDLLLHLEKKHGEYDWGKVYDEAWERIDKKVEGLSKHIKLEEERRSEDAQSKAALTDWLRAKASFVIEGLKEADKDEFCRCELKLQKWYGDLRGKPFAIEAENSILDISGFSKQYNCAFIWQKDGVKKLNLYLIINYFKGGKLRFKKIKPEAFEANRFYTVINKKSGEIVPMEVNFNFDDPNLIILPLAFGKRQGREFIWNDLLSLETGSLKLANGRVIEKTLYNRRTRQDEPALFVALTFERREVLDSSNIKPMNLIGVDRGENIPAVIALTDPEGCPLSRFKDSLGNPTHILRIGESYKEKQRTIQAKKEVEQRRAGGYSRKYASKAKNLADDMVRNTARDLLYYAVTQDAMLIFENLSRGFGRQGKRTFMAERQYTRMEDWLTAKLAYEGLPSKTYLSKTLAQYTSKTCSNCGFTITSADYDRVLEKLKKTATGWMTTINGKELKVEGQITYYNRYKRQNVVKDLSVELDRLSEESVNNDISSWTKGRSGEALSLLKKRFSHRPVQEKFVCLNCGFETHADEQAALNIARSWLFLRSQEYKKYQTNKTTGNTDKRAFVETWQSFYRKKLKEVWKPAV

SEQ ID NO: 41522 - protein, 979 aa, synthetic construct
  REGION 1..979: note = engineered CasX variant
QEIKGRINKIRRRLVKDSNTKKAGKTGPMKTLLVRVMTPDLRERLENLRKKPENIPQPISNTSRANLNKLLTDYTEMKKAILHVYWEEFQKDPVGLMSRVAQPASKKIDQNKLKPEMDEKGNLTTAGFACSQCGQPLFVYKLEQVSEKGKAYTNYFGRCNVAEHEKLILLAQLKPEKDSDEAVTYSLGKFGQRALDFYSIHVTKESTHPVKPLAQIAGNRYASYPVGKALSDACMGTIASFLSKYQDIIIEHQKVVKGNQKRLESLRELAGKENLEYPSVTLPPQPHTKEGVDAYNEVIARVRMWVNLNLWQKLKLSRDDAKPLLRLKGFPSFPLVERQANEVDWWDMVCNVKKLINEKKEDGKVFWQNLAGYKRQEALRPYLSSEEDRKKGKKFARYQLGDLLLHLEKKHGEDWGDVYDEAWERIDKKVEGLSKHIKLEEERRSEDAQSKAALTDWLRAKASFVIEGLKEADKDEFCRCELKLQKWYGDLRGKPFAIEAENSILDISGFSKQYNCAFIWQKDGVKKLNLYLIINYFKGGKLRFKKIKPEAFEANRFYTVINKKSGEIVPMEVNFNFDDPNLIILPLAFGKRQGREFIWNDLLSLETGSLKLANGRVIEKTLYNRRTRQDEPALFVALTFERREVLDSSNIKPMNLIGVDRGENIPAVIALTDPEGCPLSRFKDSLGNPTHILRIGESYKEKQRTIQAKKEVEQRRAGGYSRKYASKAKNLADDMVRNTARDLLYYAVTQDAMLIFENLSRGFGRQGKRTFMAERQYTRMEDWLTAKLAYEGLPSKTYLSKTLAQYTSKTCSNCGFTITSADYDRVLEKLKKTATGWMTTINGKELKVEGQITYYNRYKRQNVVKDLSVELDRLSEESVNNDISSWTKGRSGEALSLLKKRFSHRPVQEKFVCLNCGFETHADEQAALNIARSWLFLRSQEYKKYQTNKTTGNTDKRAFVETWQSFYRKKLKEVWKPAV

SEQ ID NO: 41523 - protein, 979 aa, synthetic construct
  REGION 1..979: note = engineered CasX variant
QEIKGRINKIRRRLVKDSNTKKAGKTGPMKTLLVRVMTPDLRERLENLRKKPENIPQPISNTSRANLNKLLTDYTEMKKAILHVYWEEFQKDPVGLMSRVAQPASKKIDQNKLKPEMDEKGNLTTAGFACSQCGQPLFVYKLEQVSEKGKAYTNYFGRCNVAEHEKLILLAQLKPEKDSDEAVTYSLGKFGQRALDFYSIHVTKESTHPVKPLAQIAGNRYASHPVGKALSDACMGTIASFLSKYQDIIIEHQKVVKGNQKRLESLRELAGKENLEYPSVTLPPQPHTKEGVDAYNEVIARVRMWVNLNLWQKLKLSRDDAKPLLRLKGFPSFPLVERQANEVDWWDMVCNVKKLINEKKEDGKVFWQNLAGYKRQEALRPYLSSEEDRKKGKKFARYQLGDLLLHLEKKHGEDWGDVYDEAWERIDKKVEGLSKHIKLEEERRSEDAQSKAALTDWLRAKASFVIEGLKEADKDEFCRCELKLQKWYGDLRGKPFAIEAENSILDISGFSKQYNCAFIWQKDGVKKLNLYLIINYFKGGKLRFKKIKPEAFEANRFYTVINKKSGEIVPMEVNFNFDDPNLIILPLAFGKRQGREFIWNDLLSLETGSLKLANGRVIEKTLYNRRTRQDEPALFVALTFERREVLDSSNIKPMNLIGVDRGENIPAVIALTDPEGCPLSRFKDSLGNPTHILRIGESYKEKQRTIQAKKEVEQRRAGGYSRKYASKAKNLADDMVRNTARDLLYYAVTQDAMLIFENLSRGFGRQGKRTFMAERQYTRMEDWLTAKLAYEGLPSKTYLSKTLAQYTSKTCSNCGFTITSADYDRVLEKLKKTATGWMTTINGKELKVEGQITYYNRYKRQNVVKDLSVELDRLSEESVNNDISSWTKGRSGEALSLLKKRFSHRPVQEKFVCLNCGFETHADEQAALNIARSWLFLRSQEYKKYQTNKTTGNTDKRAFVETWQSFYRKKLKEVWKPAV

SEQ ID NO: 41524 - protein, 979 aa, synthetic construct
  REGION 1..979: note = engineered CasX variant
QEIKGRINKIRRRLVKDSNTKKAGKTGPMKTLLVRVMTPDLRERLENLRKKPENIPQPISNTSRANLNKLLTDYTEMKKAILHVYWEEFQKDPVGLMSRVAQPASKKIDQNKLKPEMDEKGNLTTAGFACSQCGQPLFVYKLEQVSEKGKAYTNYFGRCNVAEHEKLILLAQLKPEKDSDEAVTYSLGKFGQRALDFYSIHVTKESTHPVKPLAQIAGNRYASSPVGKALSDACMGTIASFLSKYQDIIIEHQKVVKGNQKRLESLRELAGKENLEYPSVTLPPQPHTKEGVDAYNEVIARVRMWVNLNLWQKLKLSRDDAKPLLRLKGFPSFPLVERQANEVDWWDMVCNVKKLINEKKEDGKVFWQNLAGYKRQEALRPYLSSEEDRKKGKKFARYQLGDLLLHLEKKHGEDWGDVYDEAWERIDKKVEGLSKHIKLEEERRSEDAQSKAALTDWLRAKASFVIEGLKEADKDEFCRCELKLQKWYGDLRGKPFAIEAENSILDISGFSKQYNCAFIWQKDGVKKLNLYLIINYFKGGKLRFKKIKPEAFEANRFYTVINKKSGEIVPMEVNFNFDDPNLIILPLAFGKRQGREFIWNDLLSLETGSLKLANGRVIEKTLYNRRTRQDEPALFVALTFERREVLDSSNIKPMNLIGVDRGENIPAVIALTDPEGCPLSRFKDSLGNPTHILRIGESYKEKQRTIQAKKEVEQRRAGGYSRKYASKAKNLADDMVRNTARDLLYYAVTQDAMLIFENLSRGFGRQGKRTFMAERQYTRMEDWLTAKLAYEGLPSKTYLSKTLAQYTSKTCSNCGFTITSADYDRVLEKLKKTATGWMTTINGKELKVEGQITYYNRYKRQNVVKDLSVELDRLSEESVNNDISSWTKGRSGEALSLLKKRFSHRPVQEKFVCLNCGFETHADEQAALNIARSWLFLRSQEYKKYQTNKTTGNTDKRAFVETWQSFYRKKLKEVWKPAV

SEQ ID NO: 41525 - protein, 979 aa, synthetic construct
  REGION 1..979: note = engineered CasX variant
QEIKGRINKIRRRLVKDSNTKKAGKTGPMKTLLVRVMTPDLRERLENLRKKPENIPQPISNTSRANLNKLLTDYTEMKKAILHVYWEEFQKDPVGLMSRVAQPASKKIDQNKLKPEMDEKGNLTTAGFACSQCGQPLFVYKLEQVSEKGKAYTNYFGRCNVAEHEKLILLAQLKPEKDSDEAVTYSLGKFGQRALDFYSIHVTKESTHPVKPLAQIAGNRYASTPVGKALSDACMGTIASFLSKYQDIIIEHQKVVKGNQKRLESLRELAGKENLEYPSVTLPPQPHTKEGVDAYNEVIARVRMWVNLNLWQKLKLSRDDAKPLLRLKGFPSFPLVERQANEVDWWDMVCNVKKLINEKKEDGKVFWQNLAGYKRQEALRPYLSSEEDRKKGKKFARYQLGDLLLHLEKKHGEDWGDVYDEAWERIDKKVEGLSKHIKLEEERRSEDAQSKAALTDWLRAKASFVIEGLKEADKDEFCRCELKLQKWYGDLRGKPFAIEAENSILDISGFSKQYNCAFIWQKDGVKKLNLYLIINYFKGGKLRFKKIKPEAFEANRFYTVINKKSGEIVPMEVNFNFDDPNLIILPLAFGKRQGREFIWNDLLSLETGSLKLANGRVIEKTLYNRRTRQDEPALFVALTFERREVLDSSNIKPMNLIGVDRGENIPAVIALTDPEGCPLSRFKDSLGNPTHILRIGESYKEKQRTIQAKKEVEQRRAGGYSRKYASKAKNLADDMVRNTARDLLYYAVTQDAMLIFENLSRGFGRQGKRTFMAERQYTRMEDWLTAKLAYEGLPSKTYLSKTLAQYTSKTCSNCGFTITSADYDRVLEKLKKTATGWMTTINGKELKVEGQITYYNRYKRQNVVKDLSVELDRLSEESVNNDISSWTKGRSGEALSLLKKRFSHRPVQEKFVCLNCGFETHADEQAALNIARSWLFLRSQEYKKYQTNKTTGNTDKRAFVETWQSFYRKKLKEVWKPAV

SEQ ID NO: 41526 - protein, 979 aa, synthetic construct
  REGION 1..979: note = engineered CasX variant
QEIKGRINKIRRRLVKDSNTKKAGKTGPMKTLLVRVMTPDLRERLENLRKKPENIPQPISNTSRANLNKLLTDYTEMKKAILHVYWEEFQKDPVGLMSRVAQPASKKIDQNKLKPEMDEKGNLTTAGFACSQCGQPLFVYKLEQVSEKGKAYTNYFGRCNVAEHEKLILLAQLKPEKDSDEAVTYSLGKFGQRALDFYSIHVTKESTHPVKPLAQIAGNRYASAPVGKALSDACMGTIASFLSKYQDIIIEHQKVVKGNQKRLESLRELAGKENLEYPSVTLPPQPHTKEGVDAYNEVIARVRMWVNLNLWQKLKLSRDDAKPLLRLKGFPSFPLVERQANEVDWWDMVCNVKKLINEKKEDGKVFWQNLAGYKRQEALRPYLSSEEDRKKGKKFARYQLGDLLLHLEKKHGEDWGDVYDEAWERIDKKVEGLSKHIKLEEERRSEDAQSKAALTDWLRAKASFVIEGLKEADKDEFCRCELKLQKWYGDLRGKPFAIEAENSILDISGFSKQYNCAFIWQKDGVKKLNLYLIINYFKGGKLRFKKIKPEAFEANRFYTVINKKSGEIVPMEVNFNFDDPNLIILPLAFGKRQGREFIWNDLLSLETGSLKLANGRVIEKTLYNRRTRQDEPALFVALTFERREVLDSSNIKPMNLIGVDRGENIPAVIALTDPEGCPLSRFKDSLGNPTHILRIGESYKEKQRTIQAKKEVEQRRAGGYSRKYASKAKNLADDMVRNTARDLLYYAVTQDAMLIFENLSRGFGRQGKRTFMAERQYTRMEDWLTAKLAYEGLPSKTYLSKTLAQYTSKTCSNCGFTITSADYDRVLEKLKKTATGWMTTINGKELKVEGQITYYNRYKRQNVVKDLSVELDRLSEESVNNDISSWTKGRSGEALSLLKKRFSHRPVQEKFVCLNCGFETHADEQAALNIARSWLFLRSQEYKKYQTNKTTGNTDKRAFVETWQSFYRKKLKEVWKPAV

SEQ ID NO: 41527 - protein, 979 aa, synthetic construct
  REGION 1..979: note = engineered CasX variant
QEIKGRINKIRRRLVKDSNTKKAGKTGPMKTLLVRVMTPDLRERLENLRKKPENIPQPISNTSRANLNKLLTDYTEMKKAILHVYWEEFQKDPVGLMSRVAQPASKKIDQNKLKPEMDEKGNLTTAGFACSQCGQPLFVYKLEQVSEKGKAYTNYFGRCNVAEHEKLILLAQLKPEKDSDEAVTYSLGKFGQRALDFYSIHVTKESTHPVKPLAQIAGNRYASVPVGKALSDACMGTIASFLSKYQDIIIEHQKVVKGNQKRLESLRELAGKENLEYPSVTLPPQPHTKEGVDAYNEVIARVRMWVNLNLWQKLKLSRDDAKPLLRLKGFPSFPLVERQANEVDWWDMVCNVKKLINEKKEDGKVFWQNLAGYKRQEALRPYLSSEEDRKKGKKFARYQLGDLLLHLEKKHGEDWGDVYDEAWERIDKKVEGLSKHIKLEEERRSEDAQSKAALTDWLRAKASFVIEGLKEADKDEFCRCELKLQKWYGDLRGKPFAIEAENSILDISGFSKQYNCAFIWQKDGVKKLNLYLIINYFKGGKLRFKKIKPEAFEANRFYTVINKKSGEIVPMEVNFNFDDPNLIILPLAFGKRQGREFIWNDLLSLETGSLKLANGRVIEKTLYNRRTRQDEPALFVALTFERREVLDSSNIKPMNLIGVDRGENIPAVIALTDPEGCPLSRFKDSLGNPTHILRIGESYKEKQRTIQAKKEVEQRRAGGYSRKYASKAKNLADDMVRNTARDLLYYAVTQDAMLIFENLSRGFGRQGKRTFMAERQYTRMEDWLTAKLAYEGLPSKTYLSKTLAQYTSKTCSNCGFTITSADYDRVLEKLKKTATGWMTTINGKELKVEGQITYYNRYKRQNVVKDLSVELDRLSEESVNNDISSWTKGRSGEALSLLKKRFSHRPVQEKFVCLNCGFETHADEQAALNIARSWLFLRSQEYKKYQTNKTTGNTDKRAFVETWQSFYRKKLKEVWKPAV

SEQ ID NO: 41528 - protein, 979 aa, synthetic construct
  REGION 1..979: note = engineered CasX variant
QEIKGRINKIRRRLVKDSNTKKAGKTGPMKTLLVRVMTPDLRERLENLRKKPENIPQPISNTSRANLNKLLTDYTEMKKAILHVYWEEFQKDPVGLMSRVAQPASKKIDQNKLKPEMDEKGNLTTAGFACSQCGQPLFVYKLEQVSEKGKAYTNYFGRCNVAEHEKLIKLAQLKPEKDSDEAVTYSLGKFGQRALDFYSIHVTKESTHPVKPLAQIAGNRYASGPVGKALSDACMGTIASFLSKYQDIIIEHQKVVKGNQKRLESLRELAGKENLEYPSVTLPPQPHTKEGVDAYNEVIARVRMWVNLNLWQKLKLSRDDAKPLLRLKGFPSFPLVERQANEVDWWDMVCNVKKLINEKKEDGKVFWQNLAGYKRQEALRPYLSSEEDRKKGKKFARYQLGDLLLHLEKKHGEDWGDVYDEAWERIDKKVEGLSKHIKLEEERRSEDAQSKAALTDWLRAKASFVIEGLKEADKDEFCRCELKLQKWYGDLRGKPFAIEAENSILDISGFSKQYNCAFIWQKDGVKKLNLYLIINYFKGGKLRFKKIKPEAFEANRFYTVINKKSGEIVPMEVNFNFDDPNLIILPLAFGKRQGREFIWNDLLSLETGSLKLANGRVIEKTLYNRRTRQDEPALFVALTFERREVLDSSNIKPMNLIGVDRGENIPAVIALTDPEGCPLSRFKDSLGNPTHILRIGESYKEKQRTIQAKKEVEQRRAGGYSRKYASKAKNLADDMVRNTARDLLYYAVTQDAMLIFENLSRGFGRQGKRTFMAERQYTRMEDWLTAKLAYEGLPSKTYLSKTLAQYTSKTCSNCGFTITSADYDRVLEKLKKTATGWMTTINGKELKVEGQITYYNRYKRQNVVKDLSVELDRLSEESVNNDISSWTKGRSGEALSLLKKRFSHRPVQEKFVCLNCGFETHADEQAALNIARSWLFLRSQEYKKYQTNKTTGNTDKRAFVETWQSFYRKKLKEVWKPAV

SEQ ID NO: 41529 - protein, 978 aa, synthetic construct
  REGION 1..978: note = engineered CasX variant
QEIKGRINKIRRRLVKDSNTKKAGKTGPMKTLLVRVMTPDLRERLENLRKKPENIPQPISNTSRANLNKLLTDYTEMKKAILHVYWEEFQKDPVGLMSRVAQPASKKIDQNKLKPEMDEKGNLTTAGFACSQCGQPLFVYKLEQVSEKGKAYTNYFGRCNVAEHEKLILLAQLKPEKDSDEAVTYSLGKFGQRALDFYSIHVTKESTHPVKPLAQIAGNRYASPVGKALSDACMGTIASFLSKYQDIIIEHQKVVKGNQKRLESLRELAGKENLEYPSVTLPPQPHTKEGVDAYNEVIARVRMWVNLNLWQKLKLSRDDAKPLLRLKGFPSFPLVERQANEVDWWDMVCNVKKLINEKKEDGKVFWQNLAGYKRQEALRPYLSSEEDRKKGKKFARYQLGDLLLHLEKKHGEDWGDVYDEAWERIDKKVEGLSKHIKLEEERRSEDAQSKAALTDWLRAKASFVIEGLKEADKDEFCRCELKLQKWYGDLRGKPFAIEAENSILDISGFSKQYNCAFIWQKDGVKKLNLYLIINYFKGGKLRFKKIKPEAFEANRFYTVINKKSGEIVPMEVNFNFDDPNLIILPLAFGKRQGREFIWNDLLSLETGSLKLANGRVIEKTLYNRRTRQDEPALFVALTFERREVLDSSNIKPMNLIGVDRGENIPAVIALTDPEGCPLSRFKDSLGNPTHILRIGESYKEKQRTIQAKKEVEQRRAGGYSRKYASKAKNLADDMVRNTARDLLYYAVTQDAMLIFENLSRGFGRQGKRTFMAERQYTRMEDWLTAKLAYEGLPSKTYLSKTLAQYTSKTCSNCGFTITSADYDRVLEKLKKTATGWMTTINGKELKVEGQITYYNRYKRQNVVKDLSVELDRLSEESVNNDISSWTKGRSGEALSLLKKRFSHRPVQEKFVCLNCGFETHADEQAALNIARSWLFLRSQEYKKYQTNKTTGNTDKRAFVETWQSFYRKKLKEVWKPAV

SEQ ID NO: 41530 - protein, 979 aa, synthetic construct
  REGION 1..979: note = engineered CasX variant
QEIKGRINKIRRRLVKDSNTKKAGKTGPMKTLLVRVMTPDLRERLENLRKKPENIPQPISNTSRANLNKLLTDYTEMKKAILHVYWEEFQKDPVGLMSRVAQPASKKIDQNKLKPEMDEKGNLTTAGFACSQCGQPLFVYKLEQVSEKGKAYTNYFGRCNVAEHEKLILLAQLKPEKDSDEAVTYSLGKFGQRALDFYSIHVTKESTHPVKPLAQIAGNRYASYPVGKALSDACMGTIASFLSKYQDIIIEHQKVVKGNQKRLESLRELAGKENLEYPSVTLPPQPHTKEGVDAYNEVIARVRMWVNLNLWQKLKLSRDDAKPLLRLKGFPSFPLVERQANEVDWWDMVCNVKKLINEKKEDGKVFWQNLAGYKRQEALRPYLSSEEDRKKGKKFARYQLGDLLLHLEKKHGEDWGKVYGEAWERIDKKVEGLSKHIKLEEERRSEDAQSKAALTDWLRAKASFVIEGLKEADKDEFCRCELKLQKWYGDLRGKPFAIEAENSILDISGFSKQYNCAFIWQKDGVKKLNLYLIINYFKGGKLRFKKIKPEAFEANRFYTVINKKSGEIVPMEVNFNFDDPNLIILPLAFGKRQGREFIWNDLLSLETGSLKLANGRVIEKTLYNRRTRQDEPALFVALTFERREVLDSSNIKPMNLIGVDRGENIPAVIALTDPEGCPLSRFKDSLGNPTHILRIGESYKEKQRTIQAKKEVEQRRAGGYSRKYASKAKNLADDMVRNTARDLLYYAVTQDAMLIFENLSRGFGRQGKRTFMAERQYTRMEDWLTAKLAYEGLPSKTYLSKTLAQYTSKTCSNCGFTITSADYDRVLEKLKKTATGWMTTINGKELKVEGQITYYNRYKRQNVVKDLSVELDRLSEESVNNDISSWTKGRSGEALSLLKKRFSHRPVQEKFVCLNCGFETHADEQAALNIARSWLFLRSQEYKKYQTNKTTGNTDKRAFVETWQSFYRKKLKEVWKPAV

SEQ ID NO: 41531 - protein, 979 aa, synthetic construct
  REGION 1..979: note = engineered CasX variant
QEIKGRINKIRRRLVKDSNTKKAGKTGPMKTLLVRVMTPDLRERLENLRKKPENIPQPISNTSRANLNKLLTDYTEMKKAILHVYWEEFQKDPVGLMSRVAQPASKKIDQNKLKPEMDEKGNLTTAGFACSQCGQPLFVYKLEQVSEKGKAYTNYFGRCNVAEHEKLILLAQLKPEKDSDEAVTYSLGKFGQRALDFYSIHVTKESTHPVKPLAQIAGNRYASHPVGKALSDACMGTIASFLSKYQDIIIEHQKVVKGNQKRLESLRELAGKENLEYPSVTLPPQPHTKEGVDAYNEVIARVRMWVNLNLWQKLKLSRDDAKPLLRLKGFPSFPLVERQANEVDWWDMVCNVKKLINEKKEDGKVFWQNLAGYKRQEALRPYLSSEEDRKKGKKFARYQLGDLLLHLEKKHGEDWGKVYGEAWERIDKKVEGLSKHIKLEEERRSEDAQSKAALTDWLRAKASFVIEGLKEADKDEFCRCELKLQKWYGDLRGKPFAIEAENSILDISGFSKQYNCAFIWQKDGVKKLNLYLIINYFKGGKLRFKKIKPEAFEANRFYTVINKKSGEIVPMEVNFNFDDPNLIILPLAFGKRQGREFIWNDLLSLETGSLKLANGRVIEKTLYNRRTRQDEPALFVALTFERREVLDSSNIKPMNLIGVDRGENIPAVIALTDPEGCPLSRFKDSLGNPTHILRIGESYKEKQRTIQAKKEVEQRRAGGYSRKYASKAKNLADDMVRNTARDLLYYAVTQDAMLIFENLSRGFGRQGKRTFMAERQYTRMEDWLTAKLAYEGLPSKTYLSKTLAQYTSKTCSNCGFTITSADYDRVLEKLKKTATGWMTTINGKELKVEGQITYYNRYKRQNVVKDLSVELDRLSEESVNNDISSWTKGRSGEALSLLKKRFSHRPVQEKFVCLNCGFETHADEQAALNIARSWLFLRSQEYKKYQTNKTTGNTDKRAFVETWQSFYRKKLKEVWKPAV

SEQ ID NO: 41532 - protein, 979 aa, synthetic construct
  REGION 1..979: note = engineered CasX variant
QEIKGRINKIRRRLVKDSNTKKAGKTGPMKTLLVRVMTPDLRERLENLRKKPENIPQPISNTSRANLNKLLTDYTEMKKAILHVYWEEFQKDPVGLMSRVAQPASKKIDQNKLKPEMDEKGNLTTAGFACSQCGQPLFVYKLEQVSEKGKAYTNYFGRCNVAEHEKLILLAQLKPEKDSDEAVTYSLGKFGQRALDFYSIHVTKESTHPVKPLAQIAGNRYASSPVGKALSDACMGTIASFLSKYQDIIIEHQKVVKGNQKRLESLRELAGKENLEYPSVTLPPQPHTKEGVDAYNEVIARVRMWVNLNLWQKLKLSRDDAKPLLRLKGFPSFPLVERQANEVDWWDMVCNVKKLINEKKEDGKVFWQNLAGYKRQEALRPYLSSEEDRKKGKKFARYQLGDLLLHLEKKHGEDWGKVYGEAWERIDKKVEGLSKHIKLEEERRSEDAQSKAALTDWLRAKASFVIEGLKEADKDEFCRCELKLQKWYGDLRGKPFAIEAENSILDISGFSKQYNCAFIWQKDGVKKLNLYLIINYFKGGKLRFKKIKPEAFEANRFYTVINKKSGEIVPMEVNFNFDDPNLIILPLAFGKRQGREFIWNDLLSLETGSLKLANGRVIEKTLYNRRTRQDEPALFVALTFERREVLDSSNIKPMNLIGVDRGENIPAVIALTDPEGCPLSRFKDSLGNPTHILRIGESYKEKQRTIQAKKEVEQRRAGGYSRKYASKAKNLADDMVRNTARDLLYYAVTQDAMLIFENLSRGFGRQGKRTFMAERQYTRMEDWLTAKLAYEGLPSKTYLSKTLAQYTSKTCSNCGFTITSADYDRVLEKLKKTATGWMTTINGKELKVEGQITYYNRYKRQNVVKDLSVELDRLSEESVNNDISSWTKGRSGEALSLLKKRFSHRPVQEKFVCLNCGFETHADEQAALNIARSWLFLRSQEYKKYQTNKTTGNTDKRAFVETWQSFYRKKLKEVWKPAV

SEQ ID NO: 41533 - protein, 979 aa, synthetic construct
  REGION 1..979: note = engineered CasX variant
QEIKGRINKIRRRLVKDSNTKKAGKTGPMKTLLVRVMTPDLRERLENLRKKPENIPQPISNTSRANLNKLLTDYTEMKKAILHVYWEEFQKDPVGLMSRVAQPASKKIDQNKLKPEMDEKGNLTTAGFACSQCGQPLFVYKLEQVSEKGKAYTNYFGRCNVAEHEKLILLAQLKPEKDSDEAVTYSLGKFGQRALDFYSIHVTKESTHPVKPLAQIAGNRYASTPVGKALSDACMGTIASFLSKYQDIIIEHQKVVKGNQKRLESLRELAGKENLEYPSVTLPPQPHTKEGVDAYNEVIARVRMWVNLNLWQKLKLSRDDAKPLLRLKGFPSFPLVERQANEVDWWDMVCNVKKLINEKKEDGKVFWQNLAGYKRQEALRPYLSSEEDRKKGKKFARYQLGDLLLHLEKKHGEDWGKVYGEAWERIDKKVEGLSKHIKLEEERRSEDAQSKAALTDWLRAKASFVIEGLKEADKDEFCRCELKLQKWYGDLRGKPFAIEAENSILDISGFSKQYNCAFIWQKDGVKKLNLYLIINYFKGGKLRFKKIKPEAFEANRFYTVINKKSGEIVPMEVNFNFDDPNLIILPLAFGKRQGREFIWNDLLSLETGSLKLANGRVIEKTLYNRRTRQDEPALFVALTFERREVLDSSNIKPMNLIGVDRGENIPAVIALTDPEGCPLSRFKDSLGNPTHILRIGESYKEKQRTIQAKKEVEQRRAGGYSRKYASKAKNLADDMVRNTARDLLYYAVTQDAMLIFENLSRGFGRQGKRTFMAERQYTRMEDWLTAKLAYEGLPSKTYLSKTLAQYTSKTCSNCGFTITSADYDRVLEKLKKTATGWMTTINGKELKVEGQITYYNRYKRQNVVKDLSVELDRLSEESVNNDISSWTKGRSGEALSLLKKRFSHRPVQEKFVCLNCGFETHADEQAALNIARSWLFLRSQEYKKYQTNKTTGNTDKRAFVETWQSFYRKKLKEVWKPAV

SEQ ID NO: 41534 - protein, 979 aa, synthetic construct
  REGION 1..979: note = engineered CasX variant
QEIKGRINKIRRRLVKDSNTKKAGKTGPMKTLLVRVMTPDLRERLENLRKKPENIPQPISNTSRANLNKLLTDYTEMKKAILHVYWEEFQKDPVGLMSRVAQPASKKIDQNKLKPEMDEKGNLTTAGFACSQCGQPLFVYKLEQVSEKGKAYTNYFGRCNVAEHEKLILLAQLKPEKDSDEAVTYSLGKFGQRALDFYSIHVTKESTHPVKPLAQIAGNRYASAPVGKALSDACMGTIASFLSKYQDIIIEHQKVVKGNQKRLESLRELAGKENLEYPSVTLPPQPHTKEGVDAYNEVIARVRMWVNLNLWQKLKLSRDDAKPLLRLKGFPSFPLVERQANEVDWWDMVCNVKKLINEKKEDGKVFWQNLAGYKRQEALRPYLSSEEDRKKGKKFARYQLGDLLLHLEKKHGEDWGKVYGEAWERIDKKVEGLSKHIKLEEERRSEDAQSKAALTDWLRAKASFVIEGLKEADKDEFCRCELKLQKWYGDLRGKPFAIEAENSILDISGFSKQYNCAFIWQKDGVKKLNLYLIINYFKGGKLRFKKIKPEAFEANRFYTVINKKSGEIVPMEVNFNFDDPNLIILPLAFGKRQGREFIWNDLLSLETGSLKLANGRVIEKTLYNRRTRQDEPALFVALTFERREVLDSSNIKPMNLIGVDRGENIPAVIALTDPEGCPLSRFKDSLGNPTHILRIGESYKEKQRTIQAKKEVEQRRAGGYSRKYASKAKNLADDMVRNTARDLLYYAVTQDAMLIFENLSRGFGRQGKRTFMAERQYTRMEDWLTAKLAYEGLPSKTYLSKTLAQYTSKTCSNCGFTITSADYDRVLEKLKKTATGWMTTINGKELKVEGQITYYNRYKRQNVVKDLSVELDRLSEESVNNDISSWTKGRSGEALSLLKKRFSHRPVQEKFVCLNCGFETHADEQAALNIARSWLFLRSQEYKKYQTNKTTGNTDKRAFVETWQSFYRKKLKEVWKPAV

SEQ ID NO: 41535 - protein, 979 aa, synthetic construct
  REGION 1..979: note = engineered CasX variant
QEIKGRINKIRRRLVKDSNTKKAGKTGPMKTLLVRVMTPDLRERLENLRKKPENIPQPISNTSRANLNKLLTDYTEMKKAILHVYWEEFQKDPVGLMSRVAQPASKKIDQNKLKPEMDEKGNLTTAGFACSQCGQPLFVYKLEQVSEKGKAYTNYFGRCNVAEHEKLILLAQLKPEKDSDEAVTYSLGKFGQRALDFYSIHVTKESTHPVKPLAQIAGNRYASVPVGKALSDACMGTIASFLSKYQDIIIEHQKVVKGNQKRLESLRELAGKENLEYPSVTLPPQPHTKEGVDAYNEVIARVRMWVNLNLWQKLKLSRDDAKPLLRLKGFPSFPLVERQANEVDWWDMVCNVKKLINEKKEDGKVFWQNLAGYKRQEALRPYLSSEEDRKKGKKFARYQLGDLLLHLEKKHGEDWGKVYGEAWERIDKKVEGLSKHIKLEEERRSEDAQSKAALTDWLRAKASFVIEGLKEADKDEFCRCELKLQKWYGDLRGKPFAIEAENSILDISGFSKQYNCAFIWQKDGVKKLNLYLIINYFKGGKLRFKKIKPEAFEANRFYTVINKKSGEIVPMEVNFNFDDPNLIILPLAFGKRQGREFIWNDLLSLETGSLKLANGRVIEKTLYNRRTRQDEPALFVALTFERREVLDSSNIKPMNLIGVDRGENIPAVIALTDPEGCPLSRFKDSLGNPTHILRIGESYKEKQRTIQAKKEVEQRRAGGYSRKYASKAKNLADDMVRNTARDLLYYAVTQDAMLIFENLSRGFGRQGKRTFMAERQYTRMEDWLTAKLAYEGLPSKTYLSKTLAQYTSKTCSNCGFTITSADYDRVLEKLKKTATGWMTTINGKELKVEGQITYYNRYKRQNVVKDLSVELDRLSEESVNNDISSWTKGRSGEALSLLKKRFSHRPVQEKFVCLNCGFETHADEQAALNIARSWLFLRSQEYKKYQTNKTTGNTDKRAFVETWQSFYRKKLKEVWKPAV

SEQ ID NO: 41536 - protein, 979 aa, synthetic construct
  REGION 1..979: note = engineered CasX variant
QEIKGRINKIRRRLVKDSNTKKAGKTGPMKTLLVRVMTPDLRERLENLRKKPENIPQPISNTSRANLNKLLTDYTEMKKAILHVYWEEFQKDPVGLMSRVAQPASKKIDQNKLKPEMDEKGNLTTAGFACSQCGQPLFVYKLEQVSEKGKAYTNYFGRCNVAEHEKLIKLAQLKPEKDSDEAVTYSLGKFGQRALDFYSIHVTKESTHPVKPLAQIAGNRYASGPVGKALSDACMGTIASFLSKYQDIIIEHQKVVKGNQKRLESLRELAGKENLEYPSVTLPPQPHTKEGVDAYNEVIARVRMWVNLNLWQKLKLSRDDAKPLLRLKGFPSFPLVERQANEVDWWDMVCNVKKLINEKKEDGKVFWQNLAGYKRQEALRPYLSSEEDRKKGKKFARYQLGDLLLHLEKKHGEDWGKVYGEAWERIDKKVEGLSKHIKLEEERRSEDAQSKAALTDWLRAKASFVIEGLKEADKDEFCRCELKLQKWYGDLRGKPFAIEAENSILDISGFSKQYNCAFIWQKDGVKKLNLYLIINYFKGGKLRFKKIKPEAFEANRFYTVINKKSGEIVPMEVNFNFDDPNLIILPLAFGKRQGREFIWNDLLSLETGSLKLANGRVIEKTLYNRRTRQDEPALFVALTFERREVLDSSNIKPMNLIGVDRGENIPAVIALTDPEGCPLSRFKDSLGNPTHILRIGESYKEKQRTIQAKKEVEQRRAGGYSRKYASKAKNLADDMVRNTARDLLYYAVTQDAMLIFENLSRGFGRQGKRTFMAERQYTRMEDWLTAKLAYEGLPSKTYLSKTLAQYTSKTCSNCGFTITSADYDRVLEKLKKTATGWMTTINGKELKVEGQITYYNRYKRQNVVKDLSVELDRLSEESVNNDISSWTKGRSGEALSLLKKRFSHRPVQEKFVCLNCGFETHADEQAALNIARSWLFLRSQEYKKYQTNKTTGNTDKRAFVETWQSFYRKKLKEVWKPAV

SEQ ID NO: 41537 - protein, 978 aa, synthetic construct
  REGION 1..978: note = engineered CasX variant
QEIKGRINKIRRRLVKDSNTKKAGKTGPMKTLLVRVMTPDLRERLENLRKKPENIPQPISNTSRANLNKLLTDYTEMKKAILHVYWEEFQKDPVGLMSRVAQPASKKIDQNKLKPEMDEKGNLTTAGFACSQCGQPLFVYKLEQVSEKGKAYTNYFGRCNVAEHEKLILLAQLKPEKDSDEAVTYSLGKFGQRALDFYSIHVTKESTHPVKPLAQIAGNRYASPVGKALSDACMGTIASFLSKYQDIIIEHQKVVKGNQKRLESLRELAGKENLEYPSVTLPPQPHTKEGVDAYNEVIARVRMWVNLNLWQKLKLSRDDAKPLLRLKGFPSFPLVERQANEVDWWDMVCNVKKLINEKKEDGKVFWQNLAGYKRQEALRPYLSSEEDRKKGKKFARYQLGDLLLHLEKKHGEDWGKVYGEAWERIDKKVEGLSKHIKLEEERRSEDAQSKAALTDWLRAKASFVIEGLKEADKDEFCRCELKLQKWYGDLRGKPFAIEAENSILDISGFSKQYNCAFIWQKDGVKKLNLYLIINYFKGGKLRFKKIKPEAFEANRFYTVINKKSGEIVPMEVNFNFDDPNLIILPLAFGKRQGREFIWNDLLSLETGSLKLANGRVIEKTLYNRRTRQDEPALFVALTFERREVLDSSNIKPMNLIGVDRGENIPAVIALTDPEGCPLSRFKDSLGNPTHILRIGESYKEKQRTIQAKKEVEQRRAGGYSRKYASKAKNLADDMVRNTARDLLYYAVTQDAMLIFENLSRGFGRQGKRTFMAERQYTRMEDWLTAKLAYEGLPSKTYLSKTLAQYTSKTCSNCGFTITSADYDRVLEKLKKTATGWMTTINGKELKVEGQITYYNRYKRQNVVKDLSVELDRLSEESVNNDISSWTKGRSGEALSLLKKRFSHRPVQEKFVCLNCGFETHADEQAALNIARSWLFLRSQEYKKYQTNKTTGNTDKRAFVETWQSFYRKKLKEVWKPAV

SEQ ID NO: 41538 - protein, 979 aa, synthetic construct
  REGION 1..979: note = engineered CasX variant
QEIKGRINKIRRRLVKDSNTKKAGKTGPMKTLLVRVMTPDLRERLENLRKKPENIPQPISNTSRANLNKLLTDYTEMKKAILHVYWEEFQKDPVGLMSRVAQPASKKIDQNKLKPEMDEKGNLTTAGFACSQCGQPLFVYKLEQVSEKGKAYTNYFGRCNVAEHEKLILLAQLKPEKDSDEAVTYSLGKFGQRALDFYSIHVTKESTHPVKPLAQIAGNRYASYPVGKALSDACMGTIASFLSKYQDIIIEHQKVVKGNQKRLESLRELAGKENLEYPSVTLPPQPHTKEGVDAYNEVIARVRMWVNLNLWQKLKLSRDDAKPLLRLKGFPSFPLVERQANEVDWWDMVCNVKKLINEKKEDGKVFWQNLAGYKRQEALRPYLSSEEDRKKGKKFARYQLGDLLLHLEKKHGEDWGKVYDEAWERIDKKVEGLSKHIKLEEERRSEDAQSKAALTDWLRAKASFVIEGKKEADKDEFCRCELKLQKWYGDLRGKPFAIEAENSILDISGFSKQYNCAFIWQKDGVKKLNLYLIINYFKGGKLRFKKIKPEAFEANRFYTVINKKSGEIVPMEVNFNFDDPNLIILPLAFGKRQGREFIWNDLLSLETGSLKLANGRVIEKTLYNRRTRQDEPALFVALTFERREVLDSSNIKPMNLIGVDRGENIPAVIALTDPEGCPLSRFKDSLGNPTHILRIGESYKEKQRTIQAKKEVEQRRAGGYSRKYASKAKNLADDMVRNTARDLLYYAVTQDAMLIFENLSRGFGRQGKRTFMAERQYTRMEDWLTAKLAYEGLPSKTYLSKTLAQYTSKTCSNCGFTITSADYDRVLEKLKKTATGWMTTINGKELKVEGQITYYNRYKRQNVVKDLSVELDRLSEESVNNDISSWTKGRSGEALSLLKKRFSHRPVQEKFVCLNCGFETHADEQAALNIARSWLFLRSQEYKKYQTNKTTGNTDKRAFVETWQSFYRKKLKEVWKPAV

SEQ ID NO: 41539 - protein, 979 aa, synthetic construct
  REGION 1..979: note = engineered CasX variant
QEIKGRINKIRRRLVKDSNTKKAGKTGPMKTLLVRVMTPDLRERLENLRKKPENIPQPISNTSRANLNKLLTDYTEMKKAILHVYWEEFQKDPVGLMSRVAQPASKKIDQNKLKPEMDEKGNLTTAGFACSQCGQPLFVYKLEQVSEKGKAYTNYFGRCNVAEHEKLILLAQLKPEKDSDEAVTYSLGKFGQRALDFYSIHVTKESTHPVKPLAQIAGNRYASHPVGKALSDACMGTIASFLSKYQDIIIEHQKVVKGNQKRLESLRELAGKENLEYPSVTLPPQPHTKEGVDAYNEVIARVRMWVNLNLWQKLKLSRDDAKPLLRLKGFPSFPLVERQANEVDWWDMVCNVKKLINEKKEDGKVFWQNLAGYKRQEALRPYLSSEEDRKKGKKFARYQLGDLLLHLEKKHGEDWGKVYDEAWERIDKKVEGLSKHIKLEEERRSEDAQSKAALTDWLRAKASFVIEGKKEADKDEFCRCELKLQKWYGDLRGKPFAIEAENSILDISGFSKQYNCAFIWQKDGVKKLNLYLIINYFKGGKLRFKKIKPEAFEANRFYTVINKKSGEIVPMEVNFNFDDPNLIILPLAFGKRQGREFIWNDLLSLETGSLKLANGRVIEKTLYNRRTRQDEPALFVALTFERREVLDSSNIKPMNLIGVDRGENIPAVIALTDPEGCPLSRFKDSLGNPTHILRIGESYKEKQRTIQAKKEVEQRRAGGYSRKYASKAKNLADDMVRNTARDLLYYAVTQDAMLIFENLSRGFGRQGKRTFMAERQYTRMEDWLTAKLAYEGLPSKTYLSKTLAQYTSKTCSNCGFTITSADYDRVLEKLKKTATGWMTTINGKELKVEGQITYYNRYKRQNVVKDLSVELDRLSEESVNNDISSWTKGRSGEALSLLKKRFSHRPVQEKFVCLNCGFETHADEQAALNIARSWLFLRSQEYKKYQTNKTTGNTDKRAFVETWQSFYRKKLKEVWKPAV

SEQ ID NO: 41540 - protein, 979 aa, synthetic construct
  REGION 1..979: note = engineered CasX variant
QEIKGRINKIRRRLVKDSNTKKAGKTGPMKTLLVRVMTPDLRERLENLRKKPENIPQPISNTSRANLNKLLTDYTEMKKAILHVYWEEFQKDPVGLMSRVAQPASKKIDQNKLKPEMDEKGNLTTAGFACSQCGQPLFVYKLEQVSEKGKAYTNYFGRCNVAEHEKLILLAQLKPEKDSDEAVTYSLGKFGQRALDFYSIHVTKESTHPVKPLAQIAGNRYASSPVGKALSDACMGTIASFLSKYQDIIIEHQKVVKGNQKRLESLRELAGKENLEYPSVTLPPQPHTKEGVDAYNEVIARVRMWVNLNLWQKLKLSRDDAKPLLRLKGFPSFPLVERQANEVDWWDMVCNVKKLINEKKEDGKVFWQNLAGYKRQEALRPYLSSEEDRKKGKKFARYQLGDLLLHLEKKHGEDWGKVYDEAWERIDKKVEGLSKHIKLEEERRSEDAQSKAALTDWLRAKASFVIEGKKEADKDEFCRCELKLQKWYGDLRGKPFAIEAENSILDISGFSKQYNCAFIWQKDGVKKLNLYLIINYFKGGKLRFKKIKPEAFEANRFYTVINKKSGEIVPMEVNFNFDDPNLIILPLAFGKRQGREFIWNDLLSLETGSLKLANGRVIEKTLYNRRTRQDEPALFVALTFERREVLDSSNIKPMNLIGVDRGENIPAVIALTDPEGCPLSRFKDSLGNPTHILRIGESYKEKQRTIQAKKEVEQRRAGGYSRKYASKAKNLADDMVRNTARDLLYYAVTQDAMLIFENLSRGFGRQGKRTFMAERQYTRMEDWLTAKLAYEGLPSKTYLSKTLAQYTSKTCSNCGFTITSADYDRVLEKLKKTATGWMTTINGKELKVEGQITYYNRYKRQNVVKDLSVELDRLSEESVNNDISSWTKGRSGEALSLLKKRFSHRPVQEKFVCLNCGFETHADEQAALNIARSWLFLRSQEYKKYQTNKTTGNTDKRAFVETWQSFYRKKLKEVWKPAV

SEQ ID NO: 41541 - protein, 979 aa, synthetic construct
  REGION 1..979: note = engineered CasX variant
QEIKGRINKIRRRLVKDSNTKKAGKTGPMKTLLVRVMTPDLRERLENLRKKPENIPQPISNTSRANLNKLLTDYTEMKKAILHVYWEEFQKDPVGLMSRVAQPASKKIDQNKLKPEMDEKGNLTTAGFACSQCGQPLFVYKLEQVSEKGKAYTNYFGRCNVAEHEKLILLAQLKPEKDSDEAVTYSLGKFGQRALDFYSIHVTKESTHPVKPLAQIAGNRYASTPVGKALSDACMGTIASFLSKYQDIIIEHQKVVKGNQKRLESLRELAGKENLEYPSVTLPPQPHTKEGVDAYNEVIARVRMWVNLNLWQKLKLSRDDAKPLLRLKGFPSFPLVERQANEVDWWDMVCNVKKLINEKKEDGKVFWQNLAGYKRQEALRPYLSSEEDRKKGKKFARYQLGDLLLHLEKKHGEDWGKVYDEAWERIDKKVEGLSKHIKLEEERRSEDAQSKAALTDWLRAKASFVIEGKKEADKDEFCRCELKLQKWYGDLRGKPFAIEAENSILDISGFSKQYNCAFIWQKDGVKKLNLYLIINYFKGGKLRFKKIKPEAFEANRFYTVINKKSGEIVPMEVNFNFDDPNLIILPLAFGKRQGREFIWNDLLSLETGSLKLANGRVIEKTLYNRRTRQDEPALFVALTFERREVLDSSNIKPMNLIGVDRGENIPAVIALTDPEGCPLSRFKDSLGNPTHILRIGESYKEKQRTIQAKKEVEQRRAGGYSRKYASKAKNLADDMVRNTARDLLYYAVTQDAMLIFENLSRGFGRQGKRTFMAERQYTRMEDWLTAKLAYEGLPSKTYLSKTLAQYTSKTCSNCGFTITSADYDRVLEKLKKTATGWMTTINGKELKVEGQITYYNRYKRQNVVKDLSVELDRLSEESVNNDISSWTKGRSGEALSLLKKRFSHRPVQEKFVCLNCGFETHADEQAALNIARSWLFLRSQEYKKYQTNKTTGNTDKRAFVETWQSFYRKKLKEVWKPAV

SEQ ID NO: 41542 - protein, 979 aa, synthetic construct
  REGION 1..979: note = engineered CasX variant
QEIKGRINKIRRRLVKDSNTKKAGKTGPMKTLLVRVMTPDLRERLENLRKKPENIPQPISNTSRANLNKLLTDYTEMKKAILHVYWEEFQKDPVGLMSRVAQPASKKIDQNKLKPEMDEKGNLTTAGFACSQCGQPLFVYKLEQVSEKGKAYTNYFGRCNVAEHEKLILLAQLKPEKDSDEAVTYSLGKFGQRALDFYSIHVTKESTHPVKPLAQIAGNRYASAPVGKALSDACMGTIASFLSKYQDIIIEHQKVVKGNQKRLESLRELAGKENLEYPSVTLPPQPHTKEGVDAYNEVIARVRMWVNLNLWQKLKLSRDDAKPLLRLKGFPSFPLVERQANEVDWWDMVCNVKKLINEKKEDGKVFWQNLAGYKRQEALRPYLSSEEDRKKGKKFARYQLGDLLLHLEKKHGEDWGKVYDEAWERIDKKVEGLSKHIKLEEERRSEDAQSKAALTDWLRAKASFVIEGKKEADKDEFCRCELKLQKWYGDLRGKPFAIEAENSILDISGFSKQYNCAFIWQKDGVKKLNLYLIINYFKGGKLRFKKIKPEAFEANRFYTVINKKSGEIVPMEVNFNFDDPNLIILPLAFGKRQGREFIWNDLLSLETGSLKLANGRVIEKTLYNRRTRQDEPALFVALTFERREVLDSSNIKPMNLIGVDRGENIPAVIALTDPEGCPLSRFKDSLGNPTHILRIGESYKEKQRTIQAKKEVEQRRAGGYSRKYASKAKNLADDMVRNTARDLLYYAVTQDAMLIFENLSRGFGRQGKRTFMAERQYTRMEDWLTAKLAYEGLPSKTYLSKTLAQYTSKTCSNCGFTITSADYDRVLEKLKKTATGWMTTINGKELKVEGQITYYNRYKRQNVVKDLSVELDRLSEESVNNDISSWTKGRSGEALSLLKKRFSHRPVQEKFVCLNCGFETHADEQAALNIARSWLFLRSQEYKKYQTNKTTGNTDKRAFVETWQSFYRKKLKEVWKPAV

SEQ ID NO: 41543 - protein, 979 aa, synthetic construct
  REGION 1..979: note = engineered CasX variant
QEIKGRINKIRRRLVKDSNTKKAGKTGPMKTLLVRVMTPDLRERLENLRKKPENIPQPISNTSRANLNKLLTDYTEMKKAILHVYWEEFQKDPVGLMSRVAQPASKKIDQNKLKPEMDEKGNLTTAGFACSQCGQPLFVYKLEQVSEKGKAYTNYFGRCNVAEHEKLILLAQLKPEKDSDEAVTYSLGKFGQRALDFYSIHVTKESTHPVKPLAQIAGNRYASVPVGKALSDACMGTIASFLSKYQDIIIEHQKVVKGNQKRLESLRELAGKENLEYPSVTLPPQPHTKEGVDAYNEVIARVRMWVNLNLWQKLKLSRDDAKPLLRLKGFPSFPLVERQANEVDWWDMVCNVKKLINEKKEDGKVFWQNLAGYKRQEALRPYLSSEEDRKKGKKFARYQLGDLLLHLEKKHGEDWGKVYDEAWERIDKKVEGLSKHIKLEEERRSEDAQSKAALTDWLRAKASFVIEGKKEADKDEFCRCELKLQKWYGDLRGKPFAIEAENSILDISGFSKQYNCAFIWQKDGVKKLNLYLIINYFKGGKLRFKKIKPEAFEANRFYTVINKKSGEIVPMEVNFNFDDPNLIILPLAFGKRQGREFIWNDLLSLETGSLKLANGRVIEKTLYNRRTRQDEPALFVALTFERREVLDSSNIKPMNLIGVDRGENIPAVIALTDPEGCPLSRFKDSLGNPTHILRIGESYKEKQRTIQAKKEVEQRRAGGYSRKYASKAKNLADDMVRNTARDLLYYAVTQDAMLIFENLSRGFGRQGKRTFMAERQYTRMEDWLTAKLAYEGLPSKTYLSKTLAQYTSKTCSNCGFTITSADYDRVLEKLKKTATGWMTTINGKELKVEGQITYYNRYKRQNVVKDLSVELDRLSEESVNNDISSWTKGRSGEALSLLKKRFSHRPVQEKFVCLNCGFETHADEQAALNIARSWLFLRSQEYKKYQTNKTTGNTDKRAFVETWQSFYRKKLKEVWKPAV

SEQ ID NO: 41544 - protein, 979 aa, synthetic construct
  REGION 1..979: note = engineered CasX variant
QEIKGRINKIRRRLVKDSNTKKAGKTGPMKTLLVRVMTPDLRERLENLRKKPENIPQPISNTSRANLNKLLTDYTEMKKAILHVYWEEFQKDPVGLMSRVAQPASKKIDQNKLKPEMDEKGNLTTAGFACSQCGQPLFVYKLEQVSEKGKAYTNYFGRCNVAEHEKLIKLAQLKPEKDSDEAVTYSLGKFGQRALDFYSIHVTKESTHPVKPLAQIAGNRYASGPVGKALSDACMGTIASFLSKYQDIIIEHQKVVKGNQKRLESLRELAGKENLEYPSVTLPPQPHTKEGVDAYNEVIARVRMWVNLNLWQKLKLSRDDAKPLLRLKGFPSFPLVERQANEVDWWDMVCNVKKLINEKKEDGKVFWQNLAGYKRQEALRPYLSSEEDRKKGKKFARYQLGDLLLHLEKKHGEDWGKVYDEAWERIDKKVEGLSKHIKLEEERRSEDAQSKAALTDWLRAKASFVIEGKKEADKDEFCRCELKLQKWYGDLRGKPFAIEAENSILDISGFSKQYNCAFIWQKDGVKKLNLYLIINYFKGGKLRFKKIKPEAFEANRFYTVINKKSGEIVPMEVNFNFDDPNLIILPLAFGKRQGREFIWNDLLSLETGSLKLANGRVIEKTLYNRRTRQDEPALFVALTFERREVLDSSNIKPMNLIGVDRGENIPAVIALTDPEGCPLSRFKDSLGNPTHILRIGESYKEKQRTIQAKKEVEQRRAGGYSRKYASKAKNLADDMVRNTARDLLYYAVTQDAMLIFENLSRGFGRQGKRTFMAERQYTRMEDWLTAKLAYEGLPSKTYLSKTLAQYTSKTCSNCGFTITSADYDRVLEKLKKTATGWMTTINGKELKVEGQITYYNRYKRQNVVKDLSVELDRLSEESVNNDISSWTKGRSGEALSLLKKRFSHRPVQEKFVCLNCGFETHADEQAALNIARSWLFLRSQEYKKYQTNKTTGNTDKRAFVETWQSFYRKKLKEVWKPAV

SEQ ID NO: 41545 - protein, 978 aa, synthetic construct
  REGION 1..978: note = engineered CasX variant
QEIKGRINKIRRRLVKDSNTKKAGKTGPMKTLLVRVMTPDLRERLENLRKKPENIPQPISNTSRANLNKLLTDYTEMKKAILHVYWEEFQKDPVGLMSRVAQPASKKIDQNKLKPEMDEKGNLTTAGFACSQCGQPLFVYKLEQVSEKGKAYTNYFGRCNVAEHEKLILLAQLKPEKDSDEAVTYSLGKFGQRALDFYSIHVTKESTHPVKPLAQIAGNRYASPVGKALSDACMGTIASFLSKYQDIIIEHQKVVKGNQKRLESLRELAGKENLEYPSVTLPPQPHTKEGVDAYNEVIARVRMWVNLNLWQKLKLSRDDAKPLLRLKGFPSFPLVERQANEVDWWDMVCNVKKLINEKKEDGKVFWQNLAGYKRQEALRPYLSSEEDRKKGKKFARYQLGDLLLHLEKKHGEDWGKVYDEAWERIDKKVEGLSKHIKLEEERRSEDAQSKAALTDWLRAKASFVIEGKKEADKDEFCRCELKLQKWYGDLRGKPFAIEAENSILDISGFSKQYNCAFIWQKDGVKKLNLYLIINYFKGGKLRFKKIKPEAFEANRFYTVINKKSGEIVPMEVNFNFDDPNLIILPLAFGKRQGREFIWNDLLSLETGSLKLANGRVIEKTLYNRRTRQDEPALFVALTFERREVLDSSNIKPMNLIGVDRGENIPAVIALTDPEGCPLSRFKDSLGNPTHILRIGESYKEKQRTIQAKKEVEQRRAGGYSRKYASKAKNLADDMVRNTARDLLYYAVTQDAMLIFENLSRGFGRQGKRTFMAERQYTRMEDWLTAKLAYEGLPSKTYLSKTLAQYTSKTCSNCGFTITSADYDRVLEKLKKTATGWMTTINGKELKVEGQITYYNRYKRQNVVKDLSVELDRLSEESVNNDISSWTKGRSGEALSLLKKRFSHRPVQEKFVCLNCGFETHADEQAALNIARSWLFLRSQEYKKYQTNKTTGNTDKRAFVETWQSFYRKKLKEVWKPAV

SEQ ID NO: 41546 - protein, 979 aa, synthetic construct
  REGION 1..979: note = engineered CasX variant
QEIKGRINKIRRRLVKDSNTKKAGKTGPMKTLLVRVMTPDLRERLENLRKKPENIPQPISNTSRANLNKLLTDYTEMKKAILHVYWEEFQKDPVGLMSRVAQPASKKIDQNKLKPEMDEKGNLTTAGFACSQCGQPLFVYKLEQVSEKGKAYTNYFGRCNVAEHEKLILLAQLKPEKDSDEAVTYSLGKFGQRALDFYSIHVTKESTHPVKPLAQIAGNRYASYPVGKALSDACMGTIASFLSKYQDIIIEHQKVVKGNQKRLESLRELAGKENLEYPSVTLPPQPHTKEGVDAYNEVIARVRMWVNLNLWQKLKLSRDDAKPLLRLKGFPSFPLVERQANEVDWWDMVCNVKKLINEKKEDGKVFWQNLAGYKRQEALRPYLSSEEDRKKGKKFARYQLGDLLLHLEKKHGEDWGKVYDEAWERIDKKVEGLSKHIKLEEERRSEDAQSKAALTDWLRAKASFVIEGSKEADKDEFCRCELKLQKWYGDLRGKPFAIEAENSILDISGFSKQYNCAFIWQKDGVKKLNLYLIINYFKGGKLRFKKIKPEAFEANRFYTVINKKSGEIVPMEVNFNFDDPNLIILPLAFGKRQGREFIWNDLLSLETGSLKLANGRVIEKTLYNRRTRQDEPALFVALTFERREVLDSSNIKPMNLIGVDRGENIPAVIALTDPEGCPLSRFKDSLGNPTHILRIGESYKEKQRTIQAKKEVEQRRAGGYSRKYASKAKNLADDMVRNTARDLLYYAVTQDAMLIFENLSRGFGRQGKRTFMAERQYTRMEDWLTAKLAYEGLPSKTYLSKTLAQYTSKTCSNCGFTITSADYDRVLEKLKKTATGWMTTINGKELKVEGQITYYNRYKRQNVVKDLSVELDRLSEESVNNDISSWTKGRSGEALSLLKKRFSHRPVQEKFVCLNCGFETHADEQAALNIARSWLFLRSQEYKKYQTNKTTGNTDKRAFVETWQSFYRKKLKEVWKPAV

SEQ ID NO: 41547 - protein, 979 aa, synthetic construct
  REGION 1..979: note = engineered CasX variant
QEIKGRINKIRRRLVKDSNTKKAGKTGPMKTLLVRVMTPDLRERLENLRKKPENIPQPISNTSRANLNKLLTDYTEMKKAILHVYWEEFQKDPVGLMSRVAQPASKKIDQNKLKPEMDEKGNLTTAGFACSQCGQPLFVYKLEQVSEKGKAYTNYFGRCNVAEHEKLILLAQLKPEKDSDEAVTYSLGKFGQRALDFYSIHVTKESTHPVKPLAQIAGNRYASHPVGKALSDACMGTIASFLSKYQDIIIEHQKVVKGNQKRLESLRELAGKENLEYPSVTLPPQPHTKEGVDAYNEVIARVRMWVNLNLWQKLKLSRDDAKPLLRLKGFPSFPLVERQANEVDWWDMVCNVKKLINEKKEDGKVFWQNLAGYKRQEALRPYLSSEEDRKKGKKFARYQLGDLLLHLEKKHGEDWGKVYDEAWERIDKKVEGLSKHIKLEEERRSEDAQSKAALTDWLRAKASFVIEGSKEADKDEFCRCELKLQKWYGDLRGKPFAIEAENSILDISGFSKQYNCAFIWQKDGVKKLNLYLIINYFKGGKLRFKKIKPEAFEANRFYTVINKKSGEIVPMEVNFNFDDPNLIILPLAFGKRQGREFIWNDLLSLETGSLKLANGRVIEKTLYNRRTRQDEPALFVALTFERREVLDSSNIKPMNLIGVDRGENIPAVIALTDPEGCPLSRFKDSLGNPTHILRIGESYKEKQRTIQAKKEVEQRRAGGYSRKYASKAKNLADDMVRNTARDLLYYAVTQDAMLIFENLSRGFGRQGKRTFMAERQYTRMEDWLTAKLAYEGLPSKTYLSKTLAQYTSKTCSNCGFTITSADYDRVLEKLKKTATGWMTTINGKELKVEGQITYYNRYKRQNVVKDLSVELDRLSEESVNNDISSWTKGRSGEALSLLKKRFSHRPVQEKFVCLNCGFETHADEQAALNIARSWLFLRSQEYKKYQTNKTTGNTDKRAFVETWQSFYRKKLKEVWKPAV

SEQ ID NO: 41548 - protein, 979 aa, synthetic construct
  REGION 1..979: note = engineered CasX variant
QEIKGRINKIRRRLVKDSNTKKAGKTGPMKTLLVRVMTPDLRERLENLRKKPENIPQPISNTSRANLNKLLTDYTEMKKAILHVYWEEFQKDPVGLMSRVAQPASKKIDQNKLKPEMDEKGNLTTAGFACSQCGQPLFVYKLEQVSEKGKAYTNYFGRCNVAEHEKLILLAQLKPEKDSDEAVTYSLGKFGQRALDFYSIHVTKESTHPVKPLAQIAGNRYASSPVGKALSDACMGTIASFLSKYQDIIIEHQKVVKGNQKRLESLRELAGKENLEYPSVTLPPQPHTKEGVDAYNEVIARVRMWVNLNLWQKLKLSRDDAKPLLRLKGFPSFPLVERQANEVDWWDMVCNVKKLINEKKEDGKVFWQNLAGYKRQEALRPYLSSEEDRKKGKKFARYQLGDLLLHLEKKHGEDWGKVYDEAWERIDKKVEGLSKHIKLEEERRSEDAQSKAALTDWLRAKASFVIEGSKEADKDEFCRCELKLQKWYGDLRGKPFAIEAENSILDISGFSKQYNCAFIWQKDGVKKLNLYLIINYFKGGKLRFKKIKPEAFEANRFYTVINKKSGEIVPMEVNFNFDDPNLIILPLAFGKRQGREFIWNDLLSLETGSLKLANGRVIEKTLYNRRTRQDEPALFVALTFERREVLDSSNIKPMNLIGVDRGENIPAVIALTDPEGCPLSRFKDSLGNPTHILRIGESYKEKQRTIQAKKEVEQRRAGGYSRKYASKAKNLADDMVRNTARDLLYYAVTQDAMLIFENLSRGFGRQGKRTFMAERQYTRMEDWLTAKLAYEGLPSKTYLSKTLAQYTSKTCSNCGFTITSADYDRVLEKLKKTATGWMTTINGKELKVEGQITYYNRYKRQNVVKDLSVELDRLSEESVNNDISSWTKGRSGEALSLLKKRFSHRPVQEKFVCLNCGFETHADEQAALNIARSWLFLRSQEYKKYQTNKTTGNTDKRAFVETWQSFYRKKLKEVWKPAV

SEQ ID NO: 41549 - protein, 979 aa, synthetic construct
  REGION 1..979: note = engineered CasX variant
QEIKGRINKIRRRLVKDSNTKKAGKTGPMKTLLVRVMTPDLRERLENLRKKPENIPQPISNTSRANLNKLLTDYTEMKKAILHVYWEEFQKDPVGLMSRVAQPASKKIDQNKLKPEMDEKGNLTTAGFACSQCGQPLFVYKLEQVSEKGKAYTNYFGRCNVAEHEKLILLAQLKPEKDSDEAVTYSLGKFGQRALDFYSIHVTKESTHPVKPLAQIAGNRYASTPVGKALSDACMGTIASFLSKYQDIIIEHQKVVKGNQKRLESLRELAGKENLEYPSVTLPPQPHTKEGVDAYNEVIARVRMWVNLNLWQKLKLSRDDAKPLLRLKGFPSFPLVERQANEVDWWDMVCNVKKLINEKKEDGKVFWQNLAGYKRQEALRPYLSSEEDRKKGKKFARYQLGDLLLHLEKKHGEDWGKVYDEAWERIDKKVEGLSKHIKLEEERRSEDAQSKAALTDWLRAKASFVIEGSKEADKDEFCRCELKLQKWYGDLRGKPFAIEAENSILDISGFSKQYNCAFIWQKDGVKKLNLYLIINYFKGGKLRFKKIKPEAFEANRFYTVINKKSGEIVPMEVNFNFDDPNLIILPLAFGKRQGREFIWNDLLSLETGSLKLANGRVIEKTLYNRRTRQDEPALFVALTFERREVLDSSNIKPMNLIGVDRGENIPAVIALTDPEGCPLSRFKDSLGNPTHILRIGESYKEKQRTIQAKKEVEQRRAGGYSRKYASKAKNLADDMVRNTARDLLYYAVTQDAMLIFENLSRGFGRQGKRTFMAERQYTRMEDWLTAKLAYEGLPSKTYLSKTLAQYTSKTCSNCGFTITSADYDRVLEKLKKTATGWMTTINGKELKVEGQITYYNRYKRQNVVKDLSVELDRLSEESVNNDISSWTKGRSGEALSLLKKRFSHRPVQEKFVCLNCGFETHADEQAALNIARSWLFLRSQEYKKYQTNKTTGNTDKRAFVETWQSFYRKKLKEVWKPAV

SEQ ID NO: 41550 - protein, 979 aa, synthetic construct
  REGION 1..979: note = engineered CasX variant
QEIKGRINKIRRRLVKDSNTKKAGKTGPMKTLLVRVMTPDLRERLENLRKKPENIPQPISNTSRANLNKLLTDYTEMKKAILHVYWEEFQKDPVGLMSRVAQPASKKIDQNKLKPEMDEKGNLTTAGFACSQCGQPLFVYKLEQVSEKGKAYTNYFGRCNVAEHEKLILLAQLKPEKDSDEAVTYSLGKFGQRALDFYSIHVTKESTHPVKPLAQIAGNRYASAPVGKALSDACMGTIASFLSKYQDIIIEHQKVVKGNQKRLESLRELAGKENLEYPSVTLPPQPHTKEGVDAYNEVIARVRMWVNLNLWQKLKLSRDDAKPLLRLKGFPSFPLVERQANEVDWWDMVCNVKKLINEKKEDGKVFWQNLAGYKRQEALRPYLSSEEDRKKGKKFARYQLGDLLLHLEKKHGEDWGKVYDEAWERIDKKVEGLSKHIKLEEERRSEDAQSKAALTDWLRAKASFVIEGSKEADKDEFCRCELKLQKWYGDLRGKPFAIEAENSILDISGFSKQYNCAFIWQKDGVKKLNLYLIINYFKGGKLRFKKIKPEAFEANRFYTVINKKSGEIVPMEVNFNFDDPNLIILPLAFGKRQGREFIWNDLLSLETGSLKLANGRVIEKTLYNRRTRQDEPALFVALTFERREVLDSSNIKPMNLIGVDRGENIPAVIALTDPEGCPLSRFKDSLGNPTHILRIGESYKEKQRTIQAKKEVEQRRAGGYSRKYASKAKNLADDMVRNTARDLLYYAVTQDAMLIFENLSRGFGRQGKRTFMAERQYTRMEDWLTAKLAYEGLPSKTYLSKTLAQYTSKTCSNCGFTITSADYDRVLEKLKKTATGWMTTINGKELKVEGQITYYNRYKRQNVVKDLSVELDRLSEESVNNDISSWTKGRSGEALSLLKKRFSHRPVQEKFVCLNCGFETHADEQAALNIARSWLFLRSQEYKKYQTNKTTGNTDKRAFVETWQSFYRKKLKEVWKPAV

SEQ ID NO: 41551 - protein, 979 aa, synthetic construct
  REGION 1..979: note = engineered CasX variant
QEIKGRINKIRRRLVKDSNTKKAGKTGPMKTLLVRVMTPDLRERLENLRKKPENIPQPISNTSRANLNKLLTDYTEMKKAILHVYWEEFQKDPVGLMSRVAQPASKKIDQNKLKPEMDEKGNLTTAGFACSQCGQPLFVYKLEQVSEKGKAYTNYFGRCNVAEHEKLILLAQLKPEKDSDEAVTYSLGKFGQRALDFYSIHVTKESTHPVKPLAQIAGNRYASVPVGKALSDACMGTIASFLSKYQDIIIEHQKVVKGNQKRLESLRELAGKENLEYPSVTLPPQPHTKEGVDAYNEVIARVRMWVNLNLWQKLKLSRDDAKPLLRLKGFPSFPLVERQANEVDWWDMVCNVKKLINEKKEDGKVFWQNLAGYKRQEALRPYLSSEEDRKKGKKFARYQLGDLLLHLEKKHGEDWGKVYDEAWERIDKKVEGLSKHIKLEEERRSEDAQSKAALTDWLRAKASFVIEGSKEADKDEFCRCELKLQKWYGDLRGKPFAIEAENSILDISGFSKQYNCAFIWQKDGVKKLNLYLIINYFKGGKLRFKKIKPEAFEANRFYTVINKKSGEIVPMEVNFNFDDPNLIILPLAFGKRQGREFIWNDLLSLETGSLKLANGRVIEKTLYNRRTRQDEPALFVALTFERREVLDSSNIKPMNLIGVDRGENIPAVIALTDPEGCPLSRFKDSLGNPTHILRIGESYKEKQRTIQAKKEVEQRRAGGYSRKYASKAKNLADDMVRNTARDLLYYAVTQDAMLIFENLSRGFGRQGKRTFMAERQYTRMEDWLTAKLAYEGLPSKTYLSKTLAQYTSKTCSNCGFTITSADYDRVLEKLKKTATGWMTTINGKELKVEGQITYYNRYKRQNVVKDLSVELDRLSEESVNNDISSWTKGRSGEALSLLKKRFSHRPVQEKFVCLNCGFETHADEQAALNIARSWLFLRSQEYKKYQTNKTTGNTDKRAFVETWQSFYRKKLKEVWKPAV

SEQ ID NO: 41552 - protein, 979 aa, synthetic construct
  REGION 1..979: note = engineered CasX variant
QEIKGRINKIRRRLVKDSNTKKAGKTGPMKTLLVRVMTPDLRERLENLRKKPENIPQPISNTSRANLNKLLTDYTEMKKAILHVYWEEFQKDPVGLMSRVAQPASKKIDQNKLKPEMDEKGNLTTAGFACSQCGQPLFVYKLEQVSEKGKAYTNYFGRCNVAEHEKLIKLAQLKPEKDSDEAVTYSLGKFGQRALDFYSIHVTKESTHPVKPLAQIAGNRYASGPVGKALSDACMGTIASFLSKYQDIIIEHQKVVKGNQKRLESLRELAGKENLEYPSVTLPPQPHTKEGVDAYNEVIARVRMWVNLNLWQKLKLSRDDAKPLLRLKGFPSFPLVERQANEVDWWDMVCNVKKLINEKKEDGKVFWQNLAGYKRQEALRPYLSSEEDRKKGKKFARYQLGDLLLHLEKKHGEDWGKVYDEAWERIDKKVEGLSKHIKLEEERRSEDAQSKAALTDWLRAKASFVIEGSKEADKDEFCRCELKLQKWYGDLRGKPFAIEAENSILDISGFSKQYNCAFIWQKDGVKKLNLYLIINYFKGGKLRFKKIKPEAFEANRFYTVINKKSGEIVPMEVNFNFDDPNLIILPLAFGKRQGREFIWNDLLSLETGSLKLANGRVIEKTLYNRRTRQDEPALFVALTFERREVLDSSNIKPMNLIGVDRGENIPAVIALTDPEGCPLSRFKDSLGNPTHILRIGESYKEKQRTIQAKKEVEQRRAGGYSRKYASKAKNLADDMVRNTARDLLYYAVTQDAMLIFENLSRGFGRQGKRTFMAERQYTRMEDWLTAKLAYEGLPSKTYLSKTLAQYTSKTCSNCGFTITSADYDRVLEKLKKTATGWMTTINGKELKVEGQITYYNRYKRQNVVKDLSVELDRLSEESVNNDISSWTKGRSGEALSLLKKRFSHRPVQEKFVCLNCGFETHADEQAALNIARSWLFLRSQEYKKYQTNKTTGNTDKRAFVETWQSFYRKKLKEVWKPAV

SEQ ID NO: 41553 - protein, 978 aa, synthetic construct
  REGION 1..978: note = engineered CasX variant
QEIKGRINKIRRRLVKDSNTKKAGKTGPMKTLLVRVMTPDLRERLENLRKKPENIPQPISNTSRANLNKLLTDYTEMKKAILHVYWEEFQKDPVGLMSRVAQPASKKIDQNKLKPEMDEKGNLTTAGFACSQCGQPLFVYKLEQVSEKGKAYTNYFGRCNVAEHEKLILLAQLKPEKDSDEAVTYSLGKFGQRALDFYSIHVTKESTHPVKPLAQIAGNRYASPVGKALSDACMGTIASFLSKYQDIIIEHQKVVKGNQKRLESLRELAGKENLEYPSVTLPPQPHTKEGVDAYNEVIARVRMWVNLNLWQKLKLSRDDAKPLLRLKGFPSFPLVERQANEVDWWDMVCNVKKLINEKKEDGKVFWQNLAGYKRQEALRPYLSSEEDRKKGKKFARYQLGDLLLHLEKKHGEDWGKVYDEAWERIDKKVEGLSKHIKLEEERRSEDAQSKAALTDWLRAKASFVIEGSKEADKDEFCRCELKLQKWYGDLRGKPFAIEAENSILDISGFSKQYNCAFIWQKDGVKKLNLYLIINYFKGGKLRFKKIKPEAFEANRFYTVINKKSGEIVPMEVNFNFDDPNLIILPLAFGKRQGREFIWNDLLSLETGSLKLANGRVIEKTLYNRRTRQDEPALFVALTFERREVLDSSNIKPMNLIGVDRGENIPAVIALTDPEGCPLSRFKDSLGNPTHILRIGESYKEKQRTIQAKKEVEQRRAGGYSRKYASKAKNLADDMVRNTARDLLYYAVTQDAMLIFENLSRGFGRQGKRTFMAERQYTRMEDWLTAKLAYEGLPSKTYLSKTLAQYTSKTCSNCGFTITSADYDRVLEKLKKTATGWMTTINGKELKVEGQITYYNRYKRQNVVKDLSVELDRLSEESVNNDISSWTKGRSGEALSLLKKRFSHRPVQEKFVCLNCGFETHADEQAALNIARSWLFLRSQEYKKYQTNKTTGNTDKRAFVETWQSFYRKKLKEVWKPAV

SEQ ID NO: 41554 - protein, 980 aa, synthetic construct
  REGION 1..980: note = engineered CasX variant
QEIKGRINKIRRRLVKDSNTKKAGKTGPMKTLLVRVMTPDLRERLENLRKKPENIPQPISNTSRANLNKLLTDYTEMKKAILHVYWEEFQKDPVGLMSRVAQPASKKIDQNKLKPEMDEKGNLTTAGFACSQCGQPLFVYKLEQVSEKGKAYTNYFGRCNVAEHEKLILLAQLKPEKDSDEAVTYSLGKFGQRALDFYSIHVTKESTHPVKPLAQIAGNRYASYPVGKALSDACMGTIASFLSKYQDIIIEHQKVVKGNQKRLESLRELAGKENLEYPSVTLPPQPHTKEGVDAYNEVIARVRMWVNLNLWQKLKLSRDDAKPLLRLKGFPSFPLVERQANEVDWWDMVCNVKKLINEKKEDGKVFWQNLAGYKRQEALRPYLSSEEDRKKGKKFARYQLGDLLLHLEKKHGEDWGKVYDEAWERIDKKVEGLSKHIKLEEERRSEDAQSKAALTDWLRAKASFVIEGLKEADDKDEFCRCELKLQKWYGDLRGKPFAIEAENSILDISGFSKQYNCAFIWQKDGVKKLNLYLIINYFKGGKLRFKKIKPEAFEANRFYTVINKKSGEIVPMEVNFNFDDPNLIILPLAFGKRQGREFIWNDLLSLETGSLKLANGRVIEKTLYNRRTRQDEPALFVALTFERREVLDSSNIKPMNLIGVDRGENIPAVIALTDPEGCPLSRFKDSLGNPTHILRIGESYKEKQRTIQAKKEVEQRRAGGYSRKYASKAKNLADDMVRNTARDLLYYAVTQDAMLIFENLSRGFGRQGKRTFMAERQYTRMEDWLTAKLAYEGLPSKTYLSKTLAQYTSKTCSNCGFTITSADYDRVLEKLKKTATGWMTTINGKELKVEGQITYYNRYKRQNVVKDLSVELDRLSEESVNNDISSWTKGRSGEALSLLKKRFSHRPVQEKFVCLNCGFETHADEQAALNIARSWLFLRSQEYKKYQTNKTTGNTDKRAFVETWQSFYRKKLKEVWKPAV

SEQ ID NO: 41555 - protein, 980 aa, synthetic construct
  REGION 1..980: note = engineered CasX variant
QEIKGRINKIRRRLVKDSNTKKAGKTGPMKTLLVRVMTPDLRERLENLRKKPENIPQPISNTSRANLNKLLTDYTEMKKAILHVYWEEFQKDPVGLMSRVAQPASKKIDQNKLKPEMDEKGNLTTAGFACSQCGQPLFVYKLEQVSEKGKAYTNYFGRCNVAEHEKLILLAQLKPEKDSDEAVTYSLGKFGQRALDFYSIHVTKESTHPVKPLAQIAGNRYASHPVGKALSDACMGTIASFLSKYQDIIIEHQKVVKGNQKRLESLRELAGKENLEYPSVTLPPQPHTKEGVDAYNEVIARVRMWVNLNLWQKLKLSRDDAKPLLRLKGFPSFPLVERQANEVDWWDMVCNVKKLINEKKEDGKVFWQNLAGYKRQEALRPYLSSEEDRKKGKKFARYQLGDLLLHLEKKHGEDWGKVYDEAWERIDKKVEGLSKHIKLEEERRSEDAQSKAALTDWLRAKASFVIEGLKEADDKDEFCRCELKLQKWYGDLRGKPFAIEAENSILDISGFSKQYNCAFIWQKDGVKKLNLYLIINYFKGGKLRFKKIKPEAFEANRFYTVINKKSGEIVPMEVNFNFDDPNLIILPLAFGKRQGREFIWNDLLSLETGSLKLANGRVIEKTLYNRRTRQDEPALFVALTFERREVLDSSNIKPMNLIGVDRGENIPAVIALTDPEGCPLSRFKDSLGNPTHILRIGESYKEKQRTIQAKKEVEQRRAGGYSRKYASKAKNLADDMVRNTARDLLYYAVTQDAMLIFENLSRGFGRQGKRTFMAERQYTRMEDWLTAKLAYEGLPSKTYLSKTLAQYTSKTCSNCGFTITSADYDRVLEKLKKTATGWMTTINGKELKVEGQITYYNRYKRQNVVKDLSVELDRLSEESVNNDISSWTKGRSGEALSLLKKRFSHRPVQEKFVCLNCGFETHADEQAALNIARSWLFLRSQEYKKYQTNKTTGNTDKRAFVETWQSFYRKKLKEVWKPAV

SEQ ID NO: 41556 - protein, 980 aa, synthetic construct
  REGION 1..980: note = engineered CasX variant
QEIKGRINKIRRRLVKDSNTKKAGKTGPMKTLLVRVMTPDLRERLENLRKKPENIPQPISNTSRANLNKLLTDYTEMKKAILHVYWEEFQKDPVGLMSRVAQPASKKIDQNKLKPEMDEKGNLTTAGFACSQCGQPLFVYKLEQVSEKGKAYTNYFGRCNVAEHEKLILLAQLKPEKDSDEAVTYSLGKFGQRALDFYSIHVTKESTHPVKPLAQIAGNRYASSPVGKALSDACMGTIASFLSKYQDIIIEHQKVVKGNQKRLESLRELAGKENLEYPSVTLPPQPHTKEGVDAYNEVIARVRMWVNLNLWQKLKLSRDDAKPLLRLKGFPSFPLVERQANEVDWWDMVCNVKKLINEKKEDGKVFWQNLAGYKRQEALRPYLSSEEDRKKGKKFARYQLGDLLLHLEKKHGEDWGKVYDEAWERIDKKVEGLSKHIKLEEERRSEDAQSKAALTDWLRAKASFVIEGLKEADDKDEFCRCELKLQKWYGDLRGKPFAIEAENSILDISGFSKQYNCAFIWQKDGVKKLNLYLIINYFKGGKLRFKKIKPEAFEANRFYTVINKKSGEIVPMEVNFNFDDPNLIILPLAFGKRQGREFIWNDLLSLETGSLKLANGRVIEKTLYNRRTRQDEPALFVALTFERREVLDSSNIKPMNLIGVDRGENIPAVIALTDPEGCPLSRFKDSLGNPTHILRIGESYKEKQRTIQAKKEVEQRRAGGYSRKYASKAKNLADDMVRNTARDLLYYAVTQDAMLIFENLSRGFGRQGKRTFMAERQYTRMEDWLTAKLAYEGLPSKTYLSKTLAQYTSKTCSNCGFTITSADYDRVLEKLKKTATGWMTTINGKELKVEGQITYYNRYKRQNVVKDLSVELDRLSEESVNNDISSWTKGRSGEALSLLKKRFSHRPVQEKFVCLNCGFETHADEQAALNIARSWLFLRSQEYKKYQTNKTTGNTDKRAFVETWQSFYRKKLKEVWKPAV

SEQ ID NO: 41557 - protein, 980 aa, synthetic construct
  REGION 1..980: note = engineered CasX variant
QEIKGRINKIRRRLVKDSNTKKAGKTGPMKTLLVRVMTPDLRERLENLRKKPENIPQPISNTSRANLNKLLTDYTEMKKAILHVYWEEFQKDPVGLMSRVAQPASKKIDQNKLKPEMDEKGNLTTAGFACSQCGQPLFVYKLEQVSEKGKAYTNYFGRCNVAEHEKLILLAQLKPEKDSDEAVTYSLGKFGQRALDFYSIHVTKESTHPVKPLAQIAGNRYASTPVGKALSDACMGTIASFLSKYQDIIIEHQKVVKGNQKRLESLRELAGKENLEYPSVTLPPQPHTKEGVDAYNEVIARVRMWVNLNLWQKLKLSRDDAKPLLRLKGFPSFPLVERQANEVDWWDMVCNVKKLINEKKEDGKVFWQNLAGYKRQEALRPYLSSEEDRKKGKKFARYQLGDLLLHLEKKHGEDWGKVYDEAWERIDKKVEGLSKHIKLEEERRSEDAQSKAALTDWLRAKASFVIEGLKEADDKDEFCRCELKLQKWYGDLRGKPFAIEAENSILDISGFSKQYNCAFIWQKDGVKKLNLYLIINYFKGGKLRFKKIKPEAFEANRFYTVINKKSGEIVPMEVNFNFDDPNLIILPLAFGKRQGREFIWNDLLSLETGSLKLANGRVIEKTLYNRRTRQDEPALFVALTFERREVLDSSNIKPMNLIGVDRGENIPAVIALTDPEGCPLSRFKDSLGNPTHILRIGESYKEKQRTIQAKKEVEQRRAGGYSRKYASKAKNLADDMVRNTARDLLYYAVTQDAMLIFENLSRGFGRQGKRTFMAERQYTRMEDWLTAKLAYEGLPSKTYLSKTLAQYTSKTCSNCGFTITSADYDRVLEKLKKTATGWMTTINGKELKVEGQITYYNRYKRQNVVKDLSVELDRLSEESVNNDISSWTKGRSGEALSLLKKRFSHRPVQEKFVCLNCGFETHADEQAALNIARSWLFLRSQEYKKYQTNKTTGNTDKRAFVETWQSFYRKKLKEVWKPAV

SEQ ID NO: 41558 - protein, 980 aa, synthetic construct
  REGION 1..980: note = engineered CasX variant
QEIKGRINKIRRRLVKDSNTKKAGKTGPMKTLLVRVMTPDLRERLENLRKKPENIPQPISNTSRANLNKLLTDYTEMKKAILHVYWEEFQKDPVGLMSRVAQPASKKIDQNKLKPEMDEKGNLTTAGFACSQCGQPLFVYKLEQVSEKGKAYTNYFGRCNVAEHEKLILLAQLKPEKDSDEAVTYSLGKFGQRALDFYSIHVTKESTHPVKPLAQIAGNRYASAPVGKALSDACMGTIASFLSKYQDIIIEHQKVVKGNQKRLESLRELAGKENLEYPSVTLPPQPHTKEGVDAYNEVIARVRMWVNLNLWQKLKLSRDDAKPLLRLKGFPSFPLVERQANEVDWWDMVCNVKKLINEKKEDGKVFWQNLAGYKRQEALRPYLSSEEDRKKGKKFARYQLGDLLLHLEKKHGEDWGKVYDEAWERIDKKVEGLSKHIKLEEERRSEDAQSKAALTDWLRAKASFVIEGLKEADDKDEFCRCELKLQKWYGDLRGKPFAIEAENSILDISGFSKQYNCAFIWQKDGVKKLNLYLIINYFKGGKLRFKKIKPEAFEANRFYTVINKKSGEIVPMEVNFNFDDPNLIILPLAFGKRQGREFIWNDLLSLETGSLKLANGRVIEKTLYNRRTRQDEPALFVALTFERREVLDSSNIKPMNLIGVDRGENIPAVIALTDPEGCPLSRFKDSLGNPTHILRIGESYKEKQRTIQAKKEVEQRRAGGYSRKYASKAKNLADDMVRNTARDLLYYAVTQDAMLIFENLSRGFGRQGKRTFMAERQYTRMEDWLTAKLAYEGLPSKTYLSKTLAQYTSKTCSNCGFTITSADYDRVLEKLKKTATGWMTTINGKELKVEGQITYYNRYKRQNVVKDLSVELDRLSEESVNNDISSWTKGRSGEALSLLKKRFSHRPVQEKFVCLNCGFETHADEQAALNIARSWLFLRSQEYKKYQTNKTTGNTDKRAFVETWQSFYRKKLKEVWKPAV

SEQ ID NO: 41559 - protein, 980 aa, synthetic construct
  REGION 1..980: note = engineered CasX variant
QEIKGRINKIRRRLVKDSNTKKAGKTGPMKTLLVRVMTPDLRERLENLRKKPENIPQPISNTSRANLNKLLTDYTEMKKAILHVYWEEFQKDPVGLMSRVAQPASKKIDQNKLKPEMDEKGNLTTAGFACSQCGQPLFVYKLEQVSEKGKAYTNYFGRCNVAEHEKLILLAQLKPEKDSDEAVTYSLGKFGQRALDFYSIHVTKESTHPVKPLAQIAGNRYASVPVGKALSDACMGTIASFLSKYQDIIIEHQKVVKGNQKRLESLRELAGKENLEYPSVTLPPQPHTKEGVDAYNEVIARVRMWVNLNLWQKLKLSRDDAKPLLRLKGFPSFPLVERQANEVDWWDMVCNVKKLINEKKEDGKVFWQNLAGYKRQEALRPYLSSEEDRKKGKKFARYQLGDLLLHLEKKHGEDWGKVYDEAWERIDKKVEGLSKHIKLEEERRSEDAQSKAALTDWLRAKASFVIEGLKEADDKDEFCRCELKLQKWYGDLRGKPFAIEAENSILDISGFSKQYNCAFIWQKDGVKKLNLYLIINYFKGGKLRFKKIKPEAFEANRFYTVINKKSGEIVPMEVNFNFDDPNLIILPLAFGKRQGREFIWNDLLSLETGSLKLANGRVIEKTLYNRRTRQDEPALFVALTFERREVLDSSNIKPMNLIGVDRGENIPAVIALTDPEGCPLSRFKDSLGNPTHILRIGESYKEKQRTIQAKKEVEQRRAGGYSRKYASKAKNLADDMVRNTARDLLYYAVTQDAMLIFENLSRGFGRQGKRTFMAERQYTRMEDWLTAKLAYEGLPSKTYLSKTLAQYTSKTCSNCGFTITSADYDRVLEKLKKTATGWMTTINGKELKVEGQITYYNRYKRQNVVKDLSVELDRLSEESVNNDISSWTKGRSGEALSLLKKRFSHRPVQEKFVCLNCGFETHADEQAALNIARSWLFLRSQEYKKYQTNKTTGNTDKRAFVETWQSFYRKKLKEVWKPAV

SEQ ID NO: 41560 - protein, 980 aa, synthetic construct
  REGION 1..980: note = engineered CasX variant
QEIKGRINKIRRRLVKDSNTKKAGKTGPMKTLLVRVMTPDLRERLENLRKKPENIPQPISNTSRANLNKLLTDYTEMKKAILHVYWEEFQKDPVGLMSRVAQPASKKIDQNKLKPEMDEKGNLTTAGFACSQCGQPLFVYKLEQVSEKGKAYTNYFGRCNVAEHEKLIKLAQLKPEKDSDEAVTYSLGKFGQRALDFYSIHVTKESTHPVKPLAQIAGNRYASGPVGKALSDACMGTIASFLSKYQDIIIEHQKVVKGNQKRLESLRELAGKENLEYPSVTLPPQPHTKEGVDAYNEVIARVRMWVNLNLWQKLKLSRDDAKPLLRLKGFPSFPLVERQANEVDWWDMVCNVKKLINEKKEDGKVFWQNLAGYKRQEALRPYLSSEEDRKKGKKFARYQLGDLLLHLEKKHGEDWGKVYDEAWERIDKKVEGLSKHIKLEEERRSEDAQSKAALTDWLRAKASFVIEGLKEADDKDEFCRCELKLQKWYGDLRGKPFAIEAENSILDISGFSKQYNCAFIWQKDGVKKLNLYLIINYFKGGKLRFKKIKPEAFEANRFYTVINKKSGEIVPMEVNFNFDDPNLIILPLAFGKRQGREFIWNDLLSLETGSLKLANGRVIEKTLYNRRTRQDEPALFVALTFERREVLDSSNIKPMNLIGVDRGENIPAVIALTDPEGCPLSRFKDSLGNPTHILRIGESYKEKQRTIQAKKEVEQRRAGGYSRKYASKAKNLADDMVRNTARDLLYYAVTQDAMLIFENLSRGFGRQGKRTFMAERQYTRMEDWLTAKLAYEGLPSKTYLSKTLAQYTSKTCSNCGFTITSADYDRVLEKLKKTATGWMTTINGKELKVEGQITYYNRYKRQNVVKDLSVELDRLSEESVNNDISSWTKGRSGEALSLLKKRFSHRPVQEKFVCLNCGFETHADEQAALNIARSWLFLRSQEYKKYQTNKTTGNTDKRAFVETWQSFYRKKLKEVWKPAV

SEQ ID NO: 41561 - protein, 979 aa, synthetic construct
  REGION 1..979: note = engineered CasX variant
QEIKGRINKIRRRLVKDSNTKKAGKTGPMKTLLVRVMTPDLRERLENLRKKPENIPQPISNTSRANLNKLLTDYTEMKKAILHVYWEEFQKDPVGLMSRVAQPASKKIDQNKLKPEMDEKGNLTTAGFACSQCGQPLFVYKLEQVSEKGKAYTNYFGRCNVAEHEKLILLAQLKPEKDSDEAVTYSLGKFGQRALDFYSIHVTKESTHPVKPLAQIAGNRYASPVGKALSDACMGTIASFLSKYQDIIIEHQKVVKGNQKRLESLRELAGKENLEYPSVTLPPQPHTKEGVDAYNEVIARVRMWVNLNLWQKLKLSRDDAKPLLRLKGFPSFPLVERQANEVDWWDMVCNVKKLINEKKEDGKVFWQNLAGYKRQEALRPYLSSEEDRKKGKKFARYQLGDLLLHLEKKHGEDWGKVYDEAWERIDKKVEGLSKHIKLEEERRSEDAQSKAALTDWLRAKASFVIEGLKEADDKDEFCRCELKLQKWYGDLRGKPFAIEAENSILDISGFSKQYNCAFIWQKDGVKKLNLYLIINYFKGGKLRFKKIKPEAFEANRFYTVINKKSGEIVPMEVNFNFDDPNLIILPLAFGKRQGREFIWNDLLSLETGSLKLANGRVIEKTLYNRRTRQDEPALFVALTFERREVLDSSNIKPMNLIGVDRGENIPAVIALTDPEGCPLSRFKDSLGNPTHILRIGESYKEKQRTIQAKKEVEQRRAGGYSRKYASKAKNLADDMVRNTARDLLYYAVTQDAMLIFENLSRGFGRQGKRTFMAERQYTRMEDWLTAKLAYEGLPSKTYLSKTLAQYTSKTCSNCGFTITSADYDRVLEKLKKTATGWMTTINGKELKVEGQITYYNRYKRQNVVKDLSVELDRLSEESVNNDISSWTKGRSGEALSLLKKRFSHRPVQEKFVCLNCGFETHADEQAALNIARSWLFLRSQEYKKYQTNKTTGNTDKRAFVETWQSFYRKKLKEVWKPAV

SEQ ID NO: 41562 - protein, 980 aa, synthetic construct
  REGION 1..980: note = engineered CasX variant
QEIKGRINKIRRRLVKDSNTKKAGKTGPMKTLLVRVMTPDLRERLENLRKKPENIPQPISNTSRANLNKLLTDYTEMKKAILHVYWEEFQKDPVGLMSRVAQPASKKIDQNKLKPEMDEKGNLTTAGFACSQCGQPLFVYKLEQVSEKGKAYTNYFGRCNVAEHEKLILLAQLKPEKDSDEAVTYSLGKFGQRALDFYSIHVTKESTHPVKPLAQIAGNRYASYPVGKALSDACMGTIASFLSKYQDIIIEHQKVVKGNQKRLESLRELAGKENLEYPSVTLPPQPHTKEGVDAYNEVIARVRMWVNLNLWQKLKLSRDDAKPLLRLKGFPSFPLVERQANEVDWWDMVCNVKKLINEKKEDGKVFWQNLAGYKRQEALRPYLSSEEDRKKGKKFARYQLGDLLLHLEKKHGEDWGKVYDEAWERIDKKVEGLSKHIKLEEERRSEDAQSKAALTDWLRAKASFVIEGLKEADKDEFCRCELKLQKWYGDLRGKPFAIEAENSILDISGFSKQYNCAFIWQKDGVKKLNLYLIINYFKGGKLRFKKIKPEAFEANRFYTVINKKSGEIVPMEVNFNFDDPNLIILPLAFGKRQGREFIWNDLLSLETGSLKLANGRVIEKTLYNRRTRQDEPALFVALTFERREVLDSSNIKPMNLIGVDRGENIPAVIALTDPEGCPLSRFKDSLGNPTHILRIGESYKEKQRTIQAKKEVEQRRAGGYSRKYASKAKNLADDMVRNTARDLLYYAVTQDAMLIFENLSRGFGRQGKRTFMAERQYTRMEDWLTAKLAYEGLPSKTYLSKTLAQYTSKTCSNCGFTITSADYDRVLEKLKKTATGWMTTINGKELKVEGQITYYNRYKRQNVVKDLSVELDRLSEESVNNDISSWTKGRSGNEALSLLKKRFSHRPVQEKFVCLNCGFETHADEQAALNIARSWLFLRSQEYKKYQTNKTTGNTDKRAFVETWQSFYRKKLKEVWKPAV

SEQ ID NO: 41563 - protein, 980 aa, synthetic construct
  REGION 1..980: note = engineered CasX variant
QEIKGRINKIRRRLVKDSNTKKAGKTGPMKTLLVRVMTPDLRERLENLRKKPENIPQPISNTSRANLNKLLTDYTEMKKAILHVYWEEFQKDPVGLMSRVAQPASKKIDQNKLKPEMDEKGNLTTAGFACSQCGQPLFVYKLEQVSEKGKAYTNYFGRCNVAEHEKLILLAQLKPEKDSDEAVTYSLGKFGQRALDFYSIHVTKESTHPVKPLAQIAGNRYASHPVGKALSDACMGTIASFLSKYQDIIIEHQKVVKGNQKRLESLRELAGKENLEYPSVTLPPQPHTKEGVDAYNEVIARVRMWVNLNLWQKLKLSRDDAKPLLRLKGFPSFPLVERQANEVDWWDMVCNVKKLINEKKEDGKVFWQNLAGYKRQEALRPYLSSEEDRKKGKKFARYQLGDLLLHLEKKHGEDWGKVYDEAWERIDKKVEGLSKHIKLEEERRSEDAQSKAALTDWLRAKASFVIEGLKEADKDEFCRCELKLQKWYGDLRGKPFAIEAENSILDISGFSKQYNCAFIWQKDGVKKLNLYLIINYFKGGKLRFKKIKPEAFEANRFYTVINKKSGEIVPMEVNFNFDDPNLIILPLAFGKRQGREFIWNDLLSLETGSLKLANGRVIEKTLYNRRTRQDEPALFVALTFERREVLDSSNIKPMNLIGVDRGENIPAVIALTDPEGCPLSRFKDSLGNPTHILRIGESYKEKQRTIQAKKEVEQRRAGGYSRKYASKAKNLADDMVRNTARDLLYYAVTQDAMLIFENLSRGFGRQGKRTFMAERQYTRMEDWLTAKLAYEGLPSKTYLSKTLAQYTSKTCSNCGFTITSADYDRVLEKLKKTATGWMTTINGKELKVEGQITYYNRYKRQNVVKDLSVELDRLSEESVNNDISSWTKGRSGNEALSLLKKRFSHRPVQEKFVCLNCGFETHADEQAALNIARSWLFLRSQEYKKYQTNKTTGNTDKRAFVETWQSFYRKKLKEVWKPAV

SEQ ID NO: 41564 - protein, 980 aa, synthetic construct
  REGION 1..980: note = engineered CasX variant
QEIKGRINKIRRRLVKDSNTKKAGKTGPMKTLLVRVMTPDLRERLENLRKKPENIPQPISNTSRANLNKLLTDYTEMKKAILHVYWEEFQKDPVGLMSRVAQPASKKIDQNKLKPEMDEKGNLTTAGFACSQCGQPLFVYKLEQVSEKGKAYTNYFGRCNVAEHEKLILLAQLKPEKDSDEAVTYSLGKFGQRALDFYSIHVTKESTHPVKPLAQIAGNRYASSPVGKALSDACMGTIASFLSKYQDIIIEHQKVVKGNQKRLESLRELAGKENLEYPSVTLPPQPHTKEGVDAYNEVIARVRMWVNLNLWQKLKLSRDDAKPLLRLKGFPSFPLVERQANEVDWWDMVCNVKKLINEKKEDGKVFWQNLAGYKRQEALRPYLSSEEDRKKGKKFARYQLGDLLLHLEKKHGEDWGKVYDEAWERIDKKVEGLSKHIKLEEERRSEDAQSKAALTDWLRAKASFVIEGLKEADKDEFCRCELKLQKWYGDLRGKPFAIEAENSILDISGFSKQYNCAFIWQKDGVKKLNLYLIINYFKGGKLRFKKIKPEAFEANRFYTVINKKSGEIVPMEVNFNFDDPNLIILPLAFGKRQGREFIWNDLLSLETGSLKLANGRVIEKTLYNRRTRQDEPALFVALTFERREVLDSSNIKPMNLIGVDRGENIPAVIALTDPEGCPLSRFKDSLGNPTHILRIGESYKEKQRTIQAKKEVEQRRAGGYSRKYASKAKNLADDMVRNTARDLLYYAVTQDAMLIFENLSRGFGRQGKRTFMAERQYTRMEDWLTAKLAYEGLPSKTYLSKTLAQYTSKTCSNCGFTITSADYDRVLEKLKKTATGWMTTINGKELKVEGQITYYNRYKRQNVVKDLSVELDRLSEESVNNDISSWTKGRSGNEALSLLKKRFSHRPVQEKFVCLNCGFETHADEQAALNIARSWLFLRSQEYKKYQTNKTTGNTDKRAFVETWQSFYRKKLKEVWKPAV

SEQ ID NO: 41565 - protein, 980 aa, synthetic construct
  REGION 1..980: note = engineered CasX variant
QEIKGRINKIRRRLVKDSNTKKAGKTGPMKTLLVRVMTPDLRERLENLRKKPENIPQPISNTSRANLNKLLTDYTEMKKAILHVYWEEFQKDPVGLMSRVAQPASKKIDQNKLKPEMDEKGNLTTAGFACSQCGQPLFVYKLEQVSEKGKAYTNYFGRCNVAEHEKLILLAQLKPEKDSDEAVTYSLGKFGQRALDFYSIHVTKESTHPVKPLAQIAGNRYASTPVGKALSDACMGTIASFLSKYQDIIIEHQKVVKGNQKRLESLRELAGKENLEYPSVTLPPQPHTKEGVDAYNEVIARVRMWVNLNLWQKLKLSRDDAKPLLRLKGFPSFPLVERQANEVDWWDMVCNVKKLINEKKEDGKVFWQNLAGYKRQEALRPYLSSEEDRKKGKKFARYQLGDLLLHLEKKHGEDWGKVYDEAWERIDKKVEGLSKHIKLEEERRSEDAQSKAALTDWLRAKASFVIEGLKEADKDEFCRCELKLQKWYGDLRGKPFAIEAENSILDISGFSKQYNCAFIWQKDGVKKLNLYLIINYFKGGKLRFKKIKPEAFEANRFYTVINKKSGEIVPMEVNFNFDDPNLIILPLAFGKRQGREFIWNDLLSLETGSLKLANGRVIEKTLYNRRTRQDEPALFVALTFERREVLDSSNIKPMNLIGVDRGENIPAVIALTDPEGCPLSRFKDSLGNPTHILRIGESYKEKQRTIQAKKEVEQRRAGGYSRKYASKAKNLADDMVRNTARDLLYYAVTQDAMLIFENLSRGFGRQGKRTFMAERQYTRMEDWLTAKLAYEGLPSKTYLSKTLAQYTSKTCSNCGFTITSADYDRVLEKLKKTATGWMTTINGKELKVEGQITYYNRYKRQNVVKDLSVELDRLSEESVNNDISSWTKGRSGNEALSLLKKRFSHRPVQEKFVCLNCGFETHADEQAALNIARSWLFLRSQEYKKYQTNKTTGNTDKRAFVETWQSFYRKKLKEVWKPAV

SEQ ID NO: 41566 - protein, 980 aa, synthetic construct
  REGION 1..980: note = engineered CasX variant
QEIKGRINKIRRRLVKDSNTKKAGKTGPMKTLLVRVMTPDLRERLENLRKKPENIPQPISNTSRANLNKLLTDYTEMKKAILHVYWEEFQKDPVGLMSRVAQPASKKIDQNKLKPEMDEKGNLTTAGFACSQCGQPLFVYKLEQVSEKGKAYTNYFGRCNVAEHEKLILLAQLKPEKDSDEAVTYSLGKFGQRALDFYSIHVTKESTHPVKPLAQIAGNRYASAPVGKALSDACMGTIASFLSKYQDIIIEHQKVVKGNQKRLESLRELAGKENLEYPSVTLPPQPHTKEGVDAYNEVIARVRMWVNLNLWQKLKLSRDDAKPLLRLKGFPSFPLVERQANEVDWWDMVCNVKKLINEKKEDGKVFWQNLAGYKRQEALRPYLSSEEDRKKGKKFARYQLGDLLLHLEKKHGEDWGKVYDEAWERIDKKVEGLSKHIKLEEERRSEDAQSKAALTDWLRAKASFVIEGLKEADKDEFCRCELKLQKWYGDLRGKPFAIEAENSILDISGFSKQYNCAFIWQKDGVKKLNLYLIINYFKGGKLRFKKIKPEAFEANRFYTVINKKSGEIVPMEVNFNFDDPNLIILPLAFGKRQGREFIWNDLLSLETGSLKLANGRVIEKTLYNRRTRQDEPALFVALTFERREVLDSSNIKPMNLIGVDRGENIPAVIALTDPEGCPLSRFKDSLGNPTHILRIGESYKEKQRTIQAKKEVEQRRAGGYSRKYASKAKNLADDMVRNTARDLLYYAVTQDAMLIFENLSRGFGRQGKRTFMAERQYTRMEDWLTAKLAYEGLPSKTYLSKTLAQYTSKTCSNCGFTITSADYDRVLEKLKKTATGWMTTINGKELKVEGQITYYNRYKRQNVVKDLSVELDRLSEESVNNDISSWTKGRSGNEALSLLKKRFSHRPVQEKFVCLNCGFETHADEQAALNIARSWLFLRSQEYKKYQTNKTTGNTDKRAFVETWQSFYRKKLKEVWKPAV

SEQ ID NO: 41567 - protein, 980 aa, synthetic construct
  REGION 1..980: note = engineered CasX variant
QEIKGRINKIRRRLVKDSNTKKAGKTGPMKTLLVRVMTPDLRERLENLRKKPENIPQPISNTSRANLNKLLTDYTEMKKAILHVYWEEFQKDPVGLMSRVAQPASKKIDQNKLKPEMDEKGNLTTAGFACSQCGQPLFVYKLEQVSEKGKAYTNYFGRCNVAEHEKLILLAQLKPEKDSDEAVTYSLGKFGQRALDFYSIHVTKESTHPVKPLAQIAGNRYASVPVGKALSDACMGTIASFLSKYQDIIIEHQKVVKGNQKRLESLRELAGKENLEYPSVTLPPQPHTKEGVDAYNEVIARVRMWVNLNLWQKLKLSRDDAKPLLRLKGFPSFPLVERQANEVDWWDMVCNVKKLINEKKEDGKVFWQNLAGYKRQEALRPYLSSEEDRKKGKKFARYQLGDLLLHLEKKHGEDWGKVYDEAWERIDKKVEGLSKHIKLEEERRSEDAQSKAALTDWLRAKASFVIEGLKEADKDEFCRCELKLQKWYGDLRGKPFAIEAENSILDISGFSKQYNCAFIWQKDGVKKLNLYLIINYFKGGKLRFKKIKPEAFEANRFYTVINKKSGEIVPMEVNFNFDDPNLIILPLAFGKRQGREFIWNDLLSLETGSLKLANGRVIEKTLYNRRTRQDEPALFVALTFERREVLDSSNIKPMNLIGVDRGENIPAVIALTDPEGCPLSRFKDSLGNPTHILRIGESYKEKQRTIQAKKEVEQRRAGGYSRKYASKAKNLADDMVRNTARDLLYYAVTQDAMLIFENLSRGFGRQGKRTFMAERQYTRMEDWLTAKLAYEGLPSKTYLSKTLAQYTSKTCSNCGFTITSADYDRVLEKLKKTATGWMTTINGKELKVEGQITYYNRYKRQNVVKDLSVELDRLSEESVNNDISSWTKGRSGNEALSLLKKRFSHRPVQEKFVCLNCGFETHADEQAALNIARSWLFLRSQEYKKYQTNKTTGNTDKRAFVETWQSFYRKKLKEVWKPAV

SEQ ID NO: 41568 - protein, 980 aa, synthetic construct
  REGION 1..980: note = engineered CasX variant
QEIKGRINKIRRRLVKDSNTKKAGKTGPMKTLLVRVMTPDLRERLENLRKKPENIPQPISNTSRANLNKLLTDYTEMKKAILHVYWEEFQKDPVGLMSRVAQPASKKIDQNKLKPEMDEKGNLTTAGFACSQCGQPLFVYKLEQVSEKGKAYTNYFGRCNVAEHEKLIKLAQLKPEKDSDEAVTYSLGKFGQRALDFYSIHVTKESTHPVKPLAQIAGNRYASGPVGKALSDACMGTIASFLSKYQDIIIEHQKVVKGNQKRLESLRELAGKENLEYPSVTLPPQPHTKEGVDAYNEVIARVRMWVNLNLWQKLKLSRDDAKPLLRLKGFPSFPLVERQANEVDWWDMVCNVKKLINEKKEDGKVFWQNLAGYKRQEALRPYLSSEEDRKKGKKFARYQLGDLLLHLEKKHGEDWGKVYDEAWERIDKKVEGLSKHIKLEEERRSEDAQSKAALTDWLRAKASFVIEGLKEADKDEFCRCELKLQKWYGDLRGKPFAIEAENSILDISGFSKQYNCAFIWQKDGVKKLNLYLIINYFKGGKLRFKKIKPEAFEANRFYTVINKKSGEIVPMEVNFNFDDPNLIILPLAFGKRQGREFIWNDLLSLETGSLKLANGRVIEKTLYNRRTRQDEPALFVALTFERREVLDSSNIKPMNLIGVDRGENIPAVIALTDPEGCPLSRFKDSLGNPTHILRIGESYKEKQRTIQAKKEVEQRRAGGYSRKYASKAKNLADDMVRNTARDLLYYAVTQDAMLIFENLSRGFGRQGKRTFMAERQYTRMEDWLTAKLAYEGLPSKTYLSKTLAQYTSKTCSNCGFTITSADYDRVLEKLKKTATGWMTTINGKELKVEGQITYYNRYKRQNVVKDLSVELDRLSEESVNNDISSWTKGRSGNEALSLLKKRFSHRPVQEKFVCLNCGFETHADEQAALNIARSWLFLRSQEYKKYQTNKTTGNTDKRAFVETWQSFYRKKLKEVWKPAV

SEQ ID NO: 41569 - protein, 979 aa, synthetic construct
  REGION 1..979: note = engineered CasX variant
QEIKGRINKIRRRLVKDSNTKKAGKTGPMKTLLVRVMTPDLRERLENLRKKPENIPQPISNTSRANLNKLLTDYTEMKKAILHVYWEEFQKDPVGLMSRVAQPASKKIDQNKLKPEMDEKGNLTTAGFACSQCGQPLFVYKLEQVSEKGKAYTNYFGRCNVAEHEKLILLAQLKPEKDSDEAVTYSLGKFGQRALDFYSIHVTKESTHPVKPLAQIAGNRYASPVGKALSDACMGTIASFLSKYQDIIIEHQKVVKGNQKRLESLRELAGKENLEYPSVTLPPQPHTKEGVDAYNEVIARVRMWVNLNLWQKLKLSRDDAKPLLRLKGFPSFPLVERQANEVDWWDMVCNVKKLINEKKEDGKVFWQNLAGYKRQEALRPYLSSEEDRKKGKKFARYQLGDLLLHLEKKHGEDWGKVYDEAWERIDKKVEGLSKHIKLEEERRSEDAQSKAALTDWLRAKASFVIEGLKEADKDEFCRCELKLQKWYGDLRGKPFAIEAENSILDISGFSKQYNCAFIWQKDGVKKLNLYLIINYFKGGKLRFKKIKPEAFEANRFYTVINKKSGEIVPMEVNFNFDDPNLIILPLAFGKRQGREFIWNDLLSLETGSLKLANGRVIEKTLYNRRTRQDEPALFVALTFERREVLDSSNIKPMNLIGVDRGENIPAVIALTDPEGCPLSRFKDSLGNPTHILRIGESYKEKQRTIQAKKEVEQRRAGGYSRKYASKAKNLADDMVRNTARDLLYYAVTQDAMLIFENLSRGFGRQGKRTFMAERQYTRMEDWLTAKLAYEGLPSKTYLSKTLAQYTSKTCSNCGFTITSADYDRVLEKLKKTATGWMTTINGKELKVEGQITYYNRYKRQNVVKDLSVELDRLSEESVNNDISSWTKGRSGNEALSLLKKRFSHRPVQEKFVCLNCGFETHADEQAALNIARSWLFLRSQEYKKYQTNKTTGNTDKRAFVETWQSFYRKKLKEVWKPAV

SEQ ID NO: 41570 - protein, 979 aa, synthetic construct
  REGION 1..979: note = engineered CasX variant
QEIKGRINKIRRRLVKDSNTKKAGKTGPMKTLLVRVMTPDLRERLENLRKKPENIPQPISNTSRANLNKLLTDYTEMKKAILHVYWEEFQKDPVGLMSRVAQPASKKIDQNKLKPEMDEKGNLTTAGFACSQCGQPLFVYKLEQVSEKGKAYTNYFGRCNVAEHEKLILLAQLKPEKDSDEAVTYSLGKFGQRALDFYSIHVTKESTHPVKPLAQIAGNRYASYPVGKALSDACMGTIASFLSKYQDIIIEHQKVVKGNQKRLESLRELAGKENLEYPSVTLPPQPHTKEGVDAYNEVIARVRMWVNLNLWQKLKLSRDDAKPLLRLKGFPSFPLVERQANEVDWWDMVCNVKKLINEKKEDGKVFWQNLAGYKRQEALRPYLSSEEDRQKGKKFARYQLGDLLLHLEKKHGEDWGKVYDEAWERIDKKVEGLSKHIKLEEERRSEDAQSKAALTDWLRAKASFVIEGLKEADKDEFCRCELKLQKWYGDLRGKPFAIEAENSILDISGFSKQYNCAFIWQKDGVKKLNLYLIINYFKGGKLRFKKIKPEAFEANRFYTVINKKSGEIVPMEVNFNFDDPNLIILPLAFGKRQGREFIWNDLLSLETGSLKLANGRVIEKTLYNRRTRQDEPALFVALTFERREVLDSSNIKPMNLIGVDRGENIPAVIALTDPEGCPLSRFKDSLGNPTHILRIGESYKEKQRTIQAKKEVEQRRAGGYSRKYASKAKNLADDMVRNTARDLLYYAVTQDAMLIFENLSRGFGRQGKRTFMAERQYTRMEDWLTAKLAYEGLPSKTYLSKTLAQYTSKTCSNCGFTITSADYDRVLEKLKKTATGWMTTINGKELKVEGQITYYNRYKRQNVVKDLSVELDRLSEESVNNDISSWTKGRSGEALSLLKKRFSHRPVQEKFVCLNCGFETHADEQAALNIARSWLFLRSQEYKKYQTNKTTGNTDKRAFVETWQSFYRKKLKEVWKPAV

SEQ ID NO: 41571 - protein, 979 aa, synthetic construct
  REGION 1..979: note = engineered CasX variant
QEIKGRINKIRRRLVKDSNTKKAGKTGPMKTLLVRVMTPDLRERLENLRKKPENIPQPISNTSRANLNKLLTDYTEMKKAILHVYWEEFQKDPVGLMSRVAQPASKKIDQNKLKPEMDEKGNLTTAGFACSQCGQPLFVYKLEQVSEKGKAYTNYFGRCNVAEHEKLILLAQLKPEKDSDEAVTYSLGKFGQRALDFYSIHVTKESTHPVKPLAQIAGNRYASHPVGKALSDACMGTIASFLSKYQDIIIEHQKVVKGNQKRLESLRELAGKENLEYPSVTLPPQPHTKEGVDAYNEVIARVRMWVNLNLWQKLKLSRDDAKPLLRLKGFPSFPLVERQANEVDWWDMVCNVKKLINEKKEDGKVFWQNLAGYKRQEALRPYLSSEEDRQKGKKFARYQLGDLLLHLEKKHGEDWGKVYDEAWERIDKKVEGLSKHIKLEEERRSEDAQSKAALTDWLRAKASFVIEGLKEADKDEFCRCELKLQKWYGDLRGKPFAIEAENSILDISGFSKQYNCAFIWQKDGVKKLNLYLIINYFKGGKLRFKKIKPEAFEANRFYTVINKKSGEIVPMEVNFNFDDPNLIILPLAFGKRQGREFIWNDLLSLETGSLKLANGRVIEKTLYNRRTRQDEPALFVALTFERREVLDSSNIKPMNLIGVDRGENIPAVIALTDPEGCPLSRFKDSLGNPTHILRIGESYKEKQRTIQAKKEVEQRRAGGYSRKYASKAKNLADDMVRNTARDLLYYAVTQDAMLIFENLSRGFGRQGKRTFMAERQYTRMEDWLTAKLAYEGLPSKTYLSKTLAQYTSKTCSNCGFTITSADYDRVLEKLKKTATGWMTTINGKELKVEGQITYYNRYKRQNVVKDLSVELDRLSEESVNNDISSWTKGRSGEALSLLKKRFSHRPVQEKFVCLNCGFETHADEQAALNIARSWLFLRSQEYKKYQTNKTTGNTDKRAFVETWQSFYRKKLKEVWKPAV

SEQ ID NO: 41572 - protein, 979 aa, synthetic construct
  REGION 1..979: note = engineered CasX variant
QEIKGRINKIRRRLVKDSNTKKAGKTGPMKTLLVRVMTPDLRERLENLRKKPENIPQPISNTSRANLNKLLTDYTEMKKAILHVYWEEFQKDPVGLMSRVAQPASKKIDQNKLKPEMDEKGNLTTAGFACSQCGQPLFVYKLEQVSEKGKAYTNYFGRCNVAEHEKLILLAQLKPEKDSDEAVTYSLGKFGQRALDFYSIHVTKESTHPVKPLAQIAGNRYASSPVGKALSDACMGTIASFLSKYQDIIIEHQKVVKGNQKRLESLRELAGKENLEYPSVTLPPQPHTKEGVDAYNEVIARVRMWVNLNLWQKLKLSRDDAKPLLRLKGFPSFPLVERQANEVDWWDMVCNVKKLINEKKEDGKVFWQNLAGYKRQEALRPYLSSEEDRQKGKKFARYQLGDLLLHLEKKHGEDWGKVYDEAWERIDKKVEGLSKHIKLEEERRSEDAQSKAALTDWLRAKASFVIEGLKEADKDEFCRCELKLQKWYGDLRGKPFAIEAENSILDISGFSKQYNCAFIWQKDGVKKLNLYLIINYFKGGKLRFKKIKPEAFEANRFYTVINKKSGEIVPMEVNFNFDDPNLIILPLAFGKRQGREFIWNDLLSLETGSLKLANGRVIEKTLYNRRTRQDEPALFVALTFERREVLDSSNIKPMNLIGVDRGENIPAVIALTDPEGCPLSRFKDSLGNPTHILRIGESYKEKQRTIQAKKEVEQRRAGGYSRKYASKAKNLADDMVRNTARDLLYYAVTQDAMLIFENLSRGFGRQGKRTFMAERQYTRMEDWLTAKLAYEGLPSKTYLSKTLAQYTSKTCSNCGFTITSADYDRVLEKLKKTATGWMTTINGKELKVEGQITYYNRYKRQNVVKDLSVELDRLSEESVNNDISSWTKGRSGEALSLLKKRFSHRPVQEKFVCLNCGFETHADEQAALNIARSWLFLRSQEYKKYQTNKTTGNTDKRAFVETWQSFYRKKLKEVWKPAV

SEQ ID NO: 41573 - protein, 979 aa, synthetic construct
  REGION 1..979: note = engineered CasX variant
QEIKGRINKIRRRLVKDSNTKKAGKTGPMKTLLVRVMTPDLRERLENLRKKPENIPQPISNTSRANLNKLLTDYTEMKKAILHVYWEEFQKDPVGLMSRVAQPASKKIDQNKLKPEMDEKGNLTTAGFACSQCGQPLFVYKLEQVSEKGKAYTNYFGRCNVAEHEKLILLAQLKPEKDSDEAVTYSLGKFGQRALDFYSIHVTKESTHPVKPLAQIAGNRYASTPVGKALSDACMGTIASFLSKYQDIIIEHQKVVKGNQKRLESLRELAGKENLEYPSVTLPPQPHTKEGVDAYNEVIARVRMWVNLNLWQKLKLSRDDAKPLLRLKGFPSFPLVERQANEVDWWDMVCNVKKLINEKKEDGKVFWQNLAGYKRQEALRPYLSSEEDRQKGKKFARYQLGDLLLHLEKKHGEDWGKVYDEAWERIDKKVEGLSKHIKLEEERRSEDAQSKAALTDWLRAKASFVIEGLKEADKDEFCRCELKLQKWYGDLRGKPFAIEAENSILDISGFSKQYNCAFIWQKDGVKKLNLYLIINYFKGGKLRFKKIKPEAFEANRFYTVINKKSGEIVPMEVNFNFDDPNLIILPLAFGKRQGREFIWNDLLSLETGSLKLANGRVIEKTLYNRRTRQDEPALFVALTFERREVLDSSNIKPMNLIGVDRGENIPAVIALTDPEGCPLSRFKDSLGNPTHILRIGESYKEKQRTIQAKKEVEQRRAGGYSRKYASKAKNLADDMVRNTARDLLYYAVTQDAMLIFENLSRGFGRQGKRTFMAERQYTRMEDWLTAKLAYEGLPSKTYLSKTLAQYTSKTCSNCGFTITSADYDRVLEKLKKTATGWMTTINGKELKVEGQITYYNRYKRQNVVKDLSVELDRLSEESVNNDISSWTKGRSGEALSLLKKRFSHRPVQEKFVCLNCGFETHADEQAALNIARSWLFLRSQEYKKYQTNKTTGNTDKRAFVETWQSFYRKKLKEVWKPAV

SEQ ID NO: 41574 - protein, 979 aa, synthetic construct
  REGION 1..979: note = engineered CasX variant
QEIKGRINKIRRRLVKDSNTKKAGKTGPMKTLLVRVMTPDLRERLENLRKKPENIPQPISNTSRANLNKLLTDYTEMKKAILHVYWEEFQKDPVGLMSRVAQPASKKIDQNKLKPEMDEKGNLTTAGFACSQCGQPLFVYKLEQVSEKGKAYTNYFGRCNVAEHEKLILLAQLKPEKDSDEAVTYSLGKFGQRALDFYSIHVTKESTHPVKPLAQIAGNRYASAPVGKALSDACMGTIASFLSKYQDIIIEHQKVVKGNQKRLESLRELAGKENLEYPSVTLPPQPHTKEGVDAYNEVIARVRMWVNLNLWQKLKLSRDDAKPLLRLKGFPSFPLVERQANEVDWWDMVCNVKKLINEKKEDGKVFWQNLAGYKRQEALRPYLSSEEDRQKGKKFARYQLGDLLLHLEKKHGEDWGKVYDEAWERIDKKVEGLSKHIKLEEERRSEDAQSKAALTDWLRAKASFVIEGLKEADKDEFCRCELKLQKWYGDLRGKPFAIEAENSILDISGFSKQYNCAFIWQKDGVKKLNLYLIINYFKGGKLRFKKIKPEAFEANRFYTVINKKSGEIVPMEVNFNFDDPNLIILPLAFGKRQGREFIWNDLLSLETGSLKLANGRVIEKTLYNRRTRQDEPALFVALTFERREVLDSSNIKPMNLIGVDRGENIPAVIALTDPEGCPLSRFKDSLGNPTHILRIGESYKEKQRTIQAKKEVEQRRAGGYSRKYASKAKNLADDMVRNTARDLLYYAVTQDAMLIFENLSRGFGRQGKRTFMAERQYTRMEDWLTAKLAYEGLPSKTYLSKTLAQYTSKTCSNCGFTITSADYDRVLEKLKKTATGWMTTINGKELKVEGQITYYNRYKRQNVVKDLSVELDRLSEESVNNDISSWTKGRSGEALSLLKKRFSHRPVQEKFVCLNCGFETHADEQAALNIARSWLFLRSQEYKKYQTNKTTGNTDKRAFVETWQSFYRKKLKEVWKPAV

SEQ ID NO: 41575 - protein, 979 aa, synthetic construct
  REGION 1..979: note = engineered CasX variant
QEIKGRINKIRRRLVKDSNTKKAGKTGPMKTLLVRVMTPDLRERLENLRKKPENIPQPISNTSRANLNKLLTDYTEMKKAILHVYWEEFQKDPVGLMSRVAQPASKKIDQNKLKPEMDEKGNLTTAGFACSQCGQPLFVYKLEQVSEKGKAYTNYFGRCNVAEHEKLILLAQLKPEKDSDEAVTYSLGKFGQRALDFYSIHVTKESTHPVKPLAQIAGNRYASVPVGKALSDACMGTIASFLSKYQDIIIEHQKVVKGNQKRLESLRELAGKENLEYPSVTLPPQPHTKEGVDAYNEVIARVRMWVNLNLWQKLKLSRDDAKPLLRLKGFPSFPLVERQANEVDWWDMVCNVKKLINEKKEDGKVFWQNLAGYKRQEALRPYLSSEEDRQKGKKFARYQLGDLLLHLEKKHGEDWGKVYDEAWERIDKKVEGLSKHIKLEEERRSEDAQSKAALTDWLRAKASFVIEGLKEADKDEFCRCELKLQKWYGDLRGKPFAIEAENSILDISGFSKQYNCAFIWQKDGVKKLNLYLIINYFKGGKLRFKKIKPEAFEANRFYTVINKKSGEIVPMEVNFNFDDPNLIILPLAFGKRQGREFIWNDLLSLETGSLKLANGRVIEKTLYNRRTRQDEPALFVALTFERREVLDSSNIKPMNLIGVDRGENIPAVIALTDPEGCPLSRFKDSLGNPTHILRIGESYKEKQRTIQAKKEVEQRRAGGYSRKYASKAKNLADDMVRNTARDLLYYAVTQDAMLIFENLSRGFGRQGKRTFMAERQYTRMEDWLTAKLAYEGLPSKTYLSKTLAQYTSKTCSNCGFTITSADYDRVLEKLKKTATGWMTTINGKELKVEGQITYYNRYKRQNVVKDLSVELDRLSEESVNNDISSWTKGRSGEALSLLKKRFSHRPVQEKFVCLNCGFETHADEQAALNIARSWLFLRSQEYKKYQTNKTTGNTDKRAFVETWQSFYRKKLKEVWKPAV

SEQ ID NO: 41576 - protein, 979 aa, synthetic construct
  REGION 1..979: note = engineered CasX variant
QEIKGRINKIRRRLVKDSNTKKAGKTGPMKTLLVRVMTPDLRERLENLRKKPENIPQPISNTSRANLNKLLTDYTEMKKAILHVYWEEFQKDPVGLMSRVAQPASKKIDQNKLKPEMDEKGNLTTAGFACSQCGQPLFVYKLEQVSEKGKAYTNYFGRCNVAEHEKLIKLAQLKPEKDSDEAVTYSLGKFGQRALDFYSIHVTKESTHPVKPLAQIAGNRYASGPVGKALSDACMGTIASFLSKYQDIIIEHQKVVKGNQKRLESLRELAGKENLEYPSVTLPPQPHTKEGVDAYNEVIARVRMWVNLNLWQKLKLSRDDAKPLLRLKGFPSFPLVERQANEVDWWDMVCNVKKLINEKKEDGKVFWQNLAGYKRQEALRPYLSSEEDRQKGKKFARYQLGDLLLHLEKKHGEDWGKVYDEAWERIDKKVEGLSKHIKLEEERRSEDAQSKAALTDWLRAKASFVIEGLKEADKDEFCRCELKLQKWYGDLRGKPFAIEAENSILDISGFSKQYNCAFIWQKDGVKKLNLYLIINYFKGGKLRFKKIKPEAFEANRFYTVINKKSGEIVPMEVNFNFDDPNLIILPLAFGKRQGREFIWNDLLSLETGSLKLANGRVIEKTLYNRRTRQDEPALFVALTFERREVLDSSNIKPMNLIGVDRGENIPAVIALTDPEGCPLSRFKDSLGNPTHILRIGESYKEKQRTIQAKKEVEQRRAGGYSRKYASKAKNLADDMVRNTARDLLYYAVTQDAMLIFENLSRGFGRQGKRTFMAERQYTRMEDWLTAKLAYEGLPSKTYLSKTLAQYTSKTCSNCGFTITSADYDRVLEKLKKTATGWMTTINGKELKVEGQITYYNRYKRQNVVKDLSVELDRLSEESVNNDISSWTKGRSGEALSLLKKRFSHRPVQEKFVCLNCGFETHADEQAALNIARSWLFLRSQEYKKYQTNKTTGNTDKRAFVETWQSFYRKKLKEVWKPAV

SEQ ID NO: 41577 - protein, 978 aa, synthetic construct
  REGION 1..978: note = engineered CasX variant
QEIKGRINKIRRRLVKDSNTKKAGKTGPMKTLLVRVMTPDLRERLENLRKKPENIPQPISNTSRANLNKLLTDYTEMKKAILHVYWEEFQKDPVGLMSRVAQPASKKIDQNKLKPEMDEKGNLTTAGFACSQCGQPLFVYKLEQVSEKGKAYTNYFGRCNVAEHEKLILLAQLKPEKDSDEAVTYSLGKFGQRALDFYSIHVTKESTHPVKPLAQIAGNRYASPVGKALSDACMGTIASFLSKYQDIIIEHQKVVKGNQKRLESLRELAGKENLEYPSVTLPPQPHTKEGVDAYNEVIARVRMWVNLNLWQKLKLSRDDAKPLLRLKGFPSFPLVERQANEVDWWDMVCNVKKLINEKKEDGKVFWQNLAGYKRQEALRPYLSSEEDRQKGKKFARYQLGDLLLHLEKKHGEDWGKVYDEAWERIDKKVEGLSKHIKLEEERRSEDAQSKAALTDWLRAKASFVIEGLKEADKDEFCRCELKLQKWYGDLRGKPFAIEAENSILDISGFSKQYNCAFIWQKDGVKKLNLYLIINYFKGGKLRFKKIKPEAFEANRFYTVINKKSGEIVPMEVNFNFDDPNLIILPLAFGKRQGREFIWNDLLSLETGSLKLANGRVIEKTLYNRRTRQDEPALFVALTFERREVLDSSNIKPMNLIGVDRGENIPAVIALTDPEGCPLSRFKDSLGNPTHILRIGESYKEKQRTIQAKKEVEQRRAGGYSRKYASKAKNLADDMVRNTARDLLYYAVTQDAMLIFENLSRGFGRQGKRTFMAERQYTRMEDWLTAKLAYEGLPSKTYLSKTLAQYTSKTCSNCGFTITSADYDRVLEKLKKTATGWMTTINGKELKVEGQITYYNRYKRQNVVKDLSVELDRLSEESVNNDISSWTKGRSGEALSLLKKRFSHRPVQEKFVCLNCGFETHADEQAALNIARSWLFLRSQEYKKYQTNKTTGNTDKRAFVETWQSFYRKKLKEVWKPAV

SEQ ID NO: 41578 - protein, 979 aa, synthetic construct
  REGION 1..979: note = engineered CasX variant
QEIKGRINKIRRRLVKDSNTKKAGKTGPMKTLLVRVMTPDLRERLENLRKKPENIPQPISNTSRANLNKLLTDYTEMKKAILHVYWEEFQKDPVGLMSRVAQPASKKIDQNKLKPEMDEKGNLTTAGFACSQCGQPLFVYKLEQVSEKGKAYTNYFGRCNVAEHEKLILLAQLKPEKDSDEAVTYSLGKFGQRALDFYSIHVTKESTHPVKPLAQIAGNRYASYPVGKALSDACMGTIASFLSKYQDIIIEHQKVVKGNQKRLESLRELAGKENLEYPSVTLPPQPHTKEGVDAYNEVIARVRMWVNLNLWQKLKLSRDDAKPLLRLKGFPSFPLVERQANEVDWWDMVCNVKKLINEKKEDGKVFWQNLAGYKRQEALRPYLSSEEDRKKGKKFARYQLGDLLLHLEKKHGEDWGKVYDEAWERIDKKVEGLSKHIKLEEERRSEDAQSKAALTDWLRAKASFVIEGLKEADKDEFCRCELKLQKWYGDLRGKPFAIEAENSILDISGFSKQYNCAFIWQKDGVKKLNLYLIINYFKGGKLRFKKIKPEAFEANRFYTVINKKSGEIVPMEVNFNFDDPNLIILPLAFGKRQGREFIWNDLLSLETGSLKLANGRVIEKTLYNRRTRQDEPALFVALTFERREVLDSSNIKPMNLIGVDRGENIPAVIALTDPEGCPLSRFKDSLGNPTHILRIGESYKEKQRTIQAKKEVEQRRAGGYSRKYASKAKNLADDMVRNTARDLLYYAVTQDAMLIFENLSRGFGRQGKRTFMAERQYTRMEDWLTAKLAYEGLPSQTYLSKTLAQYTSKTCSNCGFTITSADYDRVLEKLKKTATGWMTTINGKELKVEGQITYYNRYKRQNVVKDLSVELDRLSEESVNNDISSWTKGRSGEALSLLKKRFSHRPVQEKFVCLNCGFETHADEQAALNIARSWLFLRSQEYKKYQTNKTTGNTDKRAFVETWQSFYRKKLKEVWKPAV

SEQ ID NO: 41579 - protein, 979 aa, synthetic construct
  REGION 1..979: note = engineered CasX variant
QEIKGRINKIRRRLVKDSNTKKAGKTGPMKTLLVRVMTPDLRERLENLRKKPENIPQPISNTSRANLNKLLTDYTEMKKAILHVYWEEFQKDPVGLMSRVAQPASKKIDQNKLKPEMDEKGNLTTAGFACSQCGQPLFVYKLEQVSEKGKAYTNYFGRCNVAEHEKLILLAQLKPEKDSDEAVTYSLGKFGQRALDFYSIHVTKESTHPVKPLAQIAGNRYASHPVGKALSDACMGTIASFLSKYQDIIIEHQKVVKGNQKRLESLRELAGKENLEYPSVTLPPQPHTKEGVDAYNEVIARVRMWVNLNLWQKLKLSRDDAKPLLRLKGFPSFPLVERQANEVDWWDMVCNVKKLINEKKEDGKVFWQNLAGYKRQEALRPYLSSEEDRKKGKKFARYQLGDLLLHLEKKHGEDWGKVYDEAWERIDKKVEGLSKHIKLEEERRSEDAQSKAALTDWLRAKASFVIEGLKEADKDEFCRCELKLQKWYGDLRGKPFAIEAENSILDISGFSKQYNCAFIWQKDGVKKLNLYLIINYFKGGKLRFKKIKPEAFEANRFYTVINKKSGEIVPMEVNFNFDDPNLIILPLAFGKRQGREFIWNDLLSLETGSLKLANGRVIEKTLYNRRTRQDEPALFVALTFERREVLDSSNIKPMNLIGVDRGENIPAVIALTDPEGCPLSRFKDSLGNPTHILRIGESYKEKQRTIQAKKEVEQRRAGGYSRKYASKAKNLADDMVRNTARDLLYYAVTQDAMLIFENLSRGFGRQGKRTFMAERQYTRMEDWLTAKLAYEGLPSQTYLSKTLAQYTSKTCSNCGFTITSADYDRVLEKLKKTATGWMTTINGKELKVEGQITYYNRYKRQNVVKDLSVELDRLSEESVNNDISSWTKGRSGEALSLLKKRFSHRPVQEKFVCLNCGFETHADEQAALNIARSWLFLRSQEYKKYQTNKTTGNTDKRAFVETWQSFYRKKLKEVWKPAV

SEQ ID NO: 41580 - protein, 979 aa, synthetic construct
  REGION 1..979: note = engineered CasX variant
QEIKGRINKIRRRLVKDSNTKKAGKTGPMKTLLVRVMTPDLRERLENLRKKPENIPQPISNTSRANLNKLLTDYTEMKKAILHVYWEEFQKDPVGLMSRVAQPASKKIDQNKLKPEMDEKGNLTTAGFACSQCGQPLFVYKLEQVSEKGKAYTNYFGRCNVAEHEKLILLAQLKPEKDSDEAVTYSLGKFGQRALDFYSIHVTKESTHPVKPLAQIAGNRYASSPVGKALSDACMGTIASFLSKYQDIIIEHQKVVKGNQKRLESLRELAGKENLEYPSVTLPPQPHTKEGVDAYNEVIARVRMWVNLNLWQKLKLSRDDAKPLLRLKGFPSFPLVERQANEVDWWDMVCNVKKLINEKKEDGKVFWQNLAGYKRQEALRPYLSSEEDRKKGKKFARYQLGDLLLHLEKKHGEDWGKVYDEAWERIDKKVEGLSKHIKLEEERRSEDAQSKAALTDWLRAKASFVIEGLKEADKDEFCRCELKLQKWYGDLRGKPFAIEAENSILDISGFSKQYNCAFIWQKDGVKKLNLYLIINYFKGGKLRFKKIKPEAFEANRFYTVINKKSGEIVPMEVNFNFDDPNLIILPLAFGKRQGREFIWNDLLSLETGSLKLANGRVIEKTLYNRRTRQDEPALFVALTFERREVLDSSNIKPMNLIGVDRGENIPAVIALTDPEGCPLSRFKDSLGNPTHILRIGESYKEKQRTIQAKKEVEQRRAGGYSRKYASKAKNLADDMVRNTARDLLYYAVTQDAMLIFENLSRGFGRQGKRTFMAERQYTRMEDWLTAKLAYEGLPSQTYLSKTLAQYTSKTCSNCGFTITSADYDRVLEKLKKTATGWMTTINGKELKVEGQITYYNRYKRQNVVKDLSVELDRLSEESVNNDISSWTKGRSGEALSLLKKRFSHRPVQEKFVCLNCGFETHADEQAALNIARSWLFLRSQEYKKYQTNKTTGNTDKRAFVETWQSFYRKKLKEVWKPAV

SEQ ID NO: 41581 - protein, 979 aa, synthetic construct
  REGION 1..979: note = engineered CasX variant
QEIKGRINKIRRRLVKDSNTKKAGKTGPMKTLLVRVMTPDLRERLENLRKKPENIPQPISNTSRANLNKLLTDYTEMKKAILHVYWEEFQKDPVGLMSRVAQPASKKIDQNKLKPEMDEKGNLTTAGFACSQCGQPLFVYKLEQVSEKGKAYTNYFGRCNVAEHEKLILLAQLKPEKDSDEAVTYSLGKFGQRALDFYSIHVTKESTHPVKPLAQIAGNRYASTPVGKALSDACMGTIASFLSKYQDIIIEHQKVVKGNQKRLESLRELAGKENLEYPSVTLPPQPHTKEGVDAYNEVIARVRMWVNLNLWQKLKLSRDDAKPLLRLKGFPSFPLVERQANEVDWWDMVCNVKKLINEKKEDGKVFWQNLAGYKRQEALRPYLSSEEDRKKGKKFARYQLGDLLLHLEKKHGEDWGKVYDEAWERIDKKVEGLSKHIKLEEERRSEDAQSKAALTDWLRAKASFVIEGLKEADKDEFCRCELKLQKWYGDLRGKPFAIEAENSILDISGFSKQYNCAFIWQKDGVKKLNLYLIINYFKGGKLRFKKIKPEAFEANRFYTVINKKSGEIVPMEVNFNFDDPNLIILPLAFGKRQGREFIWNDLLSLETGSLKLANGRVIEKTLYNRRTRQDEPALFVALTFERREVLDSSNIKPMNLIGVDRGENIPAVIALTDPEGCPLSRFKDSLGNPTHILRIGESYKEKQRTIQAKKEVEQRRAGGYSRKYASKAKNLADDMVRNTARDLLYYAVTQDAMLIFENLSRGFGRQGKRTFMAERQYTRMEDWLTAKLAYEGLPSQTYLSKTLAQYTSKTCSNCGFTITSADYDRVLEKLKKTATGWMTTINGKELKVEGQITYYNRYKRQNVVKDLSVELDRLSEESVNNDISSWTKGRSGEALSLLKKRFSHRPVQEKFVCLNCGFETHADEQAALNIARSWLFLRSQEYKKYQTNKTTGNTDKRAFVETWQSFYRKKLKEVWKPAV

SEQ ID NO: 41582 - protein, 979 aa, synthetic construct
  REGION 1..979: note = engineered CasX variant
QEIKGRINKIRRRLVKDSNTKKAGKTGPMKTLLVRVMTPDLRERLENLRKKPENIPQPISNTSRANLNKLLTDYTEMKKAILHVYWEEFQKDPVGLMSRVAQPASKKIDQNKLKPEMDEKGNLTTAGFACSQCGQPLFVYKLEQVSEKGKAYTNYFGRCNVAEHEKLILLAQLKPEKDSDEAVTYSLGKFGQRALDFYSIHVTKESTHPVKPLAQIAGNRYASAPVGKALSDACMGTIASFLSKYQDIIIEHQKVVKGNQKRLESLRELAGKENLEYPSVTLPPQPHTKEGVDAYNEVIARVRMWVNLNLWQKLKLSRDDAKPLLRLKGFPSFPLVERQANEVDWWDMVCNVKKLINEKKEDGKVFWQNLAGYKRQEALRPYLSSEEDRKKGKKFARYQLGDLLLHLEKKHGEDWGKVYDEAWERIDKKVEGLSKHIKLEEERRSEDAQSKAALTDWLRAKASFVIEGLKEADKDEFCRCELKLQKWYGDLRGKPFAIEAENSILDISGFSKQYNCAFIWQKDGVKKLNLYLIINYFKGGKLRFKKIKPEAFEANRFYTVINKKSGEIVPMEVNFNFDDPNLIILPLAFGKRQGREFIWNDLLSLETGSLKLANGRVIEKTLYNRRTRQDEPALFVALTFERREVLDSSNIKPMNLIGVDRGENIPAVIALTDPEGCPLSRFKDSLGNPTHILRIGESYKEKQRTIQAKKEVEQRRAGGYSRKYASKAKNLADDMVRNTARDLLYYAVTQDAMLIFENLSRGFGRQGKRTFMAERQYTRMEDWLTAKLAYEGLPSQTYLSKTLAQYTSKTCSNCGFTITSADYDRVLEKLKKTATGWMTTINGKELKVEGQITYYNRYKRQNVVKDLSVELDRLSEESVNNDISSWTKGRSGEALSLLKKRFSHRPVQEKFVCLNCGFETHADEQAALNIARSWLFLRSQEYKKYQTNKTTGNTDKRAFVETWQSFYRKKLKEVWKPAV

SEQ ID NO: 41583 - protein, 979 aa, synthetic construct
  REGION 1..979: note = engineered CasX variant
QEIKGRINKIRRRLVKDSNTKKAGKTGPMKTLLVRVMTPDLRERLENLRKKPENIPQPISNTSRANLNKLLTDYTEMKKAILHVYWEEFQKDPVGLMSRVAQPASKKIDQNKLKPEMDEKGNLTTAGFACSQCGQPLFVYKLEQVSEKGKAYTNYFGRCNVAEHEKLILLAQLKPEKDSDEAVTYSLGKFGQRALDFYSIHVTKESTHPVKPLAQIAGNRYASVPVGKALSDACMGTIASFLSKYQDIIIEHQKVVKGNQKRLESLRELAGKENLEYPSVTLPPQPHTKEGVDAYNEVIARVRMWVNLNLWQKLKLSRDDAKPLLRLKGFPSFPLVERQANEVDWWDMVCNVKKLINEKKEDGKVFWQNLAGYKRQEALRPYLSSEEDRKKGKKFARYQLGDLLLHLEKKHGEDWGKVYDEAWERIDKKVEGLSKHIKLEEERRSEDAQSKAALTDWLRAKASFVIEGLKEADKDEFCRCELKLQKWYGDLRGKPFAIEAENSILDISGFSKQYNCAFIWQKDGVKKLNLYLIINYFKGGKLRFKKIKPEAFEANRFYTVINKKSGEIVPMEVNFNFDDPNLIILPLAFGKRQGREFIWNDLLSLETGSLKLANGRVIEKTLYNRRTRQDEPALFVALTFERREVLDSSNIKPMNLIGVDRGENIPAVIALTDPEGCPLSRFKDSLGNPTHILRIGESYKEKQRTIQAKKEVEQRRAGGYSRKYASKAKNLADDMVRNTARDLLYYAVTQDAMLIFENLSRGFGRQGKRTFMAERQYTRMEDWLTAKLAYEGLPSQTYLSKTLAQYTSKTCSNCGFTITSADYDRVLEKLKKTATGWMTTINGKELKVEGQITYYNRYKRQNVVKDLSVELDRLSEESVNNDISSWTKGRSGEALSLLKKRFSHRPVQEKFVCLNCGFETHADEQAALNIARSWLFLRSQEYKKYQTNKTTGNTDKRAFVETWQSFYRKKLKEVWKPAV

SEQ ID NO: 41584 - protein, 979 aa, synthetic construct
  REGION 1..979: note = engineered CasX variant
QEIKGRINKIRRRLVKDSNTKKAGKTGPMKTLLVRVMTPDLRERLENLRKKPENIPQPISNTSRANLNKLLTDYTEMKKAILHVYWEEFQKDPVGLMSRVAQPASKKIDQNKLKPEMDEKGNLTTAGFACSQCGQPLFVYKLEQVSEKGKAYTNYFGRCNVAEHEKLIKLAQLKPEKDSDEAVTYSLGKFGQRALDFYSIHVTKESTHPVKPLAQIAGNRYASGPVGKALSDACMGTIASFLSKYQDIIIEHQKVVKGNQKRLESLRELAGKENLEYPSVTLPPQPHTKEGVDAYNEVIARVRMWVNLNLWQKLKLSRDDAKPLLRLKGFPSFPLVERQANEVDWWDMVCNVKKLINEKKEDGKVFWQNLAGYKRQEALRPYLSSEEDRKKGKKFARYQLGDLLLHLEKKHGEDWGKVYDEAWERIDKKVEGLSKHIKLEEERRSEDAQSKAALTDWLRAKASFVIEGLKEADKDEFCRCELKLQKWYGDLRGKPFAIEAENSILDISGFSKQYNCAFIWQKDGVKKLNLYLIINYFKGGKLRFKKIKPEAFEANRFYTVINKKSGEIVPMEVNFNFDDPNLIILPLAFGKRQGREFIWNDLLSLETGSLKLANGRVIEKTLYNRRTRQDEPALFVALTFERREVLDSSNIKPMNLIGVDRGENIPAVIALTDPEGCPLSRFKDSLGNPTHILRIGESYKEKQRTIQAKKEVEQRRAGGYSRKYASKAKNLADDMVRNTARDLLYYAVTQDAMLIFENLSRGFGRQGKRTFMAERQYTRMEDWLTAKLAYEGLPSQTYLSKTLAQYTSKTCSNCGFTITSADYDRVLEKLKKTATGWMTTINGKELKVEGQITYYNRYKRQNVVKDLSVELDRLSEESVNNDISSWTKGRSGEALSLLKKRFSHRPVQEKFVCLNCGFETHADEQAALNIARSWLFLRSQEYKKYQTNKTTGNTDKRAFVETWQSFYRKKLKEVWKPAV

SEQ ID NO: 41585 - protein, 978 aa, synthetic construct
  REGION 1..978: note = engineered CasX variant
QEIKGRINKIRRRLVKDSNTKKAGKTGPMKTLLVRVMTPDLRERLENLRKKPENIPQPISNTSRANLNKLLTDYTEMKKAILHVYWEEFQKDPVGLMSRVAQPASKKIDQNKLKPEMDEKGNLTTAGFACSQCGQPLFVYKLEQVSEKGKAYTNYFGRCNVAEHEKLILLAQLKPEKDSDEAVTYSLGKFGQRALDFYSIHVTKESTHPVKPLAQIAGNRYASPVGKALSDACMGTIASFLSKYQDIIIEHQKVVKGNQKRLESLRELAGKENLEYPSVTLPPQPHTKEGVDAYNEVIARVRMWVNLNLWQKLKLSRDDAKPLLRLKGFPSFPLVERQANEVDWWDMVCNVKKLINEKKEDGKVFWQNLAGYKRQEALRPYLSSEEDRKKGKKFARYQLGDLLLHLEKKHGEDWGKVYDEAWERIDKKVEGLSKHIKLEEERRSEDAQSKAALTDWLRAKASFVIEGLKEADKDEFCRCELKLQKWYGDLRGKPFAIEAENSILDISGFSKQYNCAFIWQKDGVKKLNLYLIINYFKGGKLRFKKIKPEAFEANRFYTVINKKSGEIVPMEVNFNFDDPNLIILPLAFGKRQGREFIWNDLLSLETGSLKLANGRVIEKTLYNRRTRQDEPALFVALTFERREVLDSSNIKPMNLIGVDRGENIPAVIALTDPEGCPLSRFKDSLGNPTHILRIGESYKEKQRTIQAKKEVEQRRAGGYSRKYASKAKNLADDMVRNTARDLLYYAVTQDAMLIFENLSRGFGRQGKRTFMAERQYTRMEDWLTAKLAYEGLPSQTYLSKTLAQYTSKTCSNCGFTITSADYDRVLEKLKKTATGWMTTINGKELKVEGQITYYNRYKRQNVVKDLSVELDRLSEESVNNDISSWTKGRSGEALSLLKKRFSHRPVQEKFVCLNCGFETHADEQAALNIARSWLFLRSQEYKKYQTNKTTGNTDKRAFVETWQSFYRKKLKEVWKPAV

SEQ ID NO: 41586 - protein, 979 aa, synthetic construct
  REGION 1..979: note = engineered CasX variant
QEIKGRINKIRRRLVKDSNTKKAGKTGPMKTLLVRVMTPDLRERLENLRKKPENIPQPISNTSRANLNKLLTDYTEMKKAILHVYWEEFQKDPVGLMSRVAQPASKKIDQNKLKPEMDEKGNLTTAGFACSQCGQPLFVYKLEQVSEKGKAYTNYFGRCNVAEHEKLILLAQLKPEKDSDEAVTYSLGKFGQRALDFYSIHVTKESTHPVKPLAQIAGNRYASYPVGKALSDACMGTIASFLSKYQDIIIEHQKVVKGNQKRLESLRELAGKENLEYPSVTLPPQPHTKEGVDAYNEVIARVRMWVNLNLWQKLKLSRDDAKPLLRLKGFPSFPLVERQANEVDWWDMVCNVKKLINEKKEDGKVFWQNLAGYKRQEALRPYLSSEEDRKKGKKFARYQLGDLLLHLEKKHGEDWGKVYDEAWERIDKKVEGLSKHIKLEEERRSEDAQSKAALTDWLRAKASFVIEGLKEADKDEFCRCELKLQKWYGDLRGKPFAIEAENSILDISGFSKQYNCAFIWQKDGVKKLNLYLIINYFKGGKLRFKKIKPEAFEANRFYTVINKKSGEIVPMEVNFNFDDPNLIILPLAFGKRQGREFIWNDLLSLETGSLKLANGRVIEKTLYNRRTRQDEPALFVALTFERREVLDSSNIKPMNLIGVDRGENIPAVIALTDPEGCPLSRFKDSLGNPTHILRIGESYKEKQRTIQAKKEVEQRRAGGYSRKYASKAKNLADDMVRNTARDLLYYAVTQDAMLIFENLSRGFGRQGKRTFMAERQYTRMEDWLTAKLAYNGLPSKTYLSKTLAQYTSKTCSNCGFTITSADYDRVLEKLKKTATGWMTTINGKELKVEGQITYYNRYKRQNVVKDLSVELDRLSEESVNNDISSWTKGRSGEALSLLKKRFSHRPVQEKFVCLNCGFETHADEQAALNIARSWLFLRSQEYKKYQTNKTTGNTDKRAFVETWQSFYRKKLKEVWKPAV

SEQ ID NO: 41587 - protein, 979 aa, synthetic construct
  REGION 1..979: note = engineered CasX variant
QEIKGRINKIRRRLVKDSNTKKAGKTGPMKTLLVRVMTPDLRERLENLRKKPENIPQPISNTSRANLNKLLTDYTEMKKAILHVYWEEFQKDPVGLMSRVAQPASKKIDQNKLKPEMDEKGNLTTAGFACSQCGQPLFVYKLEQVSEKGKAYTNYFGRCNVAEHEKLILLAQLKPEKDSDEAVTYSLGKFGQRALDFYSIHVTKESTHPVKPLAQIAGNRYASHPVGKALSDACMGTIASFLSKYQDIIIEHQKVVKGNQKRLESLRELAGKENLEYPSVTLPPQPHTKEGVDAYNEVIARVRMWVNLNLWQKLKLSRDDAKPLLRLKGFPSFPLVERQANEVDWWDMVCNVKKLINEKKEDGKVFWQNLAGYKRQEALRPYLSSEEDRKKGKKFARYQLGDLLLHLEKKHGEDWGKVYDEAWERIDKKVEGLSKHIKLEEERRSEDAQSKAALTDWLRAKASFVIEGLKEADKDEFCRCELKLQKWYGDLRGKPFAIEAENSILDISGFSKQYNCAFIWQKDGVKKLNLYLIINYFKGGKLRFKKIKPEAFEANRFYTVINKKSGEIVPMEVNFNFDDPNLIILPLAFGKRQGREFIWNDLLSLETGSLKLANGRVIEKTLYNRRTRQDEPALFVALTFERREVLDSSNIKPMNLIGVDRGENIPAVIALTDPEGCPLSRFKDSLGNPTHILRIGESYKEKQRTIQAKKEVEQRRAGGYSRKYASKAKNLADDMVRNTARDLLYYAVTQDAMLIFENLSRGFGRQGKRTFMAERQYTRMEDWLTAKLAYNGLPSKTYLSKTLAQYTSKTCSNCGFTITSADYDRVLEKLKKTATGWMTTINGKELKVEGQITYYNRYKRQNVVKDLSVELDRLSEESVNNDISSWTKGRSGEALSLLKKRFSHRPVQEKFVCLNCGFETHADEQAALNIARSWLFLRSQEYKKYQTNKTTGNTDKRAFVETWQSFYRKKLKEVWKPAV

SEQ ID NO: 41588 - protein, 979 aa, synthetic construct
  REGION 1..979: note = engineered CasX variant
QEIKGRINKIRRRLVKDSNTKKAGKTGPMKTLLVRVMTPDLRERLENLRKKPENIPQPISNTSRANLNKLLTDYTEMKKAILHVYWEEFQKDPVGLMSRVAQPASKKIDQNKLKPEMDEKGNLTTAGFACSQCGQPLFVYKLEQVSEKGKAYTNYFGRCNVAEHEKLILLAQLKPEKDSDEAVTYSLGKFGQRALDFYSIHVTKESTHPVKPLAQIAGNRYASSPVGKALSDACMGTIASFLSKYQDIIIEHQKVVKGNQKRLESLRELAGKENLEYPSVTLPPQPHTKEGVDAYNEVIARVRMWVNLNLWQKLKLSRDDAKPLLRLKGFPSFPLVERQANEVDWWDMVCNVKKLINEKKEDGKVFWQNLAGYKRQEALRPYLSSEEDRKKGKKFARYQLGDLLLHLEKKHGEDWGKVYDEAWERIDKKVEGLSKHIKLEEERRSEDAQSKAALTDWLRAKASFVIEGLKEADKDEFCRCELKLQKWYGDLRGKPFAIEAENSILDISGFSKQYNCAFIWQKDGVKKLNLYLIINYFKGGKLRFKKIKPEAFEANRFYTVINKKSGEIVPMEVNFNFDDPNLIILPLAFGKRQGREFIWNDLLSLETGSLKLANGRVIEKTLYNRRTRQDEPALFVALTFERREVLDSSNIKPMNLIGVDRGENIPAVIALTDPEGCPLSRFKDSLGNPTHILRIGESYKEKQRTIQAKKEVEQRRAGGYSRKYASKAKNLADDMVRNTARDLLYYAVTQDAMLIFENLSRGFGRQGKRTFMAERQYTRMEDWLTAKLAYNGLPSKTYLSKTLAQYTSKTCSNCGFTITSADYDRVLEKLKKTATGWMTTINGKELKVEGQITYYNRYKRQNVVKDLSVELDRLSEESVNNDISSWTKGRSGEALSLLKKRFSHRPVQEKFVCLNCGFETHADEQAALNIARSWLFLRSQEYKKYQTNKTTGNTDKRAFVETWQSFYRKKLKEVWKPAV

SEQ ID NO: 41589 - protein, 979 aa, synthetic construct
  REGION 1..979: note = engineered CasX variant
QEIKGRINKIRRRLVKDSNTKKAGKTGPMKTLLVRVMTPDLRERLENLRKKPENIPQPISNTSRANLNKLLTDYTEMKKAILHVYWEEFQKDPVGLMSRVAQPASKKIDQNKLKPEMDEKGNLTTAGFACSQCGQPLFVYKLEQVSEKGKAYTNYFGRCNVAEHEKLILLAQLKPEKDSDEAVTYSLGKFGQRALDFYSIHVTKESTHPVKPLAQIAGNRYASTPVGKALSDACMGTIASFLSKYQDIIIEHQKVVKGNQKRLESLRELAGKENLEYPSVTLPPQPHTKEGVDAYNEVIARVRMWVNLNLWQKLKLSRDDAKPLLRLKGFPSFPLVERQANEVDWWDMVCNVKKLINEKKEDGKVFWQNLAGYKRQEALRPYLSSEEDRKKGKKFARYQLGDLLLHLEKKHGEDWGKVYDEAWERIDKKVEGLSKHIKLEEERRSEDAQSKAALTDWLRAKASFVIEGLKEADKDEFCRCELKLQKWYGDLRGKPFAIEAENSILDISGFSKQYNCAFIWQKDGVKKLNLYLIINYFKGGKLRFKKIKPEAFEANRFYTVINKKSGEIVPMEVNFNFDDPNLIILPLAFGKRQGREFIWNDLLSLETGSLKLANGRVIEKTLYNRRTRQDEPALFVALTFERREVLDSSNIKPMNLIGVDRGENIPAVIALTDPEGCPLSRFKDSLGNPTHILRIGESYKEKQRTIQAKKEVEQRRAGGYSRKYASKAKNLADDMVRNTARDLLYYAVTQDAMLIFENLSRGFGRQGKRTFMAERQYTRMEDWLTAKLAYNGLPSKTYLSKTLAQYTSKTCSNCGFTITSADYDRVLEKLKKTATGWMTTINGKELKVEGQITYYNRYKRQNVVKDLSVELDRLSEESVNNDISSWTKGRSGEALSLLKKRFSHRPVQEKFVCLNCGFETHADEQAALNIARSWLFLRSQEYKKYQTNKTTGNTDKRAFVETWQSFYRKKLKEVWKPAV

SEQ ID NO: 41590 - protein, 979 aa, synthetic construct
  REGION 1..979: note = engineered CasX variant
QEIKGRINKIRRRLVKDSNTKKAGKTGPMKTLLVRVMTPDLRERLENLRKKPENIPQPISNTSRANLNKLLTDYTEMKKAILHVYWEEFQKDPVGLMSRVAQPASKKIDQNKLKPEMDEKGNLTTAGFACSQCGQPLFVYKLEQVSEKGKAYTNYFGRCNVAEHEKLILLAQLKPEKDSDEAVTYSLGKFGQRALDFYSIHVTKESTHPVKPLAQIAGNRYASAPVGKALSDACMGTIASFLSKYQDIIIEHQKVVKGNQKRLESLRELAGKENLEYPSVTLPPQPHTKEGVDAYNEVIARVRMWVNLNLWQKLKLSRDDAKPLLRLKGFPSFPLVERQANEVDWWDMVCNVKKLINEKKEDGKVFWQNLAGYKRQEALRPYLSSEEDRKKGKKFARYQLGDLLLHLEKKHGEDWGKVYDEAWERIDKKVEGLSKHIKLEEERRSEDAQSKAALTDWLRAKASFVIEGLKEADKDEFCRCELKLQKWYGDLRGKPFAIEAENSILDISGFSKQYNCAFIWQKDGVKKLNLYLIINYFKGGKLRFKKIKPEAFEANRFYTVINKKSGEIVPMEVNFNFDDPNLIILPLAFGKRQGREFIWNDLLSLETGSLKLANGRVIEKTLYNRRTRQDEPALFVALTFERREVLDSSNIKPMNLIGVDRGENIPAVIALTDPEGCPLSRFKDSLGNPTHILRIGESYKEKQRTIQAKKEVEQRRAGGYSRKYASKAKNLADDMVRNTARDLLYYAVTQDAMLIFENLSRGFGRQGKRTFMAERQYTRMEDWLTAKLAYNGLPSKTYLSKTLAQYTSKTCSNCGFTITSADYDRVLEKLKKTATGWMTTINGKELKVEGQITYYNRYKRQNVVKDLSVELDRLSEESVNNDISSWTKGRSGEALSLLKKRFSHRPVQEKFVCLNCGFETHADEQAALNIARSWLFLRSQEYKKYQTNKTTGNTDKRAFVETWQSFYRKKLKEVWKPAV

SEQ ID NO: 41591 - protein, 979 aa, synthetic construct
  REGION 1..979: note = engineered CasX variant
QEIKGRINKIRRRLVKDSNTKKAGKTGPMKTLLVRVMTPDLRERLENLRKKPENIPQPISNTSRANLNKLLTDYTEMKKAILHVYWEEFQKDPVGLMSRVAQPASKKIDQNKLKPEMDEKGNLTTAGFACSQCGQPLFVYKLEQVSEKGKAYTNYFGRCNVAEHEKLILLAQLKPEKDSDEAVTYSLGKFGQRALDFYSIHVTKESTHPVKPLAQIAGNRYASVPVGKALSDACMGTIASFLSKYQDIIIEHQKVVKGNQKRLESLRELAGKENLEYPSVTLPPQPHTKEGVDAYNEVIARVRMWVNLNLWQKLKLSRDDAKPLLRLKGFPSFPLVERQANEVDWWDMVCNVKKLINEKKEDGKVFWQNLAGYKRQEALRPYLSSEEDRKKGKKFARYQLGDLLLHLEKKHGEDWGKVYDEAWERIDKKVEGLSKHIKLEEERRSEDAQSKAALTDWLRAKASFVIEGLKEADKDEFCRCELKLQKWYGDLRGKPFAIEAENSILDISGFSKQYNCAFIWQKDGVKKLNLYLIINYFKGGKLRFKKIKPEAFEANRFYTVINKKSGEIVPMEVNFNFDDPNLIILPLAFGKRQGREFIWNDLLSLETGSLKLANGRVIEKTLYNRRTRQDEPALFVALTFERREVLDSSNIKPMNLIGVDRGENIPAVIALTDPEGCPLSRFKDSLGNPTHILRIGESYKEKQRTIQAKKEVEQRRAGGYSRKYASKAKNLADDMVRNTARDLLYYAVTQDAMLIFENLSRGFGRQGKRTFMAERQYTRMEDWLTAKLAYNGLPSKTYLSKTLAQYTSKTCSNCGFTITSADYDRVLEKLKKTATGWMTTINGKELKVEGQITYYNRYKRQNVVKDLSVELDRLSEESVNNDISSWTKGRSGEALSLLKKRFSHRPVQEKFVCLNCGFETHADEQAALNIARSWLFLRSQEYKKYQTNKTTGNTDKRAFVETWQSFYRKKLKEVWKPAV

SEQ ID NO: 41592 - protein, 979 aa, synthetic construct
  REGION 1..979: note = engineered CasX variant
QEIKGRINKIRRRLVKDSNTKKAGKTGPMKTLLVRVMTPDLRERLENLRKKPENIPQPISNTSRANLNKLLTDYTEMKKAILHVYWEEFQKDPVGLMSRVAQPASKKIDQNKLKPEMDEKGNLTTAGFACSQCGQPLFVYKLEQVSEKGKAYTNYFGRCNVAEHEKLIKLAQLKPEKDSDEAVTYSLGKFGQRALDFYSIHVTKESTHPVKPLAQIAGNRYASGPVGKALSDACMGTIASFLSKYQDIIIEHQKVVKGNQKRLESLRELAGKENLEYPSVTLPPQPHTKEGVDAYNEVIARVRMWVNLNLWQKLKLSRDDAKPLLRLKGFPSFPLVERQANEVDWWDMVCNVKKLINEKKEDGKVFWQNLAGYKRQEALRPYLSSEEDRKKGKKFARYQLGDLLLHLEKKHGEDWGKVYDEAWERIDKKVEGLSKHIKLEEERRSEDAQSKAALTDWLRAKASFVIEGLKEADKDEFCRCELKLQKWYGDLRGKPFAIEAENSILDISGFSKQYNCAFIWQKDGVKKLNLYLIINYFKGGKLRFKKIKPEAFEANRFYTVINKKSGEIVPMEVNFNFDDPNLIILPLAFGKRQGREFIWNDLLSLETGSLKLANGRVIEKTLYNRRTRQDEPALFVALTFERREVLDSSNIKPMNLIGVDRGENIPAVIALTDPEGCPLSRFKDSLGNPTHILRIGESYKEKQRTIQAKKEVEQRRAGGYSRKYASKAKNLADDMVRNTARDLLYYAVTQDAMLIFENLSRGFGRQGKRTFMAERQYTRMEDWLTAKLAYNGLPSKTYLSKTLAQYTSKTCSNCGFTITSADYDRVLEKLKKTATGWMTTINGKELKVEGQITYYNRYKRQNVVKDLSVELDRLSEESVNNDISSWTKGRSGEALSLLKKRFSHRPVQEKFVCLNCGFETHADEQAALNIARSWLFLRSQEYKKYQTNKTTGNTDKRAFVETWQSFYRKKLKEVWKPAV

SEQ ID NO: 41593 - protein, 978 aa, synthetic construct
  REGION 1..978: note = engineered CasX variant
QEIKGRINKIRRRLVKDSNTKKAGKTGPMKTLLVRVMTPDLRERLENLRKKPENIPQPISNTSRANLNKLLTDYTEMKKAILHVYWEEFQKDPVGLMSRVAQPASKKIDQNKLKPEMDEKGNLTTAGFACSQCGQPLFVYKLEQVSEKGKAYTNYFGRCNVAEHEKLILLAQLKPEKDSDEAVTYSLGKFGQRALDFYSIHVTKESTHPVKPLAQIAGNRYASPVGKALSDACMGTIASFLSKYQDIIIEHQKVVKGNQKRLESLRELAGKENLEYPSVTLPPQPHTKEGVDAYNEVIARVRMWVNLNLWQKLKLSRDDAKPLLRLKGFPSFPLVERQANEVDWWDMVCNVKKLINEKKEDGKVFWQNLAGYKRQEALRPYLSSEEDRKKGKKFARYQLGDLLLHLEKKHGEDWGKVYDEAWERIDKKVEGLSKHIKLEEERRSEDAQSKAALTDWLRAKASFVIEGLKEADKDEFCRCELKLQKWYGDLRGKPFAIEAENSILDISGFSKQYNCAFIWQKDGVKKLNLYLIINYFKGGKLRFKKIKPEAFEANRFYTVINKKSGEIVPMEVNFNFDDPNLIILPLAFGKRQGREFIWNDLLSLETGSLKLANGRVIEKTLYNRRTRQDEPALFVALTFERREVLDSSNIKPMNLIGVDRGENIPAVIALTDPEGCPLSRFKDSLGNPTHILRIGESYKEKQRTIQAKKEVEQRRAGGYSRKYASKAKNLADDMVRNTARDLLYYAVTQDAMLIFENLSRGFGRQGKRTFMAERQYTRMEDWLTAKLAYNGLPSKTYLSKTLAQYTSKTCSNCGFTITSADYDRVLEKLKKTATGWMTTINGKELKVEGQITYYNRYKRQNVVKDLSVELDRLSEESVNNDISSWTKGRSGEALSLLKKRFSHRPVQEKFVCLNCGFETHADEQAALNIARSWLFLRSQEYKKYQTNKTTGNTDKRAFVETWQSFYRKKLKEVWKPAV

SEQ ID NO: 41594 - protein, 979 aa, synthetic construct
  REGION 1..979: note = engineered CasX variant
QEIKGRINKIRRRLVKDSNTKKAGKTGPMKTLLVRVMTPDLRERLENLRKKPENIPQPISNTSRANLNKLLTDYTEMKKAILHVYWEEFQKDPVGLMSRVAQPASKKIDQNKLKPEMDEKGNLTTAGFACSQCGQPLFVYKLEQVSEKGKAYTNYFGRCNVAEHEKLIQLAQLKPEKDSDEAVTYSLGKFGQRALDFYSIHVTKESTHPVKPLAQIAGNRYASYPVGKALSDACMGTIASFLSKYQDIIIEHQKVVKGNQKRLESLRELAGKENLEYPSVTLPPQPHTKEGVDAYNEVIARVRMWVNLNLWQKLKLSRDDAKPLLRLKGFPSFPLVERQANEVDWWDMVCNVKKLINEKKEDGKVFWQNLAGYKRQEALRPYLSSEEDRKKGKKFARYQLGDLLLHLEKKHGEDWGKVYDEAWERIDKKVEGLSKHIKLEEERRSEDAQSKAALTDWLRAKASFVIEGLKEADKDEFCRCELKLQKWYGDLRGKPFAIEAENSILDISGFSKQYNCAFIWQKDGVKKLNLYLIINYFKGGKLRFKKIKPEAFEANRFYTVINKKSGEIVPMEVNFNFDDPNLIILPLAFGKRQGREFIWNDLLSLETGSLKLANGRVIEKTLYNRRTRQDEPALFVALTFERREVLDSSNIKPMNLIGVDRGENIPAVIALTDPEGCPLSRFKDSLGNPTHILRIGESYKEKQRTIQAKKEVEQRRAGGYSRKYASKAKNLADDMVRNTARDLLYYAVTQDAMLIFENLSRGFGRQGKRTFMAERQYTRMEDWLTAKLAYEGLPSKTYLSKTLAQYTSKTCSNCGFTITSADYDRVLEKLKKTATGWMTTINGKELKVEGQITYYNRYKRQNVVKDLSVELDRLSEESVNNDISSWTKGRSGEALSLLKKRFSHRPVQEKFVCLNCGFETHADEQAALNIARSWLFLRSQEYKKYQTNKTTGNTDKRAFVETWQSFYRKKLKEVWKPAV

SEQ ID NO: 41595 - protein, 979 aa, synthetic construct
  REGION 1..979: note = engineered CasX variant
QEIKGRINKIRRRLVKDSNTKKAGKTGPMKTLLVRVMTPDLRERLENLRKKPENIPQPISNTSRANLNKLLTDYTEMKKAILHVYWEEFQKDPVGLMSRVAQPASKKIDQNKLKPEMDEKGNLTTAGFACSQCGQPLFVYKLEQVSEKGKAYTNYFGRCNVAEHEKLIQLAQLKPEKDSDEAVTYSLGKFGQRALDFYSIHVTKESTHPVKPLAQIAGNRYASHPVGKALSDACMGTIASFLSKYQDIIIEHQKVVKGNQKRLESLRELAGKENLEYPSVTLPPQPHTKEGVDAYNEVIARVRMWVNLNLWQKLKLSRDDAKPLLRLKGFPSFPLVERQANEVDWWDMVCNVKKLINEKKEDGKVFWQNLAGYKRQEALRPYLSSEEDRKKGKKFARYQLGDLLLHLEKKHGEDWGKVYDEAWERIDKKVEGLSKHIKLEEERRSEDAQSKAALTDWLRAKASFVIEGLKEADKDEFCRCELKLQKWYGDLRGKPFAIEAENSILDISGFSKQYNCAFIWQKDGVKKLNLYLIINYFKGGKLRFKKIKPEAFEANRFYTVINKKSGEIVPMEVNFNFDDPNLIILPLAFGKRQGREFIWNDLLSLETGSLKLANGRVIEKTLYNRRTRQDEPALFVALTFERREVLDSSNIKPMNLIGVDRGENIPAVIALTDPEGCPLSRFKDSLGNPTHILRIGESYKEKQRTIQAKKEVEQRRAGGYSRKYASKAKNLADDMVRNTARDLLYYAVTQDAMLIFENLSRGFGRQGKRTFMAERQYTRMEDWLTAKLAYEGLPSKTYLSKTLAQYTSKTCSNCGFTITSADYDRVLEKLKKTATGWMTTINGKELKVEGQITYYNRYKRQNVVKDLSVELDRLSEESVNNDISSWTKGRSGEALSLLKKRFSHRPVQEKFVCLNCGFETHADEQAALNIARSWLFLRSQEYKKYQTNKTTGNTDKRAFVETWQSFYRKKLKEVWKPAV

SEQ ID NO: 41596 - protein, 979 aa, synthetic construct
  REGION 1..979: note = engineered CasX variant
QEIKGRINKIRRRLVKDSNTKKAGKTGPMKTLLVRVMTPDLRERLENLRKKPENIPQPISNTSRANLNKLLTDYTEMKKAILHVYWEEFQKDPVGLMSRVAQPASKKIDQNKLKPEMDEKGNLTTAGFACSQCGQPLFVYKLEQVSEKGKAYTNYFGRCNVAEHEKLIQLAQLKPEKDSDEAVTYSLGKFGQRALDFYSIHVTKESTHPVKPLAQIAGNRYASSPVGKALSDACMGTIASFLSKYQDIIIEHQKVVKGNQKRLESLRELAGKENLEYPSVTLPPQPHTKEGVDAYNEVIARVRMWVNLNLWQKLKLSRDDAKPLLRLKGFPSFPLVERQANEVDWWDMVCNVKKLINEKKEDGKVFWQNLAGYKRQEALRPYLSSEEDRKKGKKFARYQLGDLLLHLEKKHGEDWGKVYDEAWERIDKKVEGLSKHIKLEEERRSEDAQSKAALTDWLRAKASFVIEGLKEADKDEFCRCELKLQKWYGDLRGKPFAIEAENSILDISGFSKQYNCAFIWQKDGVKKLNLYLIINYFKGGKLRFKKIKPEAFEANRFYTVINKKSGEIVPMEVNFNFDDPNLIILPLAFGKRQGREFIWNDLLSLETGSLKLANGRVIEKTLYNRRTRQDEPALFVALTFERREVLDSSNIKPMNLIGVDRGENIPAVIALTDPEGCPLSRFKDSLGNPTHILRIGESYKEKQRTIQAKKEVEQRRAGGYSRKYASKAKNLADDMVRNTARDLLYYAVTQDAMLIFENLSRGFGRQGKRTFMAERQYTRMEDWLTAKLAYEGLPSKTYLSKTLAQYTSKTCSNCGFTITSADYDRVLEKLKKTATGWMTTINGKELKVEGQITYYNRYKRQNVVKDLSVELDRLSEESVNNDISSWTKGRSGEALSLLKKRFSHRPVQEKFVCLNCGFETHADEQAALNIARSWLFLRSQEYKKYQTNKTTGNTDKRAFVETWQSFYRKKLKEVWKPAV

SEQ ID NO: 41597 - protein, 979 aa, synthetic construct
  REGION 1..979: note = engineered CasX variant
QEIKGRINKIRRRLVKDSNTKKAGKTGPMKTLLVRVMTPDLRERLENLRKKPENIPQPISNTSRANLNKLLTDYTEMKKAILHVYWEEFQKDPVGLMSRVAQPASKKIDQNKLKPEMDEKGNLTTAGFACSQCGQPLFVYKLEQVSEKGKAYTNYFGRCNVAEHEKLIQLAQLKPEKDSDEAVTYSLGKFGQRALDFYSIHVTKESTHPVKPLAQIAGNRYASTPVGKALSDACMGTIASFLSKYQDIIIEHQKVVKGNQKRLESLRELAGKENLEYPSVTLPPQPHTKEGVDAYNEVIARVRMWVNLNLWQKLKLSRDDAKPLLRLKGFPSFPLVERQANEVDWWDMVCNVKKLINEKKEDGKVFWQNLAGYKRQEALRPYLSSEEDRKKGKKFARYQLGDLLLHLEKKHGEDWGKVYDEAWERIDKKVEGLSKHIKLEEERRSEDAQSKAALTDWLRAKASFVIEGLKEADKDEFCRCELKLQKWYGDLRGKPFAIEAENSILDISGFSKQYNCAFIWQKDGVKKLNLYLIINYFKGGKLRFKKIKPEAFEANRFYTVINKKSGEIVPMEVNFNFDDPNLIILPLAFGKRQGREFIWNDLLSLETGSLKLANGRVIEKTLYNRRTRQDEPALFVALTFERREVLDSSNIKPMNLIGVDRGENIPAVIALTDPEGCPLSRFKDSLGNPTHILRIGESYKEKQRTIQAKKEVEQRRAGGYSRKYASKAKNLADDMVRNTARDLLYYAVTQDAMLIFENLSRGFGRQGKRTFMAERQYTRMEDWLTAKLAYEGLPSKTYLSKTLAQYTSKTCSNCGFTITSADYDRVLEKLKKTATGWMTTINGKELKVEGQITYYNRYKRQNVVKDLSVELDRLSEESVNNDISSWTKGRSGEALSLLKKRFSHRPVQEKFVCLNCGFETHADEQAALNIARSWLFLRSQEYKKYQTNKTTGNTDKRAFVETWQSFYRKKLKEVWKPAV

SEQ ID NO: 41598 - protein, 979 aa, synthetic construct
  REGION 1..979: note = engineered CasX variant
QEIKGRINKIRRRLVKDSNTKKAGKTGPMKTLLVRVMTPDLRERLENLRKKPENIPQPISNTSRANLNKLLTDYTEMKKAILHVYWEEFQKDPVGLMSRVAQPASKKIDQNKLKPEMDEKGNLTTAGFACSQCGQPLFVYKLEQVSEKGKAYTNYFGRCNVAEHEKLIQLAQLKPEKDSDEAVTYSLGKFGQRALDFYSIHVTKESTHPVKPLAQIAGNRYASAPVGKALSDACMGTIASFLSKYQDIIIEHQKVVKGNQKRLESLRELAGKENLEYPSVTLPPQPHTKEGVDAYNEVIARVRMWVNLNLWQKLKLSRDDAKPLLRLKGFPSFPLVERQANEVDWWDMVCNVKKLINEKKEDGKVFWQNLAGYKRQEALRPYLSSEEDRKKGKKFARYQLGDLLLHLEKKHGEDWGKVYDEAWERIDKKVEGLSKHIKLEEERRSEDAQSKAALTDWLRAKASFVIEGLKEADKDEFCRCELKLQKWYGDLRGKPFAIEAENSILDISGFSKQYNCAFIWQKDGVKKLNLYLIINYFKGGKLRFKKIKPEAFEANRFYTVINKKSGEIVPMEVNFNFDDPNLIILPLAFGKRQGREFIWNDLLSLETGSLKLANGRVIEKTLYNRRTRQDEPALFVALTFERREVLDSSNIKPMNLIGVDRGENIPAVIALTDPEGCPLSRFKDSLGNPTHILRIGESYKEKQRTIQAKKEVEQRRAGGYSRKYASKAKNLADDMVRNTARDLLYYAVTQDAMLIFENLSRGFGRQGKRTFMAERQYTRMEDWLTAKLAYEGLPSKTYLSKTLAQYTSKTCSNCGFTITSADYDRVLEKLKKTATGWMTTINGKELKVEGQITYYNRYKRQNVVKDLSVELDRLSEESVNNDISSWTKGRSGEALSLLKKRFSHRPVQEKFVCLNCGFETHADEQAALNIARSWLFLRSQEYKKYQTNKTTGNTDKRAFVETWQSFYRKKLKEVWKPAV

SEQ ID NO: 41599 - protein, 979 aa, synthetic construct
  REGION 1..979: note = engineered CasX variant
QEIKGRINKIRRRLVKDSNTKKAGKTGPMKTLLVRVMTPDLRERLENLRKKPENIPQPISNTSRANLNKLLTDYTEMKKAILHVYWEEFQKDPVGLMSRVAQPASKKIDQNKLKPEMDEKGNLTTAGFACSQCGQPLFVYKLEQVSEKGKAYTNYFGRCNVAEHEKLIQLAQLKPEKDSDEAVTYSLGKFGQRALDFYSIHVTKESTHPVKPLAQIAGNRYASVPVGKALSDACMGTIASFLSKYQDIIIEHQKVVKGNQKRLESLRELAGKENLEYPSVTLPPQPHTKEGVDAYNEVIARVRMWVNLNLWQKLKLSRDDAKPLLRLKGFPSFPLVERQANEVDWWDMVCNVKKLINEKKEDGKVFWQNLAGYKRQEALRPYLSSEEDRKKGKKFARYQLGDLLLHLEKKHGEDWGKVYDEAWERIDKKVEGLSKHIKLEEERRSEDAQSKAALTDWLRAKASFVIEGLKEADKDEFCRCELKLQKWYGDLRGKPFAIEAENSILDISGFSKQYNCAFIWQKDGVKKLNLYLIINYFKGGKLRFKKIKPEAFEANRFYTVINKKSGEIVPMEVNFNFDDPNLIILPLAFGKRQGREFIWNDLLSLETGSLKLANGRVIEKTLYNRRTRQDEPALFVALTFERREVLDSSNIKPMNLIGVDRGENIPAVIALTDPEGCPLSRFKDSLGNPTHILRIGESYKEKQRTIQAKKEVEQRRAGGYSRKYASKAKNLADDMVRNTARDLLYYAVTQDAMLIFENLSRGFGRQGKRTFMAERQYTRMEDWLTAKLAYEGLPSKTYLSKTLAQYTSKTCSNCGFTITSADYDRVLEKLKKTATGWMTTINGKELKVEGQITYYNRYKRQNVVKDLSVELDRLSEESVNNDISSWTKGRSGEALSLLKKRFSHRPVQEKFVCLNCGFETHADEQAALNIARSWLFLRSQEYKKYQTNKTTGNTDKRAFVETWQSFYRKKLKEVWKPAV

SEQ ID NO: 41600 - protein, 980 aa, synthetic construct
  REGION 1..980: note = engineered CasX variant
QEIKGRINKIRRRLVKDSNTKKAGKTGPMKTLLVRVMTPDLRERLENLRKKPENIPQPISNTSRANLNKLLTDYTEMKKAILHVYWEEFQKDPVGLMSRVAQPASKKIDQNKLKPEMDEKGNLTTAGFACSQCGQPLFVYKLEQVSEKGKAYTNYFGRCNVAEHEKLIQKLAQLKPEKDSDEAVTYSLGKFGQRALDFYSIHVTKESTHPVKPLAQIAGNRYASGPVGKALSDACMGTIASFLSKYQDIIIEHQKVVKGNQKRLESLRELAGKENLEYPSVTLPPQPHTKEGVDAYNEVIARVRMWVNLNLWQKLKLSRDDAKPLLRLKGFPSFPLVERQANEVDWWDMVCNVKKLINEKKEDGKVFWQNLAGYKRQEALRPYLSSEEDRKKGKKFARYQLGDLLLHLEKKHGEDWGKVYDEAWERIDKKVEGLSKHIKLEEERRSEDAQSKAALTDWLRAKASFVIEGLKEADKDEFCRCELKLQKWYGDLRGKPFAIEAENSILDISGFSKQYNCAFIWQKDGVKKLNLYLIINYFKGGKLRFKKIKPEAFEANRFYTVINKKSGEIVPMEVNFNFDDPNLIILPLAFGKRQGREFIWNDLLSLETGSLKLANGRVIEKTLYNRRTRQDEPALFVALTFERREVLDSSNIKPMNLIGVDRGENIPAVIALTDPEGCPLSRFKDSLGNPTHILRIGESYKEKQRTIQAKKEVEQRRAGGYSRKYASKAKNLADDMVRNTARDLLYYAVTQDAMLIFENLSRGFGRQGKRTFMAERQYTRMEDWLTAKLAYEGLPSKTYLSKTLAQYTSKTCSNCGFTITSADYDRVLEKLKKTATGWMTTINGKELKVEGQITYYNRYKRQNVVKDLSVELDRLSEESVNNDISSWTKGRSGEALSLLKKRFSHRPVQEKFVCLNCGFETHADEQAALNIARSWLFLRSQEYKKYQTNKTTGNTDKRAFVETWQSFYRKKLKEVWKPAV

SEQ ID NO: 41601 - protein, 978 aa, synthetic construct
  REGION 1..978: note = engineered CasX variant
QEIKGRINKIRRRLVKDSNTKKAGKTGPMKTLLVRVMTPDLRERLENLRKKPENIPQPISNTSRANLNKLLTDYTEMKKAILHVYWEEFQKDPVGLMSRVAQPASKKIDQNKLKPEMDEKGNLTTAGFACSQCGQPLFVYKLEQVSEKGKAYTNYFGRCNVAEHEKLIQLAQLKPEKDSDEAVTYSLGKFGQRALDFYSIHVTKESTHPVKPLAQIAGNRYASPVGKALSDACMGTIASFLSKYQDIIIEHQKVVKGNQKRLESLRELAGKENLEYPSVTLPPQPHTKEGVDAYNEVIARVRMWVNLNLWQKLKLSRDDAKPLLRLKGFPSFPLVERQANEVDWWDMVCNVKKLINEKKEDGKVFWQNLAGYKRQEALRPYLSSEEDRKKGKKFARYQLGDLLLHLEKKHGEDWGKVYDEAWERIDKKVEGLSKHIKLEEERRSEDAQSKAALTDWLRAKASFVIEGLKEADKDEFCRCELKLQKWYGDLRGKPFAIEAENSILDISGFSKQYNCAFIWQKDGVKKLNLYLIINYFKGGKLRFKKIKPEAFEANRFYTVINKKSGEIVPMEVNFNFDDPNLIILPLAFGKRQGREFIWNDLLSLETGSLKLANGRVIEKTLYNRRTRQDEPALFVALTFERREVLDSSNIKPMNLIGVDRGENIPAVIALTDPEGCPLSRFKDSLGNPTHILRIGESYKEKQRTIQAKKEVEQRRAGGYSRKYASKAKNLADDMVRNTARDLLYYAVTQDAMLIFENLSRGFGRQGKRTFMAERQYTRMEDWLTAKLAYEGLPSKTYLSKTLAQYTSKTCSNCGFTITSADYDRVLEKLKKTATGWMTTINGKELKVEGQITYYNRYKRQNVVKDLSVELDRLSEESVNNDISSWTKGRSGEALSLLKKRFSHRPVQEKFVCLNCGFETHADEQAALNIARSWLFLRSQEYKKYQTNKTTGNTDKRAFVETWQSFYRKKLKEVWKPAV

SEQ ID NO: 41602 - protein, 979 aa, synthetic construct
  REGION 1..979: note = engineered CasX variant
QEIKGRINKIRRRLVKDSNTKKAGKTGPMKTLLVRVMTPDLRERLENLRKKPENIPQPISNTSRANLNKLLTDYTEMKKAILHVYWEEFQKDPVGLMSRVAQPASKKIDQNKLKPEMDEKGNLTTAGFACSQCGQPLFVYKLEQVSEKGKAYTNYFGRCNVAEHEKLILLAQLKPEKDSDEAVTYSLGKFGQRALDFYSIHVTKESTHPVKPLAQIAGNRYASYPVGKALSDACMGTIASFLSKYQDIIIEHQKVVKGNQKRLESLRELAGKENLEYPSVTLPPQPHTKEGVDAYNEVIARVRMWVNLNLWQKLKLSRDDAKPLLRLKGFPSFPLVERQANEVDWWDMVCNVKKLINEKKEDGKVFWQNLAIYKRQEALRPYLSSEEDRKKGKKFARYQLGDLLLHLEKKHGEDWGKVYDEAWERIDKKVEGLSKHIKLEEERRSEDAQSKAALTDWLRAKASFVIEGLKEADKDEFCRCELKLQKWYGDLRGKPFAIEAENSILDISGFSKQYNCAFIWQKDGVKKLNLYLIINYFKGGKLRFKKIKPEAFEANRFYTVINKKSGEIVPMEVNFNFDDPNLIILPLAFGKRQGREFIWNDLLSLETGSLKLANGRVIEKTLYNRRTRQDEPALFVALTFERREVLDSSNIKPMNLIGVDRGENIPAVIALTDPEGCPLSRFKDSLGNPTHILRIGESYKEKQRTIQAKKEVEQRRAGGYSRKYASKAKNLADDMVRNTARDLLYYAVTQDAMLIFENLSRGFGRQGKRTFMAERQYTRMEDWLTAKLAYEGLPSKTYLSKTLAQYTSKTCSNCGFTITSADYDRVLEKLKKTATGWMTTINGKELKVEGQITYYNRYKRQNVVKDLSVELDRLSEESVNNDISSWTKGRSGEALSLLKKRFSHRPVQEKFVCLNCGFETHADEQAALNIARSWLFLRSQEYKKYQTNKTTGNTDKRAFVETWQSFYRKKLKEVWKPAV

SEQ ID NO: 41603 - protein, 979 aa, synthetic construct
  REGION 1..979: note = engineered CasX variant
QEIKGRINKIRRRLVKDSNTKKAGKTGPMKTLLVRVMTPDLRERLENLRKKPENIPQPISNTSRANLNKLLTDYTEMKKAILHVYWEEFQKDPVGLMSRVAQPASKKIDQNKLKPEMDEKGNLTTAGFACSQCGQPLFVYKLEQVSEKGKAYTNYFGRCNVAEHEKLILLAQLKPEKDSDEAVTYSLGKFGQRALDFYSIHVTKESTHPVKPLAQIAGNRYASHPVGKALSDACMGTIASFLSKYQDIIIEHQKVVKGNQKRLESLRELAGKENLEYPSVTLPPQPHTKEGVDAYNEVIARVRMWVNLNLWQKLKLSRDDAKPLLRLKGFPSFPLVERQANEVDWWDMVCNVKKLINEKKEDGKVFWQNLAIYKRQEALRPYLSSEEDRKKGKKFARYQLGDLLLHLEKKHGEDWGKVYDEAWERIDKKVEGLSKHIKLEEERRSEDAQSKAALTDWLRAKASFVIEGLKEADKDEFCRCELKLQKWYGDLRGKPFAIEAENSILDISGFSKQYNCAFIWQKDGVKKLNLYLIINYFKGGKLRFKKIKPEAFEANRFYTVINKKSGEIVPMEVNFNFDDPNLIILPLAFGKRQGREFIWNDLLSLETGSLKLANGRVIEKTLYNRRTRQDEPALFVALTFERREVLDSSNIKPMNLIGVDRGENIPAVIALTDPEGCPLSRFKDSLGNPTHILRIGESYKEKQRTIQAKKEVEQRRAGGYSRKYASKAKNLADDMVRNTARDLLYYAVTQDAMLIFENLSRGFGRQGKRTFMAERQYTRMEDWLTAKLAYEGLPSKTYLSKTLAQYTSKTCSNCGFTITSADYDRVLEKLKKTATGWMTTINGKELKVEGQITYYNRYKRQNVVKDLSVELDRLSEESVNNDISSWTKGRSGEALSLLKKRFSHRPVQEKFVCLNCGFETHADEQAALNIARSWLFLRSQEYKKYQTNKTTGNTDKRAFVETWQSFYRKKLKEVWKPAV

SEQ ID NO: 41604 - protein, 979 aa, synthetic construct
  REGION 1..979: note = engineered CasX variant
QEIKGRINKIRRRLVKDSNTKKAGKTGPMKTLLVRVMTPDLRERLENLRKKPENIPQPISNTSRANLNKLLTDYTEMKKAILHVYWEEFQKDPVGLMSRVAQPASKKIDQNKLKPEMDEKGNLTTAGFACSQCGQPLFVYKLEQVSEKGKAYTNYFGRCNVAEHEKLILLAQLKPEKDSDEAVTYSLGKFGQRALDFYSIHVTKESTHPVKPLAQIAGNRYASSPVGKALSDACMGTIASFLSKYQDIIIEHQKVVKGNQKRLESLRELAGKENLEYPSVTLPPQPHTKEGVDAYNEVIARVRMWVNLNLWQKLKLSRDDAKPLLRLKGFPSFPLVERQANEVDWWDMVCNVKKLINEKKEDGKVFWQNLAIYKRQEALRPYLSSEEDRKKGKKFARYQLGDLLLHLEKKHGEDWGKVYDEAWERIDKKVEGLSKHIKLEEERRSEDAQSKAALTDWLRAKASFVIEGLKEADKDEFCRCELKLQKWYGDLRGKPFAIEAENSILDISGFSKQYNCAFIWQKDGVKKLNLYLIINYFKGGKLRFKKIKPEAFEANRFYTVINKKSGEIVPMEVNFNFDDPNLIILPLAFGKRQGREFIWNDLLSLETGSLKLANGRVIEKTLYNRRTRQDEPALFVALTFERREVLDSSNIKPMNLIGVDRGENIPAVIALTDPEGCPLSRFKDSLGNPTHILRIGESYKEKQRTIQAKKEVEQRRAGGYSRKYASKAKNLADDMVRNTARDLLYYAVTQDAMLIFENLSRGFGRQGKRTFMAERQYTRMEDWLTAKLAYEGLPSKTYLSKTLAQYTSKTCSNCGFTITSADYDRVLEKLKKTATGWMTTINGKELKVEGQITYYNRYKRQNVVKDLSVELDRLSEESVNNDISSWTKGRSGEALSLLKKRFSHRPVQEKFVCLNCGFETHADEQAALNIARSWLFLRSQEYKKYQTNKTTGNTDKRAFVETWQSFYRKKLKEVWKPAV

SEQ ID NO: 41605 - protein, 979 aa, synthetic construct
  REGION 1..979: note = engineered CasX variant
QEIKGRINKIRRRLVKDSNTKKAGKTGPMKTLLVRVMTPDLRERLENLRKKPENIPQPISNTSRANLNKLLTDYTEMKKAILHVYWEEFQKDPVGLMSRVAQPASKKIDQNKLKPEMDEKGNLTTAGFACSQCGQPLFVYKLEQVSEKGKAYTNYFGRCNVAEHEKLILLAQLKPEKDSDEAVTYSLGKFGQRALDFYSIHVTKESTHPVKPLAQIAGNRYASTPVGKALSDACMGTIASFLSKYQDIIIEHQKVVKGNQKRLESLRELAGKENLEYPSVTLPPQPHTKEGVDAYNEVIARVRMWVNLNLWQKLKLSRDDAKPLLRLKGFPSFPLVERQANEVDWWDMVCNVKKLINEKKEDGKVFWQNLAIYKRQEALRPYLSSEEDRKKGKKFARYQLGDLLLHLEKKHGEDWGKVYDEAWERIDKKVEGLSKHIKLEEERRSEDAQSKAALTDWLRAKASFVIEGLKEADKDEFCRCELKLQKWYGDLRGKPFAIEAENSILDISGFSKQYNCAFIWQKDGVKKLNLYLIINYFKGGKLRFKKIKPEAFEANRFYTVINKKSGEIVPMEVNFNFDDPNLIILPLAFGKRQGREFIWNDLLSLETGSLKLANGRVIEKTLYNRRTRQDEPALFVALTFERREVLDSSNIKPMNLIGVDRGENIPAVIALTDPEGCPLSRFKDSLGNPTHILRIGESYKEKQRTIQAKKEVEQRRAGGYSRKYASKAKNLADDMVRNTARDLLYYAVTQDAMLIFENLSRGFGRQGKRTFMAERQYTRMEDWLTAKLAYEGLPSKTYLSKTLAQYTSKTCSNCGFTITSADYDRVLEKLKKTATGWMTTINGKELKVEGQITYYNRYKRQNVVKDLSVELDRLSEESVNNDISSWTKGRSGEALSLLKKRFSHRPVQEKFVCLNCGFETHADEQAALNIARSWLFLRSQEYKKYQTNKTTGNTDKRAFVETWQSFYRKKLKEVWKPAV

SEQ ID NO: 41606 - protein, 979 aa, synthetic construct
  REGION 1..979: note = engineered CasX variant
QEIKGRINKIRRRLVKDSNTKKAGKTGPMKTLLVRVMTPDLRERLENLRKKPENIPQPISNTSRANLNKLLTDYTEMKKAILHVYWEEFQKDPVGLMSRVAQPASKKIDQNKLKPEMDEKGNLTTAGFACSQCGQPLFVYKLEQVSEKGKAYTNYFGRCNVAEHEKLILLAQLKPEKDSDEAVTYSLGKFGQRALDFYSIHVTKESTHPVKPLAQIAGNRYASAPVGKALSDACMGTIASFLSKYQDIIIEHQKVVKGNQKRLESLRELAGKENLEYPSVTLPPQPHTKEGVDAYNEVIARVRMWVNLNLWQKLKLSRDDAKPLLRLKGFPSFPLVERQANEVDWWDMVCNVKKLINEKKEDGKVFWQNLAIYKRQEALRPYLSSEEDRKKGKKFARYQLGDLLLHLEKKHGEDWGKVYDEAWERIDKKVEGLSKHIKLEEERRSEDAQSKAALTDWLRAKASFVIEGLKEADKDEFCRCELKLQKWYGDLRGKPFAIEAENSILDISGFSKQYNCAFIWQKDGVKKLNLYLIINYFKGGKLRFKKIKPEAFEANRFYTVINKKSGEIVPMEVNFNFDDPNLIILPLAFGKRQGREFIWNDLLSLETGSLKLANGRVIEKTLYNRRTRQDEPALFVALTFERREVLDSSNIKPMNLIGVDRGENIPAVIALTDPEGCPLSRFKDSLGNPTHILRIGESYKEKQRTIQAKKEVEQRRAGGYSRKYASKAKNLADDMVRNTARDLLYYAVTQDAMLIFENLSRGFGRQGKRTFMAERQYTRMEDWLTAKLAYEGLPSKTYLSKTLAQYTSKTCSNCGFTITSADYDRVLEKLKKTATGWMTTINGKELKVEGQITYYNRYKRQNVVKDLSVELDRLSEESVNNDISSWTKGRSGEALSLLKKRFSHRPVQEKFVCLNCGFETHADEQAALNIARSWLFLRSQEYKKYQTNKTTGNTDKRAFVETWQSFYRKKLKEVWKPAV

SEQ ID NO: 41607 - protein, 979 aa, synthetic construct
  REGION 1..979: note = engineered CasX variant
QEIKGRINKIRRRLVKDSNTKKAGKTGPMKTLLVRVMTPDLRERLENLRKKPENIPQPISNTSRANLNKLLTDYTEMKKAILHVYWEEFQKDPVGLMSRVAQPASKKIDQNKLKPEMDEKGNLTTAGFACSQCGQPLFVYKLEQVSEKGKAYTNYFGRCNVAEHEKLILLAQLKPEKDSDEAVTYSLGKFGQRALDFYSIHVTKESTHPVKPLAQIAGNRYASVPVGKALSDACMGTIASFLSKYQDIIIEHQKVVKGNQKRLESLRELAGKENLEYPSVTLPPQPHTKEGVDAYNEVIARVRMWVNLNLWQKLKLSRDDAKPLLRLKGFPSFPLVERQANEVDWWDMVCNVKKLINEKKEDGKVFWQNLAIYKRQEALRPYLSSEEDRKKGKKFARYQLGDLLLHLEKKHGEDWGKVYDEAWERIDKKVEGLSKHIKLEEERRSEDAQSKAALTDWLRAKASFVIEGLKEADKDEFCRCELKLQKWYGDLRGKPFAIEAENSILDISGFSKQYNCAFIWQKDGVKKLNLYLIINYFKGGKLRFKKIKPEAFEANRFYTVINKKSGEIVPMEVNFNFDDPNLIILPLAFGKRQGREFIWNDLLSLETGSLKLANGRVIEKTLYNRRTRQDEPALFVALTFERREVLDSSNIKPMNLIGVDRGENIPAVIALTDPEGCPLSRFKDSLGNPTHILRIGESYKEKQRTIQAKKEVEQRRAGGYSRKYASKAKNLADDMVRNTARDLLYYAVTQDAMLIFENLSRGFGRQGKRTFMAERQYTRMEDWLTAKLAYEGLPSKTYLSKTLAQYTSKTCSNCGFTITSADYDRVLEKLKKTATGWMTTINGKELKVEGQITYYNRYKRQNVVKDLSVELDRLSEESVNNDISSWTKGRSGEALSLLKKRFSHRPVQEKFVCLNCGFETHADEQAALNIARSWLFLRSQEYKKYQTNKTTGNTDKRAFVETWQSFYRKKLKEVWKPAV

SEQ ID NO: 41608 - protein, 979 aa, synthetic construct
  REGION 1..979: note = engineered CasX variant
QEIKGRINKIRRRLVKDSNTKKAGKTGPMKTLLVRVMTPDLRERLENLRKKPENIPQPISNTSRANLNKLLTDYTEMKKAILHVYWEEFQKDPVGLMSRVAQPASKKIDQNKLKPEMDEKGNLTTAGFACSQCGQPLFVYKLEQVSEKGKAYTNYFGRCNVAEHEKLIKLAQLKPEKDSDEAVTYSLGKFGQRALDFYSIHVTKESTHPVKPLAQIAGNRYASGPVGKALSDACMGTIASFLSKYQDIIIEHQKVVKGNQKRLESLRELAGKENLEYPSVTLPPQPHTKEGVDAYNEVIARVRMWVNLNLWQKLKLSRDDAKPLLRLKGFPSFPLVERQANEVDWWDMVCNVKKLINEKKEDGKVFWQNLAIYKRQEALRPYLSSEEDRKKGKKFARYQLGDLLLHLEKKHGEDWGKVYDEAWERIDKKVEGLSKHIKLEEERRSEDAQSKAALTDWLRAKASFVIEGLKEADKDEFCRCELKLQKWYGDLRGKPFAIEAENSILDISGFSKQYNCAFIWQKDGVKKLNLYLIINYFKGGKLRFKKIKPEAFEANRFYTVINKKSGEIVPMEVNFNFDDPNLIILPLAFGKRQGREFIWNDLLSLETGSLKLANGRVIEKTLYNRRTRQDEPALFVALTFERREVLDSSNIKPMNLIGVDRGENIPAVIALTDPEGCPLSRFKDSLGNPTHILRIGESYKEKQRTIQAKKEVEQRRAGGYSRKYASKAKNLADDMVRNTARDLLYYAVTQDAMLIFENLSRGFGRQGKRTFMAERQYTRMEDWLTAKLAYEGLPSKTYLSKTLAQYTSKTCSNCGFTITSADYDRVLEKLKKTATGWMTTINGKELKVEGQITYYNRYKRQNVVKDLSVELDRLSEESVNNDISSWTKGRSGEALSLLKKRFSHRPVQEKFVCLNCGFETHADEQAALNIARSWLFLRSQEYKKYQTNKTTGNTDKRAFVETWQSFYRKKLKEVWKPAV

SEQ ID NO: 41609 - protein, 978 aa, synthetic construct
  REGION 1..978: note = engineered CasX variant
QEIKGRINKIRRRLVKDSNTKKAGKTGPMKTLLVRVMTPDLRERLENLRKKPENIPQPISNTSRANLNKLLTDYTEMKKAILHVYWEEFQKDPVGLMSRVAQPASKKIDQNKLKPEMDEKGNLTTAGFACSQCGQPLFVYKLEQVSEKGKAYTNYFGRCNVAEHEKLILLAQLKPEKDSDEAVTYSLGKFGQRALDFYSIHVTKESTHPVKPLAQIAGNRYASPVGKALSDACMGTIASFLSKYQDIIIEHQKVVKGNQKRLESLRELAGKENLEYPSVTLPPQPHTKEGVDAYNEVIARVRMWVNLNLWQKLKLSRDDAKPLLRLKGFPSFPLVERQANEVDWWDMVCNVKKLINEKKEDGKVFWQNLAIYKRQEALRPYLSSEEDRKKGKKFARYQLGDLLLHLEKKHGEDWGKVYDEAWERIDKKVEGLSKHIKLEEERRSEDAQSKAALTDWLRAKASFVIEGLKEADKDEFCRCELKLQKWYGDLRGKPFAIEAENSILDISGFSKQYNCAFIWQKDGVKKLNLYLIINYFKGGKLRFKKIKPEAFEANRFYTVINKKSGEIVPMEVNFNFDDPNLIILPLAFGKRQGREFIWNDLLSLETGSLKLANGRVIEKTLYNRRTRQDEPALFVALTFERREVLDSSNIKPMNLIGVDRGENIPAVIALTDPEGCPLSRFKDSLGNPTHILRIGESYKEKQRTIQAKKEVEQRRAGGYSRKYASKAKNLADDMVRNTARDLLYYAVTQDAMLIFENLSRGFGRQGKRTFMAERQYTRMEDWLTAKLAYEGLPSKTYLSKTLAQYTSKTCSNCGFTITSADYDRVLEKLKKTATGWMTTINGKELKVEGQITYYNRYKRQNVVKDLSVELDRLSEESVNNDISSWTKGRSGEALSLLKKRFSHRPVQEKFVCLNCGFETHADEQAALNIARSWLFLRSQEYKKYQTNKTTGNTDKRAFVETWQSFYRKKLKEVWKPAV

SEQ ID NO: 41610 - protein, 979 aa, synthetic construct
  REGION 1..979: note = engineered CasX variant
QEIKGRINKIRRRLVKDSNTKKAGKTGPMKTLLVRVMTPDLRERLENLRKKPENIPQPISNTSRANLNKLLTDYTEMKKAILHVYWEEFQKDPVGLMSRVAQPASKKIDQNKLKPEMDEKGNLTTAGFACSQCGQPLFVYKLEQVSEKGKAYTNYFGRCNVAEHEKLILLAQLKPEKDSDEAVTYSLGKFGQRALDFYSIHVTKESTHPVKPLAQIAGNRYASYPVGKALSDACMGTIASFLSKYQDIIIEHQKVVKGNQKRLESLRELAGKENLEYPSVTLPPQPHTKEGVDAYNEVIARVRMWVNLNLWQKLKLSRDDAKPLLRLKGFPSFPLVERQANEVDWWDMVCNVKKLINEKKEDGKVFWQNLAGYKRQEALRPYLSSEEDREKGKKFARYQLGDLLLHLEKKHGEDWGKVYDEAWERIDKKVEGLSKHIKLEEERRSEDAQSKAALTDWLRAKASFVIEGLKEADKDEFCRCELKLQKWYGDLRGKPFAIEAENSILDISGFSKQYNCAFIWQKDGVKKLNLYLIINYFKGGKLRFKKIKPEAFEANRFYTVINKKSGEIVPMEVNFNFDDPNLIILPLAFGKRQGREFIWNDLLSLETGSLKLANGRVIEKTLYNRRTRQDEPALFVALTFERREVLDSSNIKPMNLIGVDRGENIPAVIALTDPEGCPLSRFKDSLGNPTHILRIGESYKEKQRTIQAKKEVEQRRAGGYSRKYASKAKNLADDMVRNTARDLLYYAVTQDAMLIFENLSRGFGRQGKRTFMAERQYTRMEDWLTAKLAYEGLPSKTYLSKTLAQYTSKTCSNCGFTITSADYDRVLEKLKKTATGWMTTINGKELKVEGQITYYNRYKRQNVVKDLSVELDRLSEESVNNDISSWTKGRSGEALSLLKKRFSHRPVQEKFVCLNCGFETHADEQAALNIARSWLFLRSQEYKKYQTNKTTGNTDKRAFVETWQSFYRKKLKEVWKPAV

SEQ ID NO: 41611 - protein, 979 aa, synthetic construct
  REGION 1..979: note = engineered CasX variant
QEIKGRINKIRRRLVKDSNTKKAGKTGPMKTLLVRVMTPDLRERLENLRKKPENIPQPISNTSRANLNKLLTDYTEMKKAILHVYWEEFQKDPVGLMSRVAQPASKKIDQNKLKPEMDEKGNLTTAGFACSQCGQPLFVYKLEQVSEKGKAYTNYFGRCNVAEHEKLILLAQLKPEKDSDEAVTYSLGKFGQRALDFYSIHVTKESTHPVKPLAQIAGNRYASHPVGKALSDACMGTIASFLSKYQDIIIEHQKVVKGNQKRLESLRELAGKENLEYPSVTLPPQPHTKEGVDAYNEVIARVRMWVNLNLWQKLKLSRDDAKPLLRLKGFPSFPLVERQANEVDWWDMVCNVKKLINEKKEDGKVFWQNLAGYKRQEALRPYLSSEEDREKGKKFARYQLGDLLLHLEKKHGEDWGKVYDEAWERIDKKVEGLSKHIKLEEERRSEDAQSKAALTDWLRAKASFVIEGLKEADKDEFCRCELKLQKWYGDLRGKPFAIEAENSILDISGFSKQYNCAFIWQKDGVKKLNLYLIINYFKGGKLRFKKIKPEAFEANRFYTVINKKSGEIVPMEVNFNFDDPNLIILPLAFGKRQGREFIWNDLLSLETGSLKLANGRVIEKTLYNRRTRQDEPALFVALTFERREVLDSSNIKPMNLIGVDRGENIPAVIALTDPEGCPLSRFKDSLGNPTHILRIGESYKEKQRTIQAKKEVEQRRAGGYSRKYASKAKNLADDMVRNTARDLLYYAVTQDAMLIFENLSRGFGRQGKRTFMAERQYTRMEDWLTAKLAYEGLPSKTYLSKTLAQYTSKTCSNCGFTITSADYDRVLEKLKKTATGWMTTINGKELKVEGQITYYNRYKRQNVVKDLSVELDRLSEESVNNDISSWTKGRSGEALSLLKKRFSHRPVQEKFVCLNCGFETHADEQAALNIARSWLFLRSQEYKKYQTNKTTGNTDKRAFVETWQSFYRKKLKEVWKPAV

SEQ ID NO: 41612 - protein, 979 aa, synthetic construct
  REGION 1..979: note = engineered CasX variant
QEIKGRINKIRRRLVKDSNTKKAGKTGPMKTLLVRVMTPDLRERLENLRKKPENIPQPISNTSRANLNKLLTDYTEMKKAILHVYWEEFQKDPVGLMSRVAQPASKKIDQNKLKPEMDEKGNLTTAGFACSQCGQPLFVYKLEQVSEKGKAYTNYFGRCNVAEHEKLILLAQLKPEKDSDEAVTYSLGKFGQRALDFYSIHVTKESTHPVKPLAQIAGNRYASSPVGKALSDACMGTIASFLSKYQDIIIEHQKVVKGNQKRLESLRELAGKENLEYPSVTLPPQPHTKEGVDAYNEVIARVRMWVNLNLWQKLKLSRDDAKPLLRLKGFPSFPLVERQANEVDWWDMVCNVKKLINEKKEDGKVFWQNLAGYKRQEALRPYLSSEEDREKGKKFARYQLGDLLLHLEKKHGEDWGKVYDEAWERIDKKVEGLSKHIKLEEERRSEDAQSKAALTDWLRAKASFVIEGLKEADKDEFCRCELKLQKWYGDLRGKPFAIEAENSILDISGFSKQYNCAFIWQKDGVKKLNLYLIINYFKGGKLRFKKIKPEAFEANRFYTVINKKSGEIVPMEVNFNFDDPNLIILPLAFGKRQGREFIWNDLLSLETGSLKLANGRVIEKTLYNRRTRQDEPALFVALTFERREVLDSSNIKPMNLIGVDRGENIPAVIALTDPEGCPLSRFKDSLGNPTHILRIGESYKEKQRTIQAKKEVEQRRAGGYSRKYASKAKNLADDMVRNTARDLLYYAVTQDAMLIFENLSRGFGRQGKRTFMAERQYTRMEDWLTAKLAYEGLPSKTYLSKTLAQYTSKTCSNCGFTITSADYDRVLEKLKKTATGWMTTINGKELKVEGQITYYNRYKRQNVVKDLSVELDRLSEESVNNDISSWTKGRSGEALSLLKKRFSHRPVQEKFVCLNCGFETHADEQAALNIARSWLFLRSQEYKKYQTNKTTGNTDKRAFVETWQSFYRKKLKEVWKPAV

SEQ ID NO: 41613 - protein, 979 aa, synthetic construct
  REGION 1..979: note = engineered CasX variant
QEIKGRINKIRRRLVKDSNTKKAGKTGPMKTLLVRVMTPDLRERLENLRKKPENIPQPISNTSRANLNKLLTDYTEMKKAILHVYWEEFQKDPVGLMSRVAQPASKKIDQNKLKPEMDEKGNLTTAGFACSQCGQPLFVYKLEQVSEKGKAYTNYFGRCNVAEHEKLILLAQLKPEKDSDEAVTYSLGKFGQRALDFYSIHVTKESTHPVKPLAQIAGNRYASTPVGKALSDACMGTIASFLSKYQDIIIEHQKVVKGNQKRLESLRELAGKENLEYPSVTLPPQPHTKEGVDAYNEVIARVRMWVNLNLWQKLKLSRDDAKPLLRLKGFPSFPLVERQANEVDWWDMVCNVKKLINEKKEDGKVFWQNLAGYKRQEALRPYLSSEEDREKGKKFARYQLGDLLLHLEKKHGEDWGKVYDEAWERIDKKVEGLSKHIKLEEERRSEDAQSKAALTDWLRAKASFVIEGLKEADKDEFCRCELKLQKWYGDLRGKPFAIEAENSILDISGFSKQYNCAFIWQKDGVKKLNLYLIINYFKGGKLRFKKIKPEAFEANRFYTVINKKSGEIVPMEVNFNFDDPNLIILPLAFGKRQGREFIWNDLLSLETGSLKLANGRVIEKTLYNRRTRQDEPALFVALTFERREVLDSSNIKPMNLIGVDRGENIPAVIALTDPEGCPLSRFKDSLGNPTHILRIGESYKEKQRTIQAKKEVEQRRAGGYSRKYASKAKNLADDMVRNTARDLLYYAVTQDAMLIFENLSRGFGRQGKRTFMAERQYTRMEDWLTAKLAYEGLPSKTYLSKTLAQYTSKTCSNCGFTITSADYDRVLEKLKKTATGWMTTINGKELKVEGQITYYNRYKRQNVVKDLSVELDRLSEESVNNDISSWTKGRSGEALSLLKKRFSHRPVQEKFVCLNCGFETHADEQAALNIARSWLFLRSQEYKKYQTNKTTGNTDKRAFVETWQSFYRKKLKEVWKPAV

SEQ ID NO: 41614 - protein, 979 aa, synthetic construct
  REGION 1..979: note = engineered CasX variant
QEIKGRINKIRRRLVKDSNTKKAGKTGPMKTLLVRVMTPDLRERLENLRKKPENIPQPISNTSRANLNKLLTDYTEMKKAILHVYWEEFQKDPVGLMSRVAQPASKKIDQNKLKPEMDEKGNLTTAGFACSQCGQPLFVYKLEQVSEKGKAYTNYFGRCNVAEHEKLILLAQLKPEKDSDEAVTYSLGKFGQRALDFYSIHVTKESTHPVKPLAQIAGNRYASAPVGKALSDACMGTIASFLSKYQDIIIEHQKVVKGNQKRLESLRELAGKENLEYPSVTLPPQPHTKEGVDAYNEVIARVRMWVNLNLWQKLKLSRDDAKPLLRLKGFPSFPLVERQANEVDWWDMVCNVKKLINEKKEDGKVFWQNLAGYKRQEALRPYLSSEEDREKGKKFARYQLGDLLLHLEKKHGEDWGKVYDEAWERIDKKVEGLSKHIKLEEERRSEDAQSKAALTDWLRAKASFVIEGLKEADKDEFCRCELKLQKWYGDLRGKPFAIEAENSILDISGFSKQYNCAFIWQKDGVKKLNLYLIINYFKGGKLRFKKIKPEAFEANRFYTVINKKSGEIVPMEVNFNFDDPNLIILPLAFGKRQGREFIWNDLLSLETGSLKLANGRVIEKTLYNRRTRQDEPALFVALTFERREVLDSSNIKPMNLIGVDRGENIPAVIALTDPEGCPLSRFKDSLGNPTHILRIGESYKEKQRTIQAKKEVEQRRAGGYSRKYASKAKNLADDMVRNTARDLLYYAVTQDAMLIFENLSRGFGRQGKRTFMAERQYTRMEDWLTAKLAYEGLPSKTYLSKTLAQYTSKTCSNCGFTITSADYDRVLEKLKKTATGWMTTINGKELKVEGQITYYNRYKRQNVVKDLSVELDRLSEESVNNDISSWTKGRSGEALSLLKKRFSHRPVQEKFVCLNCGFETHADEQAALNIARSWLFLRSQEYKKYQTNKTTGNTDKRAFVETWQSFYRKKLKEVWKPAV

SEQ ID NO: 41615 - protein, 979 aa, synthetic construct
  REGION 1..979: note = engineered CasX variant
QEIKGRINKIRRRLVKDSNTKKAGKTGPMKTLLVRVMTPDLRERLENLRKKPENIPQPISNTSRANLNKLLTDYTEMKKAILHVYWEEFQKDPVGLMSRVAQPASKKIDQNKLKPEMDEKGNLTTAGFACSQCGQPLFVYKLEQVSEKGKAYTNYFGRCNVAEHEKLILLAQLKPEKDSDEAVTYSLGKFGQRALDFYSIHVTKESTHPVKPLAQIAGNRYASVPVGKALSDACMGTIASFLSKYQDIIIEHQKVVKGNQKRLESLRELAGKENLEYPSVTLPPQPHTKEGVDAYNEVIARVRMWVNLNLWQKLKLSRDDAKPLLRLKGFPSFPLVERQANEVDWWDMVCNVKKLINEKKEDGKVFWQNLAGYKRQEALRPYLSSEEDREKGKKFARYQLGDLLLHLEKKHGEDWGKVYDEAWERIDKKVEGLSKHIKLEEERRSEDAQSKAALTDWLRAKASFVIEGLKEADKDEFCRCELKLQKWYGDLRGKPFAIEAENSILDISGFSKQYNCAFIWQKDGVKKLNLYLIINYFKGGKLRFKKIKPEAFEANRFYTVINKKSGEIVPMEVNFNFDDPNLIILPLAFGKRQGREFIWNDLLSLETGSLKLANGRVIEKTLYNRRTRQDEPALFVALTFERREVLDSSNIKPMNLIGVDRGENIPAVIALTDPEGCPLSRFKDSLGNPTHILRIGESYKEKQRTIQAKKEVEQRRAGGYSRKYASKAKNLADDMVRNTARDLLYYAVTQDAMLIFENLSRGFGRQGKRTFMAERQYTRMEDWLTAKLAYEGLPSKTYLSKTLAQYTSKTCSNCGFTITSADYDRVLEKLKKTATGWMTTINGKELKVEGQITYYNRYKRQNVVKDLSVELDRLSEESVNNDISSWTKGRSGEALSLLKKRFSHRPVQEKFVCLNCGFETHADEQAALNIARSWLFLRSQEYKKYQTNKTTGNTDKRAFVETWQSFYRKKLKEVWKPAV

SEQ ID NO: 41616 - protein, 979 aa, synthetic construct
  REGION 1..979: note = engineered CasX variant
QEIKGRINKIRRRLVKDSNTKKAGKTGPMKTLLVRVMTPDLRERLENLRKKPENIPQPISNTSRANLNKLLTDYTEMKKAILHVYWEEFQKDPVGLMSRVAQPASKKIDQNKLKPEMDEKGNLTTAGFACSQCGQPLFVYKLEQVSEKGKAYTNYFGRCNVAEHEKLIKLAQLKPEKDSDEAVTYSLGKFGQRALDFYSIHVTKESTHPVKPLAQIAGNRYASGPVGKALSDACMGTIASFLSKYQDIIIEHQKVVKGNQKRLESLRELAGKENLEYPSVTLPPQPHTKEGVDAYNEVIARVRMWVNLNLWQKLKLSRDDAKPLLRLKGFPSFPLVERQANEVDWWDMVCNVKKLINEKKEDGKVFWQNLAGYKRQEALRPYLSSEEDREKGKKFARYQLGDLLLHLEKKHGEDWGKVYDEAWERIDKKVEGLSKHIKLEEERRSEDAQSKAALTDWLRAKASFVIEGLKEADKDEFCRCELKLQKWYGDLRGKPFAIEAENSILDISGFSKQYNCAFIWQKDGVKKLNLYLIINYFKGGKLRFKKIKPEAFEANRFYTVINKKSGEIVPMEVNFNFDDPNLIILPLAFGKRQGREFIWNDLLSLETGSLKLANGRVIEKTLYNRRTRQDEPALFVALTFERREVLDSSNIKPMNLIGVDRGENIPAVIALTDPEGCPLSRFKDSLGNPTHILRIGESYKEKQRTIQAKKEVEQRRAGGYSRKYASKAKNLADDMVRNTARDLLYYAVTQDAMLIFENLSRGFGRQGKRTFMAERQYTRMEDWLTAKLAYEGLPSKTYLSKTLAQYTSKTCSNCGFTITSADYDRVLEKLKKTATGWMTTINGKELKVEGQITYYNRYKRQNVVKDLSVELDRLSEESVNNDISSWTKGRSGEALSLLKKRFSHRPVQEKFVCLNCGFETHADEQAALNIARSWLFLRSQEYKKYQTNKTTGNTDKRAFVETWQSFYRKKLKEVWKPAV

SEQ ID NO: 41617 - protein, 978 aa, synthetic construct
  REGION 1..978: note = engineered CasX variant
QEIKGRINKIRRRLVKDSNTKKAGKTGPMKTLLVRVMTPDLRERLENLRKKPENIPQPISNTSRANLNKLLTDYTEMKKAILHVYWEEFQKDPVGLMSRVAQPASKKIDQNKLKPEMDEKGNLTTAGFACSQCGQPLFVYKLEQVSEKGKAYTNYFGRCNVAEHEKLILLAQLKPEKDSDEAVTYSLGKFGQRALDFYSIHVTKESTHPVKPLAQIAGNRYASPVGKALSDACMGTIASFLSKYQDIIIEHQKVVKGNQKRLESLRELAGKENLEYPSVTLPPQPHTKEGVDAYNEVIARVRMWVNLNLWQKLKLSRDDAKPLLRLKGFPSFPLVERQANEVDWWDMVCNVKKLINEKKEDGKVFWQNLAGYKRQEALRPYLSSEEDREKGKKFARYQLGDLLLHLEKKHGEDWGKVYDEAWERIDKKVEGLSKHIKLEEERRSEDAQSKAALTDWLRAKASFVIEGLKEADKDEFCRCELKLQKWYGDLRGKPFAIEAENSILDISGFSKQYNCAFIWQKDGVKKLNLYLIINYFKGGKLRFKKIKPEAFEANRFYTVINKKSGEIVPMEVNFNFDDPNLIILPLAFGKRQGREFIWNDLLSLETGSLKLANGRVIEKTLYNRRTRQDEPALFVALTFERREVLDSSNIKPMNLIGVDRGENIPAVIALTDPEGCPLSRFKDSLGNPTHILRIGESYKEKQRTIQAKKEVEQRRAGGYSRKYASKAKNLADDMVRNTARDLLYYAVTQDAMLIFENLSRGFGRQGKRTFMAERQYTRMEDWLTAKLAYEGLPSKTYLSKTLAQYTSKTCSNCGFTITSADYDRVLEKLKKTATGWMTTINGKELKVEGQITYYNRYKRQNVVKDLSVELDRLSEESVNNDISSWTKGRSGEALSLLKKRFSHRPVQEKFVCLNCGFETHADEQAALNIARSWLFLRSQEYKKYQTNKTTGNTDKRAFVETWQSFYRKKLKEVWKPAV

SEQ ID NO: 41618 - protein, 979 aa, synthetic construct
  REGION 1..979: note = engineered CasX variant
QEIKGRINKIRRRLVKDSNTKKAGKTGPMKTLLVRVMTPDLRERLENLRKKPENIPQPISNTSRANLNKLLTDYTEMKKAILHVYWEEFQKDPVGLMSRVAQPASKKIDQNKLKPEMDEKGNLTTAGFACSQCGQPLFVYKLEQVSEKGKAYTNYFGRCNVAEHEKLILLAQLKPEKDSDEAVTYSLGKFGQRALDFYSIHVTKESTHPVKPLAQIAGNRYASYPVGKALSDACMGTIASFLSKYQDIIIEHQKVVKGNQKRLESLRELAGKENLEYPSVTLPPQPHTKEGVDAYNEVIARVRMWVNLNLWQKLKLSRDDAKPLLRLKGFPSFPLVERQANEVDWWDMVCNVKKLINEKKEDGKVFWQNLAGYKRQEALRPYLSSEEDRKKGKKFARYQLGDLLLHLEKKHGEDWGKVYDEAWERIDKKVEGLSKHIKLEEERRSEDAQSKAALTDWLRAKASFVIEGLKEADKDEFCRCELKLQKWYGDLRGKPFAIEAENSILDISGFSKQYNCAFIWQKDGVKKLNLYLIINYFKGGKLRFKKIKPEAFEANRFYTVINKKSGEIVIMEVNFNFDDPNLIILPLAFGKRQGREFIWNDLLSLETGSLKLANGRVIEKTLYNRRTRQDEPALFVALTFERREVLDSSNIKPMNLIGVDRGENIPAVIALTDPEGCPLSRFKDSLGNPTHILRIGESYKEKQRTIQAKKEVEQRRAGGYSRKYASKAKNLADDMVRNTARDLLYYAVTQDAMLIFENLSRGFGRQGKRTFMAERQYTRMEDWLTAKLAYEGLPSKTYLSKTLAQYTSKTCSNCGFTITSADYDRVLEKLKKTATGWMTTINGKELKVEGQITYYNRYKRQNVVKDLSVELDRLSEESVNNDISSWTKGRSGEALSLLKKRFSHRPVQEKFVCLNCGFETHADEQAALNIARSWLFLRSQEYKKYQTNKTTGNTDKRAFVETWQSFYRKKLKEVWKPAV

SEQ ID NO: 41619 - protein, 979 aa, synthetic construct
  REGION 1..979: note = engineered CasX variant
QEIKGRINKIRRRLVKDSNTKKAGKTGPMKTLLVRVMTPDLRERLENLRKKPENIPQPISNTSRANLNKLLTDYTEMKKAILHVYWEEFQKDPVGLMSRVAQPASKKIDQNKLKPEMDEKGNLTTAGFACSQCGQPLFVYKLEQVSEKGKAYTNYFGRCNVAEHEKLILLAQLKPEKDSDEAVTYSLGKFGQRALDFYSIHVTKESTHPVKPLAQIAGNRYASHPVGKALSDACMGTIASFLSKYQDIIIEHQKVVKGNQKRLESLRELAGKENLEYPSVTLPPQPHTKEGVDAYNEVIARVRMWVNLNLWQKLKLSRDDAKPLLRLKGFPSFPLVERQANEVDWWDMVCNVKKLINEKKEDGKVFWQNLAGYKRQEALRPYLSSEEDRKKGKKFARYQLGDLLLHLEKKHGEDWGKVYDEAWERIDKKVEGLSKHIKLEEERRSEDAQSKAALTDWLRAKASFVIEGLKEADKDEFCRCELKLQKWYGDLRGKPFAIEAENSILDISGFSKQYNCAFIWQKDGVKKLNLYLIINYFKGGKLRFKKIKPEAFEANRFYTVINKKSGEIVIMEVNFNFDDPNLIILPLAFGKRQGREFIWNDLLSLETGSLKLANGRVIEKTLYNRRTRQDEPALFVALTFERREVLDSSNIKPMNLIGVDRGENIPAVIALTDPEGCPLSRFKDSLGNPTHILRIGESYKEKQRTIQAKKEVEQRRAGGYSRKYASKAKNLADDMVRNTARDLLYYAVTQDAMLIFENLSRGFGRQGKRTFMAERQYTRMEDWLTAKLAYEGLPSKTYLSKTLAQYTSKTCSNCGFTITSADYDRVLEKLKKTATGWMTTINGKELKVEGQITYYNRYKRQNVVKDLSVELDRLSEESVNNDISSWTKGRSGEALSLLKKRFSHRPVQEKFVCLNCGFETHADEQAALNIARSWLFLRSQEYKKYQTNKTTGNTDKRAFVETWQSFYRKKLKEVWKPAV

SEQ ID NO: 41620 - protein, 979 aa, synthetic construct
  REGION 1..979: note = engineered CasX variant
QEIKGRINKIRRRLVKDSNTKKAGKTGPMKTLLVRVMTPDLRERLENLRKKPENIPQPISNTSRANLNKLLTDYTEMKKAILHVYWEEFQKDPVGLMSRVAQPASKKIDQNKLKPEMDEKGNLTTAGFACSQCGQPLFVYKLEQVSEKGKAYTNYFGRCNVAEHEKLILLAQLKPEKDSDEAVTYSLGKFGQRALDFYSIHVTKESTHPVKPLAQIAGNRYASSPVGKALSDACMGTIASFLSKYQDIIIEHQKVVKGNQKRLESLRELAGKENLEYPSVTLPPQPHTKEGVDAYNEVIARVRMWVNLNLWQKLKLSRDDAKPLLRLKGFPSFPLVERQANEVDWWDMVCNVKKLINEKKEDGKVFWQNLAGYKRQEALRPYLSSEEDRKKGKKFARYQLGDLLLHLEKKHGEDWGKVYDEAWERIDKKVEGLSKHIKLEEERRSEDAQSKAALTDWLRAKASFVIEGLKEADKDEFCRCELKLQKWYGDLRGKPFAIEAENSILDISGFSKQYNCAFIWQKDGVKKLNLYLIINYFKGGKLRFKKIKPEAFEANRFYTVINKKSGEIVIMEVNFNFDDPNLIILPLAFGKRQGREFIWNDLLSLETGSLKLANGRVIEKTLYNRRTRQDEPALFVALTFERREVLDSSNIKPMNLIGVDRGENIPAVIALTDPEGCPLSRFKDSLGNPTHILRIGESYKEKQRTIQAKKEVEQRRAGGYSRKYASKAKNLADDMVRNTARDLLYYAVTQDAMLIFENLSRGFGRQGKRTFMAERQYTRMEDWLTAKLAYEGLPSKTYLSKTLAQYTSKTCSNCGFTITSADYDRVLEKLKKTATGWMTTINGKELKVEGQITYYNRYKRQNVVKDLSVELDRLSEESVNNDISSWTKGRSGEALSLLKKRFSHRPVQEKFVCLNCGFETHADEQAALNIARSWLFLRSQEYKKYQTNKTTGNTDKRAFVETWQSFYRKKLKEVWKPAV

SEQ ID NO: 41621 - protein, 979 aa, synthetic construct
  REGION 1..979: note = engineered CasX variant
QEIKGRINKIRRRLVKDSNTKKAGKTGPMKTLLVRVMTPDLRERLENLRKKPENIPQPISNTSRANLNKLLTDYTEMKKAILHVYWEEFQKDPVGLMSRVAQPASKKIDQNKLKPEMDEKGNLTTAGFACSQCGQPLFVYKLEQVSEKGKAYTNYFGRCNVAEHEKLILLAQLKPEKDSDEAVTYSLGKFGQRALDFYSIHVTKESTHPVKPLAQIAGNRYASTPVGKALSDACMGTIASFLSKYQDIIIEHQKVVKGNQKRLESLRELAGKENLEYPSVTLPPQPHTKEGVDAYNEVIARVRMWVNLNLWQKLKLSRDDAKPLLRLKGFPSFPLVERQANEVDWWDMVCNVKKLINEKKEDGKVFWQNLAGYKRQEALRPYLSSEEDRKKGKKFARYQLGDLLLHLEKKHGEDWGKVYDEAWERIDKKVEGLSKHIKLEEERRSEDAQSKAALTDWLRAKASFVIEGLKEADKDEFCRCELKLQKWYGDLRGKPFAIEAENSILDISGFSKQYNCAFIWQKDGVKKLNLYLIINYFKGGKLRFKKIKPEAFEANRFYTVINKKSGEIVIMEVNFNFDDPNLIILPLAFGKRQGREFIWNDLLSLETGSLKLANGRVIEKTLYNRRTRQDEPALFVALTFERREVLDSSNIKPMNLIGVDRGENIPAVIALTDPEGCPLSRFKDSLGNPTHILRIGESYKEKQRTIQAKKEVEQRRAGGYSRKYASKAKNLADDMVRNTARDLLYYAVTQDAMLIFENLSRGFGRQGKRTFMAERQYTRMEDWLTAKLAYEGLPSKTYLSKTLAQYTSKTCSNCGFTITSADYDRVLEKLKKTATGWMTTINGKELKVEGQITYYNRYKRQNVVKDLSVELDRLSEESVNNDISSWTKGRSGEALSLLKKRFSHRPVQEKFVCLNCGFETHADEQAALNIARSWLFLRSQEYKKYQTNKTTGNTDKRAFVETWQSFYRKKLKEVWKPAV

SEQ ID NO: 41622 - protein, 979 aa, synthetic construct
  REGION 1..979: note = engineered CasX variant
QEIKGRINKIRRRLVKDSNTKKAGKTGPMKTLLVRVMTPDLRERLENLRKKPENIPQPISNTSRANLNKLLTDYTEMKKAILHVYWEEFQKDPVGLMSRVAQPASKKIDQNKLKPEMDEKGNLTTAGFACSQCGQPLFVYKLEQVSEKGKAYTNYFGRCNVAEHEKLILLAQLKPEKDSDEAVTYSLGKFGQRALDFYSIHVTKESTHPVKPLAQIAGNRYASAPVGKALSDACMGTIASFLSKYQDIIIEHQKVVKGNQKRLESLRELAGKENLEYPSVTLPPQPHTKEGVDAYNEVIARVRMWVNLNLWQKLKLSRDDAKPLLRLKGFPSFPLVERQANEVDWWDMVCNVKKLINEKKEDGKVFWQNLAGYKRQEALRPYLSSEEDRKKGKKFARYQLGDLLLHLEKKHGEDWGKVYDEAWERIDKKVEGLSKHIKLEEERRSEDAQSKAALTDWLRAKASFVIEGLKEADKDEFCRCELKLQKWYGDLRGKPFAIEAENSILDISGFSKQYNCAFIWQKDGVKKLNLYLIINYFKGGKLRFKKIKPEAFEANRFYTVINKKSGEIVIMEVNFNFDDPNLIILPLAFGKRQGREFIWNDLLSLETGSLKLANGRVIEKTLYNRRTRQDEPALFVALTFERREVLDSSNIKPMNLIGVDRGENIPAVIALTDPEGCPLSRFKDSLGNPTHILRIGESYKEKQRTIQAKKEVEQRRAGGYSRKYASKAKNLADDMVRNTARDLLYYAVTQDAMLIFENLSRGFGRQGKRTFMAERQYTRMEDWLTAKLAYEGLPSKTYLSKTLAQYTSKTCSNCGFTITSADYDRVLEKLKKTATGWMTTINGKELKVEGQITYYNRYKRQNVVKDLSVELDRLSEESVNNDISSWTKGRSGEALSLLKKRFSHRPVQEKFVCLNCGFETHADEQAALNIARSWLFLRSQEYKKYQTNKTTGNTDKRAFVETWQSFYRKKLKEVWKPAV

SEQ ID NO: 41623 - protein, 979 aa, synthetic construct
  REGION 1..979: note = engineered CasX variant
QEIKGRINKIRRRLVKDSNTKKAGKTGPMKTLLVRVMTPDLRERLENLRKKPENIPQPISNTSRANLNKLLTDYTEMKKAILHVYWEEFQKDPVGLMSRVAQPASKKIDQNKLKPEMDEKGNLTTAGFACSQCGQPLFVYKLEQVSEKGKAYTNYFGRCNVAEHEKLILLAQLKPEKDSDEAVTYSLGKFGQRALDFYSIHVTKESTHPVKPLAQIAGNRYASVPVGKALSDACMGTIASFLSKYQDIIIEHQKVVKGNQKRLESLRELAGKENLEYPSVTLPPQPHTKEGVDAYNEVIARVRMWVNLNLWQKLKLSRDDAKPLLRLKGFPSFPLVERQANEVDWWDMVCNVKKLINEKKEDGKVFWQNLAGYKRQEALRPYLSSEEDRKKGKKFARYQLGDLLLHLEKKHGEDWGKVYDEAWERIDKKVEGLSKHIKLEEERRSEDAQSKAALTDWLRAKASFVIEGLKEADKDEFCRCELKLQKWYGDLRGKPFAIEAENSILDISGFSKQYNCAFIWQKDGVKKLNLYLIINYFKGGKLRFKKIKPEAFEANRFYTVINKKSGEIVIMEVNFNFDDPNLIILPLAFGKRQGREFIWNDLLSLETGSLKLANGRVIEKTLYNRRTRQDEPALFVALTFERREVLDSSNIKPMNLIGVDRGENIPAVIALTDPEGCPLSRFKDSLGNPTHILRIGESYKEKQRTIQAKKEVEQRRAGGYSRKYASKAKNLADDMVRNTARDLLYYAVTQDAMLIFENLSRGFGRQGKRTFMAERQYTRMEDWLTAKLAYEGLPSKTYLSKTLAQYTSKTCSNCGFTITSADYDRVLEKLKKTATGWMTTINGKELKVEGQITYYNRYKRQNVVKDLSVELDRLSEESVNNDISSWTKGRSGEALSLLKKRFSHRPVQEKFVCLNCGFETHADEQAALNIARSWLFLRSQEYKKYQTNKTTGNTDKRAFVETWQSFYRKKLKEVWKPAV

SEQ ID NO: 41624 - protein, 979 aa, synthetic construct
  REGION 1..979: note = engineered CasX variant
QEIKGRINKIRRRLVKDSNTKKAGKTGPMKTLLVRVMTPDLRERLENLRKKPENIPQPISNTSRANLNKLLTDYTEMKKAILHVYWEEFQKDPVGLMSRVAQPASKKIDQNKLKPEMDEKGNLTTAGFACSQCGQPLFVYKLEQVSEKGKAYTNYFGRCNVAEHEKLIKLAQLKPEKDSDEAVTYSLGKFGQRALDFYSIHVTKESTHPVKPLAQIAGNRYASGPVGKALSDACMGTIASFLSKYQDIIIEHQKVVKGNQKRLESLRELAGKENLEYPSVTLPPQPHTKEGVDAYNEVIARVRMWVNLNLWQKLKLSRDDAKPLLRLKGFPSFPLVERQANEVDWWDMVCNVKKLINEKKEDGKVFWQNLAGYKRQEALRPYLSSEEDRKKGKKFARYQLGDLLLHLEKKHGEDWGKVYDEAWERIDKKVEGLSKHIKLEEERRSEDAQSKAALTDWLRAKASFVIEGLKEADKDEFCRCELKLQKWYGDLRGKPFAIEAENSILDISGFSKQYNCAFIWQKDGVKKLNLYLIINYFKGGKLRFKKIKPEAFEANRFYTVINKKSGEIVIMEVNFNFDDPNLIILPLAFGKRQGREFIWNDLLSLETGSLKLANGRVIEKTLYNRRTRQDEPALFVALTFERREVLDSSNIKPMNLIGVDRGENIPAVIALTDPEGCPLSRFKDSLGNPTHILRIGESYKEKQRTIQAKKEVEQRRAGGYSRKYASKAKNLADDMVRNTARDLLYYAVTQDAMLIFENLSRGFGRQGKRTFMAERQYTRMEDWLTAKLAYEGLPSKTYLSKTLAQYTSKTCSNCGFTITSADYDRVLEKLKKTATGWMTTINGKELKVEGQITYYNRYKRQNVVKDLSVELDRLSEESVNNDISSWTKGRSGEALSLLKKRFSHRPVQEKFVCLNCGFETHADEQAALNIARSWLFLRSQEYKKYQTNKTTGNTDKRAFVETWQSFYRKKLKEVWKPAV

SEQ ID NO: 41625 - protein, 978 aa, synthetic construct
  REGION 1..978: note = engineered CasX variant
QEIKGRINKIRRRLVKDSNTKKAGKTGPMKTLLVRVMTPDLRERLENLRKKPENIPQPISNTSRANLNKLLTDYTEMKKAILHVYWEEFQKDPVGLMSRVAQPASKKIDQNKLKPEMDEKGNLTTAGFACSQCGQPLFVYKLEQVSEKGKAYTNYFGRCNVAEHEKLILLAQLKPEKDSDEAVTYSLGKFGQRALDFYSIHVTKESTHPVKPLAQIAGNRYASPVGKALSDACMGTIASFLSKYQDIIIEHQKVVKGNQKRLESLRELAGKENLEYPSVTLPPQPHTKEGVDAYNEVIARVRMWVNLNLWQKLKLSRDDAKPLLRLKGFPSFPLVERQANEVDWWDMVCNVKKLINEKKEDGKVFWQNLAGYKRQEALRPYLSSEEDRKKGKKFARYQLGDLLLHLEKKHGEDWGKVYDEAWERIDKKVEGLSKHIKLEEERRSEDAQSKAALTDWLRAKASFVIEGLKEADKDEFCRCELKLQKWYGDLRGKPFAIEAENSILDISGFSKQYNCAFIWQKDGVKKLNLYLIINYFKGGKLRFKKIKPEAFEANRFYTVINKKSGEIVIMEVNFNFDDPNLIILPLAFGKRQGREFIWNDLLSLETGSLKLANGRVIEKTLYNRRTRQDEPALFVALTFERREVLDSSNIKPMNLIGVDRGENIPAVIALTDPEGCPLSRFKDSLGNPTHILRIGESYKEKQRTIQAKKEVEQRRAGGYSRKYASKAKNLADDMVRNTARDLLYYAVTQDAMLIFENLSRGFGRQGKRTFMAERQYTRMEDWLTAKLAYEGLPSKTYLSKTLAQYTSKTCSNCGFTITSADYDRVLEKLKKTATGWMTTINGKELKVEGQITYYNRYKRQNVVKDLSVELDRLSEESVNNDISSWTKGRSGEALSLLKKRFSHRPVQEKFVCLNCGFETHADEQAALNIARSWLFLRSQEYKKYQTNKTTGNTDKRAFVETWQSFYRKKLKEVWKPAV

SEQ ID NO: 41626 - protein, 978 aa, synthetic construct
  REGION 1..978: note = engineered CasX variant
QEIKRANKIRRRLVKDSNTKKAGKTGPMKTLLVRVMTPDLRERLENLRKKPENIPQPISNTSRANLNKLLTDYTEMKKAILHVYWEEFQKDPVGLMSRVAQPASKKIDQNKLKPEMDEKGNLTTAGFACSQCGQPLFVYKLEQVSEKGKAYTNYFGRCNVAEHEKLILLAQLKPEKDSDEAVTYSLGKFGQRALDFYSIHVTKESTHPVKPLAQIAGNRYASYPVGKALSGACMGTIASFLSKYQDIIIEHQKVVKGNQKRLESLRELAGKENLEYPSVTLPPQPHTKEGVDAYNEVIARVRMWVNLNLWQKLKLSRDDAKPLLRLKGFPSFPLVERQANEVDWWDMVCNVKKLINEKKEDGKVFWQNLAGYKRQEALRPYLSSEEDRKKGKKFARYQLGDLLLHLEKKHGEDWGKVYDEAWERIDKKVEGLSKHIKLEEERRSEDAQSKAALTDWLRAKASFVIEGLKEADKDEFCRCELKLQKWYGDLRGKPFAIEAENSILDISGFSKQYNCAFIWQKDGVKKLNLYLIINYFKGGKLRFKKIKPEAFEANRFYTVINKKSGEIVPMEVNFNFDDPNLIILPLAFGKRQGREFIWNDLLSLETGSLKLANGRVIEKTLYNRRTRQDEPALFVALTFERREVLDSSNIKPMNLIGVDRGENIPAVIALTDPEGCPLSRFKDSLGNPTHILRIGESYKEKQRTIQAKKEVEQRRAGGYSRKYASKAKNLADDMVRNTARDLLYYAVTQDAMLIFENLSRGFGRQGKRTFMAERQYTRMEDWLTAKLAYEGLPSKTYLSKTLAQYTSKTCSNCGFTITSADYDRVLEKLKKTATGWMTTINGKELKVEGQITYYNRYKRQNVVKDLSVELDRLSEESVNNDISSWTKGRSGEALSLLKKRFSHRPVQEKFVCLNCGFETHADEQAALNIARSWLFLRSQEYKKYQTNKTTGNTDKRAFVETWQSFYRKKLKEVWKPAV

SEQ ID NO: 41627 - protein, 978 aa, synthetic construct
  REGION 1..978: note = engineered CasX variant
QEIKRANKIRRRLVKDSNTKKAGKTGPMKTLLVRVMTPDLRERLENLRKKPENIPQPISNTSRANLNKLLTDYTEMKKAILHVYWEEFQKDPVGLMSRVAQPASKKIDQNKLKPEMDEKGNLTTAGFACSQCGQPLFVYKLEQVSEKGKAYTNYFGRCNVAEHEKLILLAQLKPEKDSDEAVTYSLGKFGQRALDFYSIHVTKESTHPVKPLAQIAGNRYASHPVGKALSGACMGTIASFLSKYQDIIIEHQKVVKGNQKRLESLRELAGKENLEYPSVTLPPQPHTKEGVDAYNEVIARVRMWVNLNLWQKLKLSRDDAKPLLRLKGFPSFPLVERQANEVDWWDMVCNVKKLINEKKEDGKVFWQNLAGYKRQEALRPYLSSEEDRKKGKKFARYQLGDLLLHLEKKHGEDWGKVYDEAWERIDKKVEGLSKHIKLEEERRSEDAQSKAALTDWLRAKASFVIEGLKEADKDEFCRCELKLQKWYGDLRGKPFAIEAENSILDISGFSKQYNCAFIWQKDGVKKLNLYLIINYFKGGKLRFKKIKPEAFEANRFYTVINKKSGEIVPMEVNFNFDDPNLIILPLAFGKRQGREFIWNDLLSLETGSLKLANGRVIEKTLYNRRTRQDEPALFVALTFERREVLDSSNIKPMNLIGVDRGENIPAVIALTDPEGCPLSRFKDSLGNPTHILRIGESYKEKQRTIQAKKEVEQRRAGGYSRKYASKAKNLADDMVRNTARDLLYYAVTQDAMLIFENLSRGFGRQGKRTFMAERQYTRMEDWLTAKLAYEGLPSKTYLSKTLAQYTSKTCSNCGFTITSADYDRVLEKLKKTATGWMTTINGKELKVEGQITYYNRYKRQNVVKDLSVELDRLSEESVNNDISSWTKGRSGEALSLLKKRFSHRPVQEKFVCLNCGFETHADEQAALNIARSWLFLRSQEYKKYQTNKTTGNTDKRAFVETWQSFYRKKLKEVWKPAV

SEQ ID NO: 41628 - protein, 978 aa, synthetic construct
  REGION 1..978: note = engineered CasX variant
QEIKRANKIRRRLVKDSNTKKAGKTGPMKTLLVRVMTPDLRERLENLRKKPENIPQPISNTSRANLNKLLTDYTEMKKAILHVYWEEFQKDPVGLMSRVAQPASKKIDQNKLKPEMDEKGNLTTAGFACSQCGQPLFVYKLEQVSEKGKAYTNYFGRCNVAEHEKLILLAQLKPEKDSDEAVTYSLGKFGQRALDFYSIHVTKESTHPVKPLAQIAGNRYASSPVGKALSGACMGTIASFLSKYQDIIIEHQKVVKGNQKRLESLRELAGKENLEYPSVTLPPQPHTKEGVDAYNEVIARVRMWVNLNLWQKLKLSRDDAKPLLRLKGFPSFPLVERQANEVDWWDMVCNVKKLINEKKEDGKVFWQNLAGYKRQEALRPYLSSEEDRKKGKKFARYQLGDLLLHLEKKHGEDWGKVYDEAWERIDKKVEGLSKHIKLEEERRSEDAQSKAALTDWLRAKASFVIEGLKEADKDEFCRCELKLQKWYGDLRGKPFAIEAENSILDISGFSKQYNCAFIWQKDGVKKLNLYLIINYFKGGKLRFKKIKPEAFEANRFYTVINKKSGEIVPMEVNFNFDDPNLIILPLAFGKRQGREFIWNDLLSLETGSLKLANGRVIEKTLYNRRTRQDEPALFVALTFERREVLDSSNIKPMNLIGVDRGENIPAVIALTDPEGCPLSRFKDSLGNPTHILRIGESYKEKQRTIQAKKEVEQRRAGGYSRKYASKAKNLADDMVRNTARDLLYYAVTQDAMLIFENLSRGFGRQGKRTFMAERQYTRMEDWLTAKLAYEGLPSKTYLSKTLAQYTSKTCSNCGFTITSADYDRVLEKLKKTATGWMTTINGKELKVEGQITYYNRYKRQNVVKDLSVELDRLSEESVNNDISSWTKGRSGEALSLLKKRFSHRPVQEKFVCLNCGFETHADEQAALNIARSWLFLRSQEYKKYQTNKTTGNTDKRAFVETWQSFYRKKLKEVWKPAV

SEQ ID NO: 41629 - protein, 978 aa, synthetic construct
  REGION 1..978: note = engineered CasX variant
QEIKRANKIRRRLVKDSNTKKAGKTGPMKTLLVRVMTPDLRERLENLRKKPENIPQPISNTSRANLNKLLTDYTEMKKAILHVYWEEFQKDPVGLMSRVAQPASKKIDQNKLKPEMDEKGNLTTAGFACSQCGQPLFVYKLEQVSEKGKAYTNYFGRCNVAEHEKLILLAQLKPEKDSDEAVTYSLGKFGQRALDFYSIHVTKESTHPVKPLAQIAGNRYASTPVGKALSGACMGTIASFLSKYQDIIIEHQKVVKGNQKRLESLRELAGKENLEYPSVTLPPQPHTKEGVDAYNEVIARVRMWVNLNLWQKLKLSRDDAKPLLRLKGFPSFPLVERQANEVDWWDMVCNVKKLINEKKEDGKVFWQNLAGYKRQEALRPYLSSEEDRKKGKKFARYQLGDLLLHLEKKHGEDWGKVYDEAWERIDKKVEGLSKHIKLEEERRSEDAQSKAALTDWLRAKASFVIEGLKEADKDEFCRCELKLQKWYGDLRGKPFAIEAENSILDISGFSKQYNCAFIWQKDGVKKLNLYLIINYFKGGKLRFKKIKPEAFEANRFYTVINKKSGEIVPMEVNFNFDDPNLIILPLAFGKRQGREFIWNDLLSLETGSLKLANGRVIEKTLYNRRTRQDEPALFVALTFERREVLDSSNIKPMNLIGVDRGENIPAVIALTDPEGCPLSRFKDSLGNPTHILRIGESYKEKQRTIQAKKEVEQRRAGGYSRKYASKAKNLADDMVRNTARDLLYYAVTQDAMLIFENLSRGFGRQGKRTFMAERQYTRMEDWLTAKLAYEGLPSKTYLSKTLAQYTSKTCSNCGFTITSADYDRVLEKLKKTATGWMTTINGKELKVEGQITYYNRYKRQNVVKDLSVELDRLSEESVNNDISSWTKGRSGEALSLLKKRFSHRPVQEKFVCLNCGFETHADEQAALNIARSWLFLRSQEYKKYQTNKTTGNTDKRAFVETWQSFYRKKLKEVWKPAV

SEQ ID NO: 41630 - protein, 978 aa, synthetic construct
  REGION 1..978: note = engineered CasX variant
QEIKRANKIRRRLVKDSNTKKAGKTGPMKTLLVRVMTPDLRERLENLRKKPENIPQPISNTSRANLNKLLTDYTEMKKAILHVYWEEFQKDPVGLMSRVAQPASKKIDQNKLKPEMDEKGNLTTAGFACSQCGQPLFVYKLEQVSEKGKAYTNYFGRCNVAEHEKLILLAQLKPEKDSDEAVTYSLGKFGQRALDFYSIHVTKESTHPVKPLAQIAGNRYASAPVGKALSGACMGTIASFLSKYQDIIIEHQKVVKGNQKRLESLRELAGKENLEYPSVTLPPQPHTKEGVDAYNEVIARVRMWVNLNLWQKLKLSRDDAKPLLRLKGFPSFPLVERQANEVDWWDMVCNVKKLINEKKEDGKVFWQNLAGYKRQEALRPYLSSEEDRKKGKKFARYQLGDLLLHLEKKHGEDWGKVYDEAWERIDKKVEGLSKHIKLEEERRSEDAQSKAALTDWLRAKASFVIEGLKEADKDEFCRCELKLQKWYGDLRGKPFAIEAENSILDISGFSKQYNCAFIWQKDGVKKLNLYLIINYFKGGKLRFKKIKPEAFEANRFYTVINKKSGEIVPMEVNFNFDDPNLIILPLAFGKRQGREFIWNDLLSLETGSLKLANGRVIEKTLYNRRTRQDEPALFVALTFERREVLDSSNIKPMNLIGVDRGENIPAVIALTDPEGCPLSRFKDSLGNPTHILRIGESYKEKQRTIQAKKEVEQRRAGGYSRKYASKAKNLADDMVRNTARDLLYYAVTQDAMLIFENLSRGFGRQGKRTFMAERQYTRMEDWLTAKLAYEGLPSKTYLSKTLAQYTSKTCSNCGFTITSADYDRVLEKLKKTATGWMTTINGKELKVEGQITYYNRYKRQNVVKDLSVELDRLSEESVNNDISSWTKGRSGEALSLLKKRFSHRPVQEKFVCLNCGFETHADEQAALNIARSWLFLRSQEYKKYQTNKTTGNTDKRAFVETWQSFYRKKLKEVWKPAV

SEQ ID NO: 41631 - protein, 978 aa, synthetic construct
  REGION 1..978: note = engineered CasX variant
QEIKRANKIRRRLVKDSNTKKAGKTGPMKTLLVRVMTPDLRERLENLRKKPENIPQPISNTSRANLNKLLTDYTEMKKAILHVYWEEFQKDPVGLMSRVAQPASKKIDQNKLKPEMDEKGNLTTAGFACSQCGQPLFVYKLEQVSEKGKAYTNYFGRCNVAEHEKLILLAQLKPEKDSDEAVTYSLGKFGQRALDFYSIHVTKESTHPVKPLAQIAGNRYASVPVGKALSGACMGTIASFLSKYQDIIIEHQKVVKGNQKRLESLRELAGKENLEYPSVTLPPQPHTKEGVDAYNEVIARVRMWVNLNLWQKLKLSRDDAKPLLRLKGFPSFPLVERQANEVDWWDMVCNVKKLINEKKEDGKVFWQNLAGYKRQEALRPYLSSEEDRKKGKKFARYQLGDLLLHLEKKHGEDWGKVYDEAWERIDKKVEGLSKHIKLEEERRSEDAQSKAALTDWLRAKASFVIEGLKEADKDEFCRCELKLQKWYGDLRGKPFAIEAENSILDISGFSKQYNCAFIWQKDGVKKLNLYLIINYFKGGKLRFKKIKPEAFEANRFYTVINKKSGEIVPMEVNFNFDDPNLIILPLAFGKRQGREFIWNDLLSLETGSLKLANGRVIEKTLYNRRTRQDEPALFVALTFERREVLDSSNIKPMNLIGVDRGENIPAVIALTDPEGCPLSRFKDSLGNPTHILRIGESYKEKQRTIQAKKEVEQRRAGGYSRKYASKAKNLADDMVRNTARDLLYYAVTQDAMLIFENLSRGFGRQGKRTFMAERQYTRMEDWLTAKLAYEGLPSKTYLSKTLAQYTSKTCSNCGFTITSADYDRVLEKLKKTATGWMTTINGKELKVEGQITYYNRYKRQNVVKDLSVELDRLSEESVNNDISSWTKGRSGEALSLLKKRFSHRPVQEKFVCLNCGFETHADEQAALNIARSWLFLRSQEYKKYQTNKTTGNTDKRAFVETWQSFYRKKLKEVWKPAV

SEQ ID NO: 41632 - protein, 978 aa, synthetic construct
  REGION 1..978: note = engineered CasX variant
QEIKRANKIRRRLVKDSNTKKAGKTGPMKTLLVRVMTPDLRERLENLRKKPENIPQPISNTSRANLNKLLTDYTEMKKAILHVYWEEFQKDPVGLMSRVAQPASKKIDQNKLKPEMDEKGNLTTAGFACSQCGQPLFVYKLEQVSEKGKAYTNYFGRCNVAEHEKLIKLAQLKPEKDSDEAVTYSLGKFGQRALDFYSIHVTKESTHPVKPLAQIAGNRYASGPVGKALSGACMGTIASFLSKYQDIIIEHQKVVKGNQKRLESLRELAGKENLEYPSVTLPPQPHTKEGVDAYNEVIARVRMWVNLNLWQKLKLSRDDAKPLLRLKGFPSFPLVERQANEVDWWDMVCNVKKLINEKKEDGKVFWQNLAGYKRQEALRPYLSSEEDRKKGKKFARYQLGDLLLHLEKKHGEDWGKVYDEAWERIDKKVEGLSKHIKLEEERRSEDAQSKAALTDWLRAKASFVIEGLKEADKDEFCRCELKLQKWYGDLRGKPFAIEAENSILDISGFSKQYNCAFIWQKDGVKKLNLYLIINYFKGGKLRFKKIKPEAFEANRFYTVINKKSGEIVPMEVNFNFDDPNLIILPLAFGKRQGREFIWNDLLSLETGSLKLANGRVIEKTLYNRRTRQDEPALFVALTFERREVLDSSNIKPMNLIGVDRGENIPAVIALTDPEGCPLSRFKDSLGNPTHILRIGESYKEKQRTIQAKKEVEQRRAGGYSRKYASKAKNLADDMVRNTARDLLYYAVTQDAMLIFENLSRGFGRQGKRTFMAERQYTRMEDWLTAKLAYEGLPSKTYLSKTLAQYTSKTCSNCGFTITSADYDRVLEKLKKTATGWMTTINGKELKVEGQITYYNRYKRQNVVKDLSVELDRLSEESVNNDISSWTKGRSGEALSLLKKRFSHRPVQEKFVCLNCGFETHADEQAALNIARSWLFLRSQEYKKYQTNKTTGNTDKRAFVETWQSFYRKKLKEVWKPAV

SEQ ID NO: 41633 - protein, 977 aa, synthetic construct
  REGION 1..977: note = engineered CasX variant
QEIKRANKIRRRLVKDSNTKKAGKTGPMKTLLVRVMTPDLRERLENLRKKPENIPQPISNTSRANLNKLLTDYTEMKKAILHVYWEEFQKDPVGLMSRVAQPASKKIDQNKLKPEMDEKGNLTTAGFACSQCGQPLFVYKLEQVSEKGKAYTNYFGRCNVAEHEKLILLAQLKPEKDSDEAVTYSLGKFGQRALDFYSIHVTKESTHPVKPLAQIAGNRYASPVGKALSGACMGTIASFLSKYQDIIIEHQKVVKGNQKRLESLRELAGKENLEYPSVTLPPQPHTKEGVDAYNEVIARVRMWVNLNLWQKLKLSRDDAKPLLRLKGFPSFPLVERQANEVDWWDMVCNVKKLINEKKEDGKVFWQNLAGYKRQEALRPYLSSEEDRKKGKKFARYQLGDLLLHLEKKHGEDWGKVYDEAWERIDKKVEGLSKHIKLEEERRSEDAQSKAALTDWLRAKASFVIEGLKEADKDEFCRCELKLQKWYGDLRGKPFAIEAENSILDISGFSKQYNCAFIWQKDGVKKLNLYLIINYFKGGKLRFKKIKPEAFEANRFYTVINKKSGEIVPMEVNFNFDDPNLIILPLAFGKRQGREFIWNDLLSLETGSLKLANGRVIEKTLYNRRTRQDEPALFVALTFERREVLDSSNIKPMNLIGVDRGENIPAVIALTDPEGCPLSRFKDSLGNPTHILRIGESYKEKQRTIQAKKEVEQRRAGGYSRKYASKAKNLADDMVRNTARDLLYYAVTQDAMLIFENLSRGFGRQGKRTFMAERQYTRMEDWLTAKLAYEGLPSKTYLSKTLAQYTSKTCSNCGFTITSADYDRVLEKLKKTATGWMTTINGKELKVEGQITYYNRYKRQNVVKDLSVELDRLSEESVNNDISSWTKGRSGEALSLLKKRFSHRPVQEKFVCLNCGFETHADEQAALNIARSWLFLRSQEYKKYQTNKTTGNTDKRAFVETWQSFYRKKLKEVWKPAV

SEQ ID NO: 41634 - protein, 978 aa, synthetic construct
  REGION 1..978: note = engineered CasX variant
QEIKRANKIRRRLVKDSNTKKAGKTGPMKTLLVRVMTPDLRERLENLRKKPENIPQPISNTSRANLNKLLTDYTEMKKAILHVYWEEFQKDPVGLMSRVAQPASKKIDQNKLKPEMDEKGNLTTAGFACSQCGQPLFVYKLEQVSEKGKAYTNYFGRCNVAEHEKLILLAQLKPEKDSDEAVTYSLGKFGQRALDFYSIHVTKESTHPVKPLAQIAGNRYASYPVGKALSDACMGTIASFLSKYQDIIIEHQKVVKGNQKRLESLRELAGKENLEYPSVTLPPQPHTKEGVDAYNEVIARVRMWVNLNLWQKLKLSRDDAKPLLRLKNFPSFPLVERQANEVDWWDMVCNVKKLINEKKEDGKVFWQNLAGYKRQEALRPYLSSEEDRKKGKKFARYQLGDLLLHLEKKHGEDWGKVYDEAWERIDKKVEGLSKHIKLEEERRSEDAQSKAALTDWLRAKASFVIEGLKEADKDEFCRCELKLQKWYGDLRGKPFAIEAENSILDISGFSKQYNCAFIWQKDGVKKLNLYLIINYFKGGKLRFKKIKPEAFEANRFYTVINKKSGEIVPMEVNFNFDDPNLIILPLAFGKRQGREFIWNDLLSLETGSLKLANGRVIEKTLYNRRTRQDEPALFVALTFERREVLDSSNIKPMNLIGVDRGENIPAVIALTDPEGCPLSRFKDSLGNPTHILRIGESYKEKQRTIQAKKEVEQRRAGGYSRKYASKAKNLADDMVRNTARDLLYYAVTQDAMLIFENLSRGFGRQGKRTFMAERQYTRMEDWLTAKLAYEGLPSKTYLSKTLAQYTSKTCSNCGFTITSADYDRVLEKLKKTATGWMTTINGKELKVEGQITYYNRYKRQNVVKDLSVELDRLSEESVNNDISSWTKGRSGEALSLLKKRFSHRPVQEKFVCLNCGFETHADEQAALNIARSWLFLRSQEYKKYQTNKTTGNTDKRAFVETWQSFYRKKLKEVWKPAV

SEQ ID NO: 41635 - protein, 978 aa, synthetic construct
  REGION 1..978: note = engineered CasX variant
QEIKRANKIRRRLVKDSNTKKAGKTGPMKTLLVRVMTPDLRERLENLRKKPENIPQPISNTSRANLNKLLTDYTEMKKAILHVYWEEFQKDPVGLMSRVAQPASKKIDQNKLKPEMDEKGNLTTAGFACSQCGQPLFVYKLEQVSEKGKAYTNYFGRCNVAEHEKLILLAQLKPEKDSDEAVTYSLGKFGQRALDFYSIHVTKESTHPVKPLAQIAGNRYASHPVGKALSDACMGTIASFLSKYQDIIIEHQKVVKGNQKRLESLRELAGKENLEYPSVTLPPQPHTKEGVDAYNEVIARVRMWVNLNLWQKLKLSRDDAKPLLRLKNFPSFPLVERQANEVDWWDMVCNVKKLINEKKEDGKVFWQNLAGYKRQEALRPYLSSEEDRKKGKKFARYQLGDLLLHLEKKHGEDWGKVYDEAWERIDKKVEGLSKHIKLEEERRSEDAQSKAALTDWLRAKASFVIEGLKEADKDEFCRCELKLQKWYGDLRGKPFAIEAENSILDISGFSKQYNCAFIWQKDGVKKLNLYLIINYFKGGKLRFKKIKPEAFEANRFYTVINKKSGEIVPMEVNFNFDDPNLIILPLAFGKRQGREFIWNDLLSLETGSLKLANGRVIEKTLYNRRTRQDEPALFVALTFERREVLDSSNIKPMNLIGVDRGENIPAVIALTDPEGCPLSRFKDSLGNPTHILRIGESYKEKQRTIQAKKEVEQRRAGGYSRKYASKAKNLADDMVRNTARDLLYYAVTQDAMLIFENLSRGFGRQGKRTFMAERQYTRMEDWLTAKLAYEGLPSKTYLSKTLAQYTSKTCSNCGFTITSADYDRVLEKLKKTATGWMTTINGKELKVEGQITYYNRYKRQNVVKDLSVELDRLSEESVNNDISSWTKGRSGEALSLLKKRFSHRPVQEKFVCLNCGFETHADEQAALNIARSWLFLRSQEYKKYQTNKTTGNTDKRAFVETWQSFYRKKLKEVWKPAV

SEQ ID NO: 41636 - protein, 978 aa, synthetic construct
  REGION 1..978: note = engineered CasX variant
QEIKRANKIRRRLVKDSNTKKAGKTGPMKTLLVRVMTPDLRERLENLRKKPENIPQPISNTSRANLNKLLTDYTEMKKAILHVYWEEFQKDPVGLMSRVAQPASKKIDQNKLKPEMDEKGNLTTAGFACSQCGQPLFVYKLEQVSEKGKAYTNYFGRCNVAEHEKLILLAQLKPEKDSDEAVTYSLGKFGQRALDFYSIHVTKESTHPVKPLAQIAGNRYASSPVGKALSDACMGTIASFLSKYQDIIIEHQKVVKGNQKRLESLRELAGKENLEYPSVTLPPQPHTKEGVDAYNEVIARVRMWVNLNLWQKLKLSRDDAKPLLRLKNFPSFPLVERQANEVDWWDMVCNVKKLINEKKEDGKVFWQNLAGYKRQEALRPYLSSEEDRKKGKKFARYQLGDLLLHLEKKHGEDWGKVYDEAWERIDKKVEGLSKHIKLEEERRSEDAQSKAALTDWLRAKASFVIEGLKEADKDEFCRCELKLQKWYGDLRGKPFAIEAENSILDISGFSKQYNCAFIWQKDGVKKLNLYLIINYFKGGKLRFKKIKPEAFEANRFYTVINKKSGEIVPMEVNFNFDDPNLIILPLAFGKRQGREFIWNDLLSLETGSLKLANGRVIEKTLYNRRTRQDEPALFVALTFERREVLDSSNIKPMNLIGVDRGENIPAVIALTDPEGCPLSRFKDSLGNPTHILRIGESYKEKQRTIQAKKEVEQRRAGGYSRKYASKAKNLADDMVRNTARDLLYYAVTQDAMLIFENLSRGFGRQGKRTFMAERQYTRMEDWLTAKLAYEGLPSKTYLSKTLAQYTSKTCSNCGFTITSADYDRVLEKLKKTATGWMTTINGKELKVEGQITYYNRYKRQNVVKDLSVELDRLSEESVNNDISSWTKGRSGEALSLLKKRFSHRPVQEKFVCLNCGFETHADEQAALNIARSWLFLRSQEYKKYQTNKTTGNTDKRAFVETWQSFYRKKLKEVWKPAV

SEQ ID NO: 41637 - protein, 978 aa, synthetic construct
  REGION 1..978: note = engineered CasX variant
QEIKRANKIRRRLVKDSNTKKAGKTGPMKTLLVRVMTPDLRERLENLRKKPENIPQPISNTSRANLNKLLTDYTEMKKAILHVYWEEFQKDPVGLMSRVAQPASKKIDQNKLKPEMDEKGNLTTAGFACSQCGQPLFVYKLEQVSEKGKAYTNYFGRCNVAEHEKLILLAQLKPEKDSDEAVTYSLGKFGQRALDFYSIHVTKESTHPVKPLAQIAGNRYASTPVGKALSDACMGTIASFLSKYQDIIIEHQKVVKGNQKRLESLRELAGKENLEYPSVTLPPQPHTKEGVDAYNEVIARVRMWVNLNLWQKLKLSRDDAKPLLRLKNFPSFPLVERQANEVDWWDMVCNVKKLINEKKEDGKVFWQNLAGYKRQEALRPYLSSEEDRKKGKKFARYQLGDLLLHLEKKHGEDWGKVYDEAWERIDKKVEGLSKHIKLEEERRSEDAQSKAALTDWLRAKASFVIEGLKEADKDEFCRCELKLQKWYGDLRGKPFAIEAENSILDISGFSKQYNCAFIWQKDGVKKLNLYLIINYFKGGKLRFKKIKPEAFEANRFYTVINKKSGEIVPMEVNFNFDDPNLIILPLAFGKRQGREFIWNDLLSLETGSLKLANGRVIEKTLYNRRTRQDEPALFVALTFERREVLDSSNIKPMNLIGVDRGENIPAVIALTDPEGCPLSRFKDSLGNPTHILRIGESYKEKQRTIQAKKEVEQRRAGGYSRKYASKAKNLADDMVRNTARDLLYYAVTQDAMLIFENLSRGFGRQGKRTFMAERQYTRMEDWLTAKLAYEGLPSKTYLSKTLAQYTSKTCSNCGFTITSADYDRVLEKLKKTATGWMTTINGKELKVEGQITYYNRYKRQNVVKDLSVELDRLSEESVNNDISSWTKGRSGEALSLLKKRFSHRPVQEKFVCLNCGFETHADEQAALNIARSWLFLRSQEYKKYQTNKTTGNTDKRAFVETWQSFYRKKLKEVWKPAV

SEQ ID NO: 41638 - protein, 978 aa, synthetic construct
  REGION 1..978: note = engineered CasX variant
QEIKRANKIRRRLVKDSNTKKAGKTGPMKTLLVRVMTPDLRERLENLRKKPENIPQPISNTSRANLNKLLTDYTEMKKAILHVYWEEFQKDPVGLMSRVAQPASKKIDQNKLKPEMDEKGNLTTAGFACSQCGQPLFVYKLEQVSEKGKAYTNYFGRCNVAEHEKLILLAQLKPEKDSDEAVTYSLGKFGQRALDFYSIHVTKESTHPVKPLAQIAGNRYASAPVGKALSDACMGTIASFLSKYQDIIIEHQKVVKGNQKRLESLRELAGKENLEYPSVTLPPQPHTKEGVDAYNEVIARVRMWVNLNLWQKLKLSRDDAKPLLRLKNFPSFPLVERQANEVDWWDMVCNVKKLINEKKEDGKVFWQNLAGYKRQEALRPYLSSEEDRKKGKKFARYQLGDLLLHLEKKHGEDWGKVYDEAWERIDKKVEGLSKHIKLEEERRSEDAQSKAALTDWLRAKASFVIEGLKEADKDEFCRCELKLQKWYGDLRGKPFAIEAENSILDISGFSKQYNCAFIWQKDGVKKLNLYLIINYFKGGKLRFKKIKPEAFEANRFYTVINKKSGEIVPMEVNFNFDDPNLIILPLAFGKRQGREFIWNDLLSLETGSLKLANGRVIEKTLYNRRTRQDEPALFVALTFERREVLDSSNIKPMNLIGVDRGENIPAVIALTDPEGCPLSRFKDSLGNPTHILRIGESYKEKQRTIQAKKEVEQRRAGGYSRKYASKAKNLADDMVRNTARDLLYYAVTQDAMLIFENLSRGFGRQGKRTFMAERQYTRMEDWLTAKLAYEGLPSKTYLSKTLAQYTSKTCSNCGFTITSADYDRVLEKLKKTATGWMTTINGKELKVEGQITYYNRYKRQNVVKDLSVELDRLSEESVNNDISSWTKGRSGEALSLLKKRFSHRPVQEKFVCLNCGFETHADEQAALNIARSWLFLRSQEYKKYQTNKTTGNTDKRAFVETWQSFYRKKLKEVWKPAV

SEQ ID NO: 41639 - protein, 978 aa, synthetic construct
  REGION 1..978: note = engineered CasX variant
QEIKRANKIRRRLVKDSNTKKAGKTGPMKTLLVRVMTPDLRERLENLRKKPENIPQPISNTSRANLNKLLTDYTEMKKAILHVYWEEFQKDPVGLMSRVAQPASKKIDQNKLKPEMDEKGNLTTAGFACSQCGQPLFVYKLEQVSEKGKAYTNYFGRCNVAEHEKLILLAQLKPEKDSDEAVTYSLGKFGQRALDFYSIHVTKESTHPVKPLAQIAGNRYASVPVGKALSDACMGTIASFLSKYQDIIIEHQKVVKGNQKRLESLRELAGKENLEYPSVTLPPQPHTKEGVDAYNEVIARVRMWVNLNLWQKLKLSRDDAKPLLRLKNFPSFPLVERQANEVDWWDMVCNVKKLINEKKEDGKVFWQNLAGYKRQEALRPYLSSEEDRKKGKKFARYQLGDLLLHLEKKHGEDWGKVYDEAWERIDKKVEGLSKHIKLEEERRSEDAQSKAALTDWLRAKASFVIEGLKEADKDEFCRCELKLQKWYGDLRGKPFAIEAENSILDISGFSKQYNCAFIWQKDGVKKLNLYLIINYFKGGKLRFKKIKPEAFEANRFYTVINKKSGEIVPMEVNFNFDDPNLIILPLAFGKRQGREFIWNDLLSLETGSLKLANGRVIEKTLYNRRTRQDEPALFVALTFERREVLDSSNIKPMNLIGVDRGENIPAVIALTDPEGCPLSRFKDSLGNPTHILRIGESYKEKQRTIQAKKEVEQRRAGGYSRKYASKAKNLADDMVRNTARDLLYYAVTQDAMLIFENLSRGFGRQGKRTFMAERQYTRMEDWLTAKLAYEGLPSKTYLSKTLAQYTSKTCSNCGFTITSADYDRVLEKLKKTATGWMTTINGKELKVEGQITYYNRYKRQNVVKDLSVELDRLSEESVNNDISSWTKGRSGEALSLLKKRFSHRPVQEKFVCLNCGFETHADEQAALNIARSWLFLRSQEYKKYQTNKTTGNTDKRAFVETWQSFYRKKLKEVWKPAV

SEQ ID NO: 41640 - protein, 978 aa, synthetic construct
  REGION 1..978: note = engineered CasX variant
QEIKRANKIRRRLVKDSNTKKAGKTGPMKTLLVRVMTPDLRERLENLRKKPENIPQPISNTSRANLNKLLTDYTEMKKAILHVYWEEFQKDPVGLMSRVAQPASKKIDQNKLKPEMDEKGNLTTAGFACSQCGQPLFVYKLEQVSEKGKAYTNYFGRCNVAEHEKLIKLAQLKPEKDSDEAVTYSLGKFGQRALDFYSIHVTKESTHPVKPLAQIAGNRYASGPVGKALSDACMGTIASFLSKYQDIIIEHQKVVKGNQKRLESLRELAGKENLEYPSVTLPPQPHTKEGVDAYNEVIARVRMWVNLNLWQKLKLSRDDAKPLLRLKNFPSFPLVERQANEVDWWDMVCNVKKLINEKKEDGKVFWQNLAGYKRQEALRPYLSSEEDRKKGKKFARYQLGDLLLHLEKKHGEDWGKVYDEAWERIDKKVEGLSKHIKLEEERRSEDAQSKAALTDWLRAKASFVIEGLKEADKDEFCRCELKLQKWYGDLRGKPFAIEAENSILDISGFSKQYNCAFIWQKDGVKKLNLYLIINYFKGGKLRFKKIKPEAFEANRFYTVINKKSGEIVPMEVNFNFDDPNLIILPLAFGKRQGREFIWNDLLSLETGSLKLANGRVIEKTLYNRRTRQDEPALFVALTFERREVLDSSNIKPMNLIGVDRGENIPAVIALTDPEGCPLSRFKDSLGNPTHILRIGESYKEKQRTIQAKKEVEQRRAGGYSRKYASKAKNLADDMVRNTARDLLYYAVTQDAMLIFENLSRGFGRQGKRTFMAERQYTRMEDWLTAKLAYEGLPSKTYLSKTLAQYTSKTCSNCGFTITSADYDRVLEKLKKTATGWMTTINGKELKVEGQITYYNRYKRQNVVKDLSVELDRLSEESVNNDISSWTKGRSGEALSLLKKRFSHRPVQEKFVCLNCGFETHADEQAALNIARSWLFLRSQEYKKYQTNKTTGNTDKRAFVETWQSFYRKKLKEVWKPAV

SEQ ID NO: 41641 - protein, 977 aa, synthetic construct
  REGION 1..977: note = engineered CasX variant
QEIKRANKIRRRLVKDSNTKKAGKTGPMKTLLVRVMTPDLRERLENLRKKPENIPQPISNTSRANLNKLLTDYTEMKKAILHVYWEEFQKDPVGLMSRVAQPASKKIDQNKLKPEMDEKGNLTTAGFACSQCGQPLFVYKLEQVSEKGKAYTNYFGRCNVAEHEKLILLAQLKPEKDSDEAVTYSLGKFGQRALDFYSIHVTKESTHPVKPLAQIAGNRYASPVGKALSDACMGTIASFLSKYQDIIIEHQKVVKGNQKRLESLRELAGKENLEYPSVTLPPQPHTKEGVDAYNEVIARVRMWVNLNLWQKLKLSRDDAKPLLRLKNFPSFPLVERQANEVDWWDMVCNVKKLINEKKEDGKVFWQNLAGYKRQEALRPYLSSEEDRKKGKKFARYQLGDLLLHLEKKHGEDWGKVYDEAWERIDKKVEGLSKHIKLEEERRSEDAQSKAALTDWLRAKASFVIEGLKEADKDEFCRCELKLQKWYGDLRGKPFAIEAENSILDISGFSKQYNCAFIWQKDGVKKLNLYLIINYFKGGKLRFKKIKPEAFEANRFYTVINKKSGEIVPMEVNFNFDDPNLIILPLAFGKRQGREFIWNDLLSLETGSLKLANGRVIEKTLYNRRTRQDEPALFVALTFERREVLDSSNIKPMNLIGVDRGENIPAVIALTDPEGCPLSRFKDSLGNPTHILRIGESYKEKQRTIQAKKEVEQRRAGGYSRKYASKAKNLADDMVRNTARDLLYYAVTQDAMLIFENLSRGFGRQGKRTFMAERQYTRMEDWLTAKLAYEGLPSKTYLSKTLAQYTSKTCSNCGFTITSADYDRVLEKLKKTATGWMTTINGKELKVEGQITYYNRYKRQNVVKDLSVELDRLSEESVNNDISSWTKGRSGEALSLLKKRFSHRPVQEKFVCLNCGFETHADEQAALNIARSWLFLRSQEYKKYQTNKTTGNTDKRAFVETWQSFYRKKLKEVWKPAV

SEQ ID NO: 41642 - protein, 978 aa, synthetic construct
  REGION 1..978: note = engineered CasX variant
QEIKRANKIRRRLVKDSNTKKAGKTGPMKTLLVRVMTPDLRERLENLRKKPENIPQPISNTSRANLNKLLTDYTEMKKAILHVYWEEFQKDPVGLMSRVAQPASKKIDQNKLKPEMDEKGNLTTAGFACSQCGQPLFVYKLEQVSEKGKAYTNYFGRCNVAEHEKLILLAQLKPEKDSDEAVTYSLGKFGQRALDFYSIHVTKESTHPVKPLAQIAGNRYASYPVGKALSDACMGTIASFLSKYQDIIIEHQKVVKGNQKRLESLRELAGKENLEYPSVTLPPQPHTKEGVDAYNEVIARVRMWVNLNLWQKLKLSRDDAKPLLRLKGFPSFPLVERQANEVDWWDMVCNVKKLINEKKEDGKVFWQNLAGYKRQEALRPYLSSEEDRKKGKKFARYQLGDLLNHLEKKHGEDWGKVYDEAWERIDKKVEGLSKHIKLEEERRSEDAQSKAALTDWLRAKASFVIEGLKEADKDEFCRCELKLQKWYGDLRGKPFAIEAENSILDISGFSKQYNCAFIWQKDGVKKLNLYLIINYFKGGKLRFKKIKPEAFEANRFYTVINKKSGEIVPMEVNFNFDDPNLIILPLAFGKRQGREFIWNDLLSLETGSLKLANGRVIEKTLYNRRTRQDEPALFVALTFERREVLDSSNIKPMNLIGVDRGENIPAVIALTDPEGCPLSRFKDSLGNPTHILRIGESYKEKQRTIQAKKEVEQRRAGGYSRKYASKAKNLADDMVRNTARDLLYYAVTQDAMLIFENLSRGFGRQGKRTFMAERQYTRMEDWLTAKLAYEGLPSKTYLSKTLAQYTSKTCSNCGFTITSADYDRVLEKLKKTATGWMTTINGKELKVEGQITYYNRYKRQNVVKDLSVELDRLSEESVNNDISSWTKGRSGEALSLLKKRFSHRPVQEKFVCLNCGFETHADEQAALNIARSWLFLRSQEYKKYQTNKTTGNTDKRAFVETWQSFYRKKLKEVWKPAV

SEQ ID NO: 41643 - protein, 978 aa, synthetic construct
  REGION 1..978: note = engineered CasX variant
QEIKRANKIRRRLVKDSNTKKAGKTGPMKTLLVRVMTPDLRERLENLRKKPENIPQPISNTSRANLNKLLTDYTEMKKAILHVYWEEFQKDPVGLMSRVAQPASKKIDQNKLKPEMDEKGNLTTAGFACSQCGQPLFVYKLEQVSEKGKAYTNYFGRCNVAEHEKLILLAQLKPEKDSDEAVTYSLGKFGQRALDFYSIHVTKESTHPVKPLAQIAGNRYASHPVGKALSDACMGTIASFLSKYQDIIIEHQKVVKGNQKRLESLRELAGKENLEYPSVTLPPQPHTKEGVDAYNEVIARVRMWVNLNLWQKLKLSRDDAKPLLRLKGFPSFPLVERQANEVDWWDMVCNVKKLINEKKEDGKVFWQNLAGYKRQEALRPYLSSEEDRKKGKKFARYQLGDLLNHLEKKHGEDWGKVYDEAWERIDKKVEGLSKHIKLEEERRSEDAQSKAALTDWLRAKASFVIEGLKEADKDEFCRCELKLQKWYGDLRGKPFAIEAENSILDISGFSKQYNCAFIWQKDGVKKLNLYLIINYFKGGKLRFKKIKPEAFEANRFYTVINKKSGEIVPMEVNFNFDDPNLIILPLAFGKRQGREFIWNDLLSLETGSLKLANGRVIEKTLYNRRTRQDEPALFVALTFERREVLDSSNIKPMNLIGVDRGENIPAVIALTDPEGCPLSRFKDSLGNPTHILRIGESYKEKQRTIQAKKEVEQRRAGGYSRKYASKAKNLADDMVRNTARDLLYYAVTQDAMLIFENLSRGFGRQGKRTFMAERQYTRMEDWLTAKLAYEGLPSKTYLSKTLAQYTSKTCSNCGFTITSADYDRVLEKLKKTATGWMTTINGKELKVEGQITYYNRYKRQNVVKDLSVELDRLSEESVNNDISSWTKGRSGEALSLLKKRFSHRPVQEKFVCLNCGFETHADEQAALNIARSWLFLRSQEYKKYQTNKTTGNTDKRAFVETWQSFYRKKLKEVWKPAV

SEQ ID NO: 41644 - protein, 978 aa, synthetic construct
  REGION 1..978: note = engineered CasX variant
QEIKRANKIRRRLVKDSNTKKAGKTGPMKTLLVRVMTPDLRERLENLRKKPENIPQPISNTSRANLNKLLTDYTEMKKAILHVYWEEFQKDPVGLMSRVAQPASKKIDQNKLKPEMDEKGNLTTAGFACSQCGQPLFVYKLEQVSEKGKAYTNYFGRCNVAEHEKLILLAQLKPEKDSDEAVTYSLGKFGQRALDFYSIHVTKESTHPVKPLAQIAGNRYASSPVGKALSDACMGTIASFLSKYQDIIIEHQKVVKGNQKRLESLRELAGKENLEYPSVTLPPQPHTKEGVDAYNEVIARVRMWVNLNLWQKLKLSRDDAKPLLRLKGFPSFPLVERQANEVDWWDMVCNVKKLINEKKEDGKVFWQNLAGYKRQEALRPYLSSEEDRKKGKKFARYQLGDLLNHLEKKHGEDWGKVYDEAWERIDKKVEGLSKHIKLEEERRSEDAQSKAALTDWLRAKASFVIEGLKEADKDEFCRCELKLQKWYGDLRGKPFAIEAENSILDISGFSKQYNCAFIWQKDGVKKLNLYLIINYFKGGKLRFKKIKPEAFEANRFYTVINKKSGEIVPMEVNFNFDDPNLIILPLAFGKRQGREFIWNDLLSLETGSLKLANGRVIEKTLYNRRTRQDEPALFVALTFERREVLDSSNIKPMNLIGVDRGENIPAVIALTDPEGCPLSRFKDSLGNPTHILRIGESYKEKQRTIQAKKEVEQRRAGGYSRKYASKAKNLADDMVRNTARDLLYYAVTQDAMLIFENLSRGFGRQGKRTFMAERQYTRMEDWLTAKLAYEGLPSKTYLSKTLAQYTSKTCSNCGFTITSADYDRVLEKLKKTATGWMTTINGKELKVEGQITYYNRYKRQNVVKDLSVELDRLSEESVNNDISSWTKGRSGEALSLLKKRFSHRPVQEKFVCLNCGFETHADEQAALNIARSWLFLRSQEYKKYQTNKTTGNTDKRAFVETWQSFYRKKLKEVWKPAV

SEQ ID NO: 41645 - protein, 978 aa, synthetic construct
  REGION 1..978: note = engineered CasX variant
QEIKRANKIRRRLVKDSNTKKAGKTGPMKTLLVRVMTPDLRERLENLRKKPENIPQPISNTSRANLNKLLTDYTEMKKAILHVYWEEFQKDPVGLMSRVAQPASKKIDQNKLKPEMDEKGNLTTAGFACSQCGQPLFVYKLEQVSEKGKAYTNYFGRCNVAEHEKLILLAQLKPEKDSDEAVTYSLGKFGQRALDFYSIHVTKESTHPVKPLAQIAGNRYASTPVGKALSDACMGTIASFLSKYQDIIIEHQKVVKGNQKRLESLRELAGKENLEYPSVTLPPQPHTKEGVDAYNEVIARVRMWVNLNLWQKLKLSRDDAKPLLRLKGFPSFPLVERQANEVDWWDMVCNVKKLINEKKEDGKVFWQNLAGYKRQEALRPYLSSEEDRKKGKKFARYQLGDLLNHLEKKHGEDWGKVYDEAWERIDKKVEGLSKHIKLEEERRSEDAQSKAALTDWLRAKASFVIEGLKEADKDEFCRCELKLQKWYGDLRGKPFAIEAENSILDISGFSKQYNCAFIWQKDGVKKLNLYLIINYFKGGKLRFKKIKPEAFEANRFYTVINKKSGEIVPMEVNFNFDDPNLIILPLAFGKRQGREFIWNDLLSLETGSLKLANGRVIEKTLYNRRTRQDEPALFVALTFERREVLDSSNIKPMNLIGVDRGENIPAVIALTDPEGCPLSRFKDSLGNPTHILRIGESYKEKQRTIQAKKEVEQRRAGGYSRKYASKAKNLADDMVRNTARDLLYYAVTQDAMLIFENLSRGFGRQGKRTFMAERQYTRMEDWLTAKLAYEGLPSKTYLSKTLAQYTSKTCSNCGFTITSADYDRVLEKLKKTATGWMTTINGKELKVEGQITYYNRYKRQNVVKDLSVELDRLSEESVNNDISSWTKGRSGEALSLLKKRFSHRPVQEKFVCLNCGFETHADEQAALNIARSWLFLRSQEYKKYQTNKTTGNTDKRAFVETWQSFYRKKLKEVWKPAV

SEQ ID NO: 41646 - protein, 978 aa, synthetic construct
  REGION 1..978: note = engineered CasX variant
QEIKRANKIRRRLVKDSNTKKAGKTGPMKTLLVRVMTPDLRERLENLRKKPENIPQPISNTSRANLNKLLTDYTEMKKAILHVYWEEFQKDPVGLMSRVAQPASKKIDQNKLKPEMDEKGNLTTAGFACSQCGQPLFVYKLEQVSEKGKAYTNYFGRCNVAEHEKLILLAQLKPEKDSDEAVTYSLGKFGQRALDFYSIHVTKESTHPVKPLAQIAGNRYASAPVGKALSDACMGTIASFLSKYQDIIIEHQKVVKGNQKRLESLRELAGKENLEYPSVTLPPQPHTKEGVDAYNEVIARVRMWVNLNLWQKLKLSRDDAKPLLRLKGFPSFPLVERQANEVDWWDMVCNVKKLINEKKEDGKVFWQNLAGYKRQEALRPYLSSEEDRKKGKKFARYQLGDLLNHLEKKHGEDWGKVYDEAWERIDKKVEGLSKHIKLEEERRSEDAQSKAALTDWLRAKASFVIEGLKEADKDEFCRCELKLQKWYGDLRGKPFAIEAENSILDISGFSKQYNCAFIWQKDGVKKLNLYLIINYFKGGKLRFKKIKPEAFEANRFYTVINKKSGEIVPMEVNFNFDDPNLIILPLAFGKRQGREFIWNDLLSLETGSLKLANGRVIEKTLYNRRTRQDEPALFVALTFERREVLDSSNIKPMNLIGVDRGENIPAVIALTDPEGCPLSRFKDSLGNPTHILRIGESYKEKQRTIQAKKEVEQRRAGGYSRKYASKAKNLADDMVRNTARDLLYYAVTQDAMLIFENLSRGFGRQGKRTFMAERQYTRMEDWLTAKLAYEGLPSKTYLSKTLAQYTSKTCSNCGFTITSADYDRVLEKLKKTATGWMTTINGKELKVEGQITYYNRYKRQNVVKDLSVELDRLSEESVNNDISSWTKGRSGEALSLLKKRFSHRPVQEKFVCLNCGFETHADEQAALNIARSWLFLRSQEYKKYQTNKTTGNTDKRAFVETWQSFYRKKLKEVWKPAV

SEQ ID NO: 41647 - protein, 978 aa, synthetic construct
  REGION 1..978: note = engineered CasX variant
QEIKRANKIRRRLVKDSNTKKAGKTGPMKTLLVRVMTPDLRERLENLRKKPENIPQPISNTSRANLNKLLTDYTEMKKAILHVYWEEFQKDPVGLMSRVAQPASKKIDQNKLKPEMDEKGNLTTAGFACSQCGQPLFVYKLEQVSEKGKAYTNYFGRCNVAEHEKLILLAQLKPEKDSDEAVTYSLGKFGQRALDFYSIHVTKESTHPVKPLAQIAGNRYASVPVGKALSDACMGTIASFLSKYQDIIIEHQKVVKGNQKRLESLRELAGKENLEYPSVTLPPQPHTKEGVDAYNEVIARVRMWVNLNLWQKLKLSRDDAKPLLRLKGFPSFPLVERQANEVDWWDMVCNVKKLINEKKEDGKVFWQNLAGYKRQEALRPYLSSEEDRKKGKKFARYQLGDLLNHLEKKHGEDWGKVYDEAWERIDKKVEGLSKHIKLEEERRSEDAQSKAALTDWLRAKASFVIEGLKEADKDEFCRCELKLQKWYGDLRGKPFAIEAENSILDISGFSKQYNCAFIWQKDGVKKLNLYLIINYFKGGKLRFKKIKPEAFEANRFYTVINKKSGEIVPMEVNFNFDDPNLIILPLAFGKRQGREFIWNDLLSLETGSLKLANGRVIEKTLYNRRTRQDEPALFVALTFERREVLDSSNIKPMNLIGVDRGENIPAVIALTDPEGCPLSRFKDSLGNPTHILRIGESYKEKQRTIQAKKEVEQRRAGGYSRKYASKAKNLADDMVRNTARDLLYYAVTQDAMLIFENLSRGFGRQGKRTFMAERQYTRMEDWLTAKLAYEGLPSKTYLSKTLAQYTSKTCSNCGFTITSADYDRVLEKLKKTATGWMTTINGKELKVEGQITYYNRYKRQNVVKDLSVELDRLSEESVNNDISSWTKGRSGEALSLLKKRFSHRPVQEKFVCLNCGFETHADEQAALNIARSWLFLRSQEYKKYQTNKTTGNTDKRAFVETWQSFYRKKLKEVWKPAV

SEQ ID NO: 41648 - protein, 978 aa, synthetic construct
  REGION 1..978: note = engineered CasX variant
QEIKRANKIRRRLVKDSNTKKAGKTGPMKTLLVRVMTPDLRERLENLRKKPENIPQPISNTSRANLNKLLTDYTEMKKAILHVYWEEFQKDPVGLMSRVAQPASKKIDQNKLKPEMDEKGNLTTAGFACSQCGQPLFVYKLEQVSEKGKAYTNYFGRCNVAEHEKLIKLAQLKPEKDSDEAVTYSLGKFGQRALDFYSIHVTKESTHPVKPLAQIAGNRYASGPVGKALSDACMGTIASFLSKYQDIIIEHQKVVKGNQKRLESLRELAGKENLEYPSVTLPPQPHTKEGVDAYNEVIARVRMWVNLNLWQKLKLSRDDAKPLLRLKGFPSFPLVERQANEVDWWDMVCNVKKLINEKKEDGKVFWQNLAGYKRQEALRPYLSSEEDRKKGKKFARYQLGDLLNHLEKKHGEDWGKVYDEAWERIDKKVEGLSKHIKLEEERRSEDAQSKAALTDWLRAKASFVIEGLKEADKDEFCRCELKLQKWYGDLRGKPFAIEAENSILDISGFSKQYNCAFIWQKDGVKKLNLYLIINYFKGGKLRFKKIKPEAFEANRFYTVINKKSGEIVPMEVNFNFDDPNLIILPLAFGKRQGREFIWNDLLSLETGSLKLANGRVIEKTLYNRRTRQDEPALFVALTFERREVLDSSNIKPMNLIGVDRGENIPAVIALTDPEGCPLSRFKDSLGNPTHILRIGESYKEKQRTIQAKKEVEQRRAGGYSRKYASKAKNLADDMVRNTARDLLYYAVTQDAMLIFENLSRGFGRQGKRTFMAERQYTRMEDWLTAKLAYEGLPSKTYLSKTLAQYTSKTCSNCGFTITSADYDRVLEKLKKTATGWMTTINGKELKVEGQITYYNRYKRQNVVKDLSVELDRLSEESVNNDISSWTKGRSGEALSLLKKRFSHRPVQEKFVCLNCGFETHADEQAALNIARSWLFLRSQEYKKYQTNKTTGNTDKRAFVETWQSFYRKKLKEVWKPAV

SEQ ID NO: 41649 - protein, 977 aa, synthetic construct
  REGION 1..977: note = engineered CasX variant
QEIKRANKIRRRLVKDSNTKKAGKTGPMKTLLVRVMTPDLRERLENLRKKPENIPQPISNTSRANLNKLLTDYTEMKKAILHVYWEEFQKDPVGLMSRVAQPASKKIDQNKLKPEMDEKGNLTTAGFACSQCGQPLFVYKLEQVSEKGKAYTNYFGRCNVAEHEKLILLAQLKPEKDSDEAVTYSLGKFGQRALDFYSIHVTKESTHPVKPLAQIAGNRYASPVGKALSDACMGTIASFLSKYQDIIIEHQKVVKGNQKRLESLRELAGKENLEYPSVTLPPQPHTKEGVDAYNEVIARVRMWVNLNLWQKLKLSRDDAKPLLRLKGFPSFPLVERQANEVDWWDMVCNVKKLINEKKEDGKVFWQNLAGYKRQEALRPYLSSEEDRKKGKKFARYQLGDLLNHLEKKHGEDWGKVYDEAWERIDKKVEGLSKHIKLEEERRSEDAQSKAALTDWLRAKASFVIEGLKEADKDEFCRCELKLQKWYGDLRGKPFAIEAENSILDISGFSKQYNCAFIWQKDGVKKLNLYLIINYFKGGKLRFKKIKPEAFEANRFYTVINKKSGEIVPMEVNFNFDDPNLIILPLAFGKRQGREFIWNDLLSLETGSLKLANGRVIEKTLYNRRTRQDEPALFVALTFERREVLDSSNIKPMNLIGVDRGENIPAVIALTDPEGCPLSRFKDSLGNPTHILRIGESYKEKQRTIQAKKEVEQRRAGGYSRKYASKAKNLADDMVRNTARDLLYYAVTQDAMLIFENLSRGFGRQGKRTFMAERQYTRMEDWLTAKLAYEGLPSKTYLSKTLAQYTSKTCSNCGFTITSADYDRVLEKLKKTATGWMTTINGKELKVEGQITYYNRYKRQNVVKDLSVELDRLSEESVNNDISSWTKGRSGEALSLLKKRFSHRPVQEKFVCLNCGFETHADEQAALNIARSWLFLRSQEYKKYQTNKTTGNTDKRAFVETWQSFYRKKLKEVWKPAV

SEQ ID NO: 41650 - protein, 978 aa, synthetic construct
  REGION 1..978: note = engineered CasX variant
QEIKRANKIRRRLVKDSNTKKAGKTGPMKTLLVRVMTPDLRERLENLRKKPENIPQPISNTSRANLNKLLTDYTEMKKAILHVYWEEFQKDPVGLMSRVAQPASKKIDQNKLKPEMDEKGNLTTAGFACSQCGQPLFVYKLEQVSEKGKAYTNYFGRCNVAEHEKLILLAQLKPEKDSDEAVTYSLGKFGQRALDFYSIHVTKESTHPVKPLAQIAGNRYASYPVGKALSDACMGTIASFLSKYQDIIIEHQKVVKGNQKRLESLRELAGKENLEYPSVTLPPQPHTKEGVDAYNEVIARVRMWVNLNLWQKLKLSRDDAKPLLRLKGFPSFPLVERQANEVDWWDMVCNVKKLINEKKEDGKVFWQNLAGYKRQEALRPYLSSEEDRKKGKKFARYQLGDLLWHLEKKHGEDWGKVYDEAWERIDKKVEGLSKHIKLEEERRSEDAQSKAALTDWLRAKASFVIEGLKEADKDEFCRCELKLQKWYGDLRGKPFAIEAENSILDISGFSKQYNCAFIWQKDGVKKLNLYLIINYFKGGKLRFKKIKPEAFEANRFYTVINKKSGEIVPMEVNFNFDDPNLIILPLAFGKRQGREFIWNDLLSLETGSLKLANGRVIEKTLYNRRTRQDEPALFVALTFERREVLDSSNIKPMNLIGVDRGENIPAVIALTDPEGCPLSRFKDSLGNPTHILRIGESYKEKQRTIQAKKEVEQRRAGGYSRKYASKAKNLADDMVRNTARDLLYYAVTQDAMLIFENLSRGFGRQGKRTFMAERQYTRMEDWLTAKLAYEGLPSKTYLSKTLAQYTSKTCSNCGFTITSADYDRVLEKLKKTATGWMTTINGKELKVEGQITYYNRYKRQNVVKDLSVELDRLSEESVNNDISSWTKGRSGEALSLLKKRFSHRPVQEKFVCLNCGFETHADEQAALNIARSWLFLRSQEYKKYQTNKTTGNTDKRAFVETWQSFYRKKLKEVWKPAV

SEQ ID NO: 41651 - protein, 978 aa, synthetic construct
  REGION 1..978: note = engineered CasX variant
QEIKRANKIRRRLVKDSNTKKAGKTGPMKTLLVRVMTPDLRERLENLRKKPENIPQPISNTSRANLNKLLTDYTEMKKAILHVYWEEFQKDPVGLMSRVAQPASKKIDQNKLKPEMDEKGNLTTAGFACSQCGQPLFVYKLEQVSEKGKAYTNYFGRCNVAEHEKLILLAQLKPEKDSDEAVTYSLGKFGQRALDFYSIHVTKESTHPVKPLAQIAGNRYASHPVGKALSDACMGTIASFLSKYQDIIIEHQKVVKGNQKRLESLRELAGKENLEYPSVTLPPQPHTKEGVDAYNEVIARVRMWVNLNLWQKLKLSRDDAKPLLRLKGFPSFPLVERQANEVDWWDMVCNVKKLINEKKEDGKVFWQNLAGYKRQEALRPYLSSEEDRKKGKKFARYQLGDLLWHLEKKHGEDWGKVYDEAWERIDKKVEGLSKHIKLEEERRSEDAQSKAALTDWLRAKASFVIEGLKEADKDEFCRCELKLQKWYGDLRGKPFAIEAENSILDISGFSKQYNCAFIWQKDGVKKLNLYLIINYFKGGKLRFKKIKPEAFEANRFYTVINKKSGEIVPMEVNFNFDDPNLIILPLAFGKRQGREFIWNDLLSLETGSLKLANGRVIEKTLYNRRTRQDEPALFVALTFERREVLDSSNIKPMNLIGVDRGENIPAVIALTDPEGCPLSRFKDSLGNPTHILRIGESYKEKQRTIQAKKEVEQRRAGGYSRKYASKAKNLADDMVRNTARDLLYYAVTQDAMLIFENLSRGFGRQGKRTFMAERQYTRMEDWLTAKLAYEGLPSKTYLSKTLAQYTSKTCSNCGFTITSADYDRVLEKLKKTATGWMTTINGKELKVEGQITYYNRYKRQNVVKDLSVELDRLSEESVNNDISSWTKGRSGEALSLLKKRFSHRPVQEKFVCLNCGFETHADEQAALNIARSWLFLRSQEYKKYQTNKTTGNTDKRAFVETWQSFYRKKLKEVWKPAV

SEQ ID NO: 41652 - protein, 978 aa, synthetic construct
  REGION 1..978: note = engineered CasX variant
QEIKRANKIRRRLVKDSNTKKAGKTGPMKTLLVRVMTPDLRERLENLRKKPENIPQPISNTSRANLNKLLTDYTEMKKAILHVYWEEFQKDPVGLMSRVAQPASKKIDQNKLKPEMDEKGNLTTAGFACSQCGQPLFVYKLEQVSEKGKAYTNYFGRCNVAEHEKLILLAQLKPEKDSDEAVTYSLGKFGQRALDFYSIHVTKESTHPVKPLAQIAGNRYASSPVGKALSDACMGTIASFLSKYQDIIIEHQKVVKGNQKRLESLRELAGKENLEYPSVTLPPQPHTKEGVDAYNEVIARVRMWVNLNLWQKLKLSRDDAKPLLRLKGFPSFPLVERQANEVDWWDMVCNVKKLINEKKEDGKVFWQNLAGYKRQEALRPYLSSEEDRKKGKKFARYQLGDLLWHLEKKHGEDWGKVYDEAWERIDKKVEGLSKHIKLEEERRSEDAQSKAALTDWLRAKASFVIEGLKEADKDEFCRCELKLQKWYGDLRGKPFAIEAENSILDISGFSKQYNCAFIWQKDGVKKLNLYLIINYFKGGKLRFKKIKPEAFEANRFYTVINKKSGEIVPMEVNFNFDDPNLIILPLAFGKRQGREFIWNDLLSLETGSLKLANGRVIEKTLYNRRTRQDEPALFVALTFERREVLDSSNIKPMNLIGVDRGENIPAVIALTDPEGCPLSRFKDSLGNPTHILRIGESYKEKQRTIQAKKEVEQRRAGGYSRKYASKAKNLADDMVRNTARDLLYYAVTQDAMLIFENLSRGFGRQGKRTFMAERQYTRMEDWLTAKLAYEGLPSKTYLSKTLAQYTSKTCSNCGFTITSADYDRVLEKLKKTATGWMTTINGKELKVEGQITYYNRYKRQNVVKDLSVELDRLSEESVNNDISSWTKGRSGEALSLLKKRFSHRPVQEKFVCLNCGFETHADEQAALNIARSWLFLRSQEYKKYQTNKTTGNTDKRAFVETWQSFYRKKLKEVWKPAV

SEQ ID NO: 41653 - protein, 978 aa, synthetic construct
  REGION 1..978: note = engineered CasX variant
QEIKRANKIRRRLVKDSNTKKAGKTGPMKTLLVRVMTPDLRERLENLRKKPENIPQPISNTSRANLNKLLTDYTEMKKAILHVYWEEFQKDPVGLMSRVAQPASKKIDQNKLKPEMDEKGNLTTAGFACSQCGQPLFVYKLEQVSEKGKAYTNYFGRCNVAEHEKLILLAQLKPEKDSDEAVTYSLGKFGQRALDFYSIHVTKESTHPVKPLAQIAGNRYASTPVGKALSDACMGTIASFLSKYQDIIIEHQKVVKGNQKRLESLRELAGKENLEYPSVTLPPQPHTKEGVDAYNEVIARVRMWVNLNLWQKLKLSRDDAKPLLRLKGFPSFPLVERQANEVDWWDMVCNVKKLINEKKEDGKVFWQNLAGYKRQEALRPYLSSEEDRKKGKKFARYQLGDLLWHLEKKHGEDWGKVYDEAWERIDKKVEGLSKHIKLEEERRSEDAQSKAALTDWLRAKASFVIEGLKEADKDEFCRCELKLQKWYGDLRGKPFAIEAENSILDISGFSKQYNCAFIWQKDGVKKLNLYLIINYFKGGKLRFKKIKPEAFEANRFYTVINKKSGEIVPMEVNFNFDDPNLIILPLAFGKRQGREFIWNDLLSLETGSLKLANGRVIEKTLYNRRTRQDEPALFVALTFERREVLDSSNIKPMNLIGVDRGENIPAVIALTDPEGCPLSRFKDSLGNPTHILRIGESYKEKQRTIQAKKEVEQRRAGGYSRKYASKAKNLADDMVRNTARDLLYYAVTQDAMLIFENLSRGFGRQGKRTFMAERQYTRMEDWLTAKLAYEGLPSKTYLSKTLAQYTSKTCSNCGFTITSADYDRVLEKLKKTATGWMTTINGKELKVEGQITYYNRYKRQNVVKDLSVELDRLSEESVNNDISSWTKGRSGEALSLLKKRFSHRPVQEKFVCLNCGFETHADEQAALNIARSWLFLRSQEYKKYQTNKTTGNTDKRAFVETWQSFYRKKLKEVWKPAV

SEQ ID NO: 41654 - protein, 978 aa, synthetic construct
  REGION 1..978: note = engineered CasX variant
QEIKRANKIRRRLVKDSNTKKAGKTGPMKTLLVRVMTPDLRERLENLRKKPENIPQPISNTSRANLNKLLTDYTEMKKAILHVYWEEFQKDPVGLMSRVAQPASKKIDQNKLKPEMDEKGNLTTAGFACSQCGQPLFVYKLEQVSEKGKAYTNYFGRCNVAEHEKLILLAQLKPEKDSDEAVTYSLGKFGQRALDFYSIHVTKESTHPVKPLAQIAGNRYASAPVGKALSDACMGTIASFLSKYQDIIIEHQKVVKGNQKRLESLRELAGKENLEYPSVTLPPQPHTKEGVDAYNEVIARVRMWVNLNLWQKLKLSRDDAKPLLRLKGFPSFPLVERQANEVDWWDMVCNVKKLINEKKEDGKVFWQNLAGYKRQEALRPYLSSEEDRKKGKKFARYQLGDLLWHLEKKHGEDWGKVYDEAWERIDKKVEGLSKHIKLEEERRSEDAQSKAALTDWLRAKASFVIEGLKEADKDEFCRCELKLQKWYGDLRGKPFAIEAENSILDISGFSKQYNCAFIWQKDGVKKLNLYLIINYFKGGKLRFKKIKPEAFEANRFYTVINKKSGEIVPMEVNFNFDDPNLIILPLAFGKRQGREFIWNDLLSLETGSLKLANGRVIEKTLYNRRTRQDEPALFVALTFERREVLDSSNIKPMNLIGVDRGENIPAVIALTDPEGCPLSRFKDSLGNPTHILRIGESYKEKQRTIQAKKEVEQRRAGGYSRKYASKAKNLADDMVRNTARDLLYYAVTQDAMLIFENLSRGFGRQGKRTFMAERQYTRMEDWLTAKLAYEGLPSKTYLSKTLAQYTSKTCSNCGFTITSADYDRVLEKLKKTATGWMTTINGKELKVEGQITYYNRYKRQNVVKDLSVELDRLSEESVNNDISSWTKGRSGEALSLLKKRFSHRPVQEKFVCLNCGFETHADEQAALNIARSWLFLRSQEYKKYQTNKTTGNTDKRAFVETWQSFYRKKLKEVWKPAV

SEQ ID NO: 41655 - protein, 978 aa, synthetic construct
  REGION 1..978: note = engineered CasX variant
QEIKRANKIRRRLVKDSNTKKAGKTGPMKTLLVRVMTPDLRERLENLRKKPENIPQPISNTSRANLNKLLTDYTEMKKAILHVYWEEFQKDPVGLMSRVAQPASKKIDQNKLKPEMDEKGNLTTAGFACSQCGQPLFVYKLEQVSEKGKAYTNYFGRCNVAEHEKLILLAQLKPEKDSDEAVTYSLGKFGQRALDFYSIHVTKESTHPVKPLAQIAGNRYASVPVGKALSDACMGTIASFLSKYQDIIIEHQKVVKGNQKRLESLRELAGKENLEYPSVTLPPQPHTKEGVDAYNEVIARVRMWVNLNLWQKLKLSRDDAKPLLRLKGFPSFPLVERQANEVDWWDMVCNVKKLINEKKEDGKVFWQNLAGYKRQEALRPYLSSEEDRKKGKKFARYQLGDLLWHLEKKHGEDWGKVYDEAWERIDKKVEGLSKHIKLEEERRSEDAQSKAALTDWLRAKASFVIEGLKEADKDEFCRCELKLQKWYGDLRGKPFAIEAENSILDISGFSKQYNCAFIWQKDGVKKLNLYLIINYFKGGKLRFKKIKPEAFEANRFYTVINKKSGEIVPMEVNFNFDDPNLIILPLAFGKRQGREFIWNDLLSLETGSLKLANGRVIEKTLYNRRTRQDEPALFVALTFERREVLDSSNIKPMNLIGVDRGENIPAVIALTDPEGCPLSRFKDSLGNPTHILRIGESYKEKQRTIQAKKEVEQRRAGGYSRKYASKAKNLADDMVRNTARDLLYYAVTQDAMLIFENLSRGFGRQGKRTFMAERQYTRMEDWLTAKLAYEGLPSKTYLSKTLAQYTSKTCSNCGFTITSADYDRVLEKLKKTATGWMTTINGKELKVEGQITYYNRYKRQNVVKDLSVELDRLSEESVNNDISSWTKGRSGEALSLLKKRFSHRPVQEKFVCLNCGFETHADEQAALNIARSWLFLRSQEYKKYQTNKTTGNTDKRAFVETWQSFYRKKLKEVWKPAV

SEQ ID NO: 41656 - protein, 978 aa, synthetic construct
  REGION 1..978: note = engineered CasX variant
QEIKRANKIRRRLVKDSNTKKAGKTGPMKTLLVRVMTPDLRERLENLRKKPENIPQPISNTSRANLNKLLTDYTEMKKAILHVYWEEFQKDPVGLMSRVAQPASKKIDQNKLKPEMDEKGNLTTAGFACSQCGQPLFVYKLEQVSEKGKAYTNYFGRCNVAEHEKLIKLAQLKPEKDSDEAVTYSLGKFGQRALDFYSIHVTKESTHPVKPLAQIAGNRYASGPVGKALSDACMGTIASFLSKYQDIIIEHQKVVKGNQKRLESLRELAGKENLEYPSVTLPPQPHTKEGVDAYNEVIARVRMWVNLNLWQKLKLSRDDAKPLLRLKGFPSFPLVERQANEVDWWDMVCNVKKLINEKKEDGKVFWQNLAGYKRQEALRPYLSSEEDRKKGKKFARYQLGDLLWHLEKKHGEDWGKVYDEAWERIDKKVEGLSKHIKLEEERRSEDAQSKAALTDWLRAKASFVIEGLKEADKDEFCRCELKLQKWYGDLRGKPFAIEAENSILDISGFSKQYNCAFIWQKDGVKKLNLYLIINYFKGGKLRFKKIKPEAFEANRFYTVINKKSGEIVPMEVNFNFDDPNLIILPLAFGKRQGREFIWNDLLSLETGSLKLANGRVIEKTLYNRRTRQDEPALFVALTFERREVLDSSNIKPMNLIGVDRGENIPAVIALTDPEGCPLSRFKDSLGNPTHILRIGESYKEKQRTIQAKKEVEQRRAGGYSRKYASKAKNLADDMVRNTARDLLYYAVTQDAMLIFENLSRGFGRQGKRTFMAERQYTRMEDWLTAKLAYEGLPSKTYLSKTLAQYTSKTCSNCGFTITSADYDRVLEKLKKTATGWMTTINGKELKVEGQITYYNRYKRQNVVKDLSVELDRLSEESVNNDISSWTKGRSGEALSLLKKRFSHRPVQEKFVCLNCGFETHADEQAALNIARSWLFLRSQEYKKYQTNKTTGNTDKRAFVETWQSFYRKKLKEVWKPAV

SEQ ID NO: 41657 - protein, 977 aa, synthetic construct
  REGION 1..977: note = engineered CasX variant
QEIKRANKIRRRLVKDSNTKKAGKTGPMKTLLVRVMTPDLRERLENLRKKPENIPQPISNTSRANLNKLLTDYTEMKKAILHVYWEEFQKDPVGLMSRVAQPASKKIDQNKLKPEMDEKGNLTTAGFACSQCGQPLFVYKLEQVSEKGKAYTNYFGRCNVAEHEKLILLAQLKPEKDSDEAVTYSLGKFGQRALDFYSIHVTKESTHPVKPLAQIAGNRYASPVGKALSDACMGTIASFLSKYQDIIIEHQKVVKGNQKRLESLRELAGKENLEYPSVTLPPQPHTKEGVDAYNEVIARVRMWVNLNLWQKLKLSRDDAKPLLRLKGFPSFPLVERQANEVDWWDMVCNVKKLINEKKEDGKVFWQNLAGYKRQEALRPYLSSEEDRKKGKKFARYQLGDLLWHLEKKHGEDWGKVYDEAWERIDKKVEGLSKHIKLEEERRSEDAQSKAALTDWLRAKASFVIEGLKEADKDEFCRCELKLQKWYGDLRGKPFAIEAENSILDISGFSKQYNCAFIWQKDGVKKLNLYLIINYFKGGKLRFKKIKPEAFEANRFYTVINKKSGEIVPMEVNFNFDDPNLIILPLAFGKRQGREFIWNDLLSLETGSLKLANGRVIEKTLYNRRTRQDEPALFVALTFERREVLDSSNIKPMNLIGVDRGENIPAVIALTDPEGCPLSRFKDSLGNPTHILRIGESYKEKQRTIQAKKEVEQRRAGGYSRKYASKAKNLADDMVRNTARDLLYYAVTQDAMLIFENLSRGFGRQGKRTFMAERQYTRMEDWLTAKLAYEGLPSKTYLSKTLAQYTSKTCSNCGFTITSADYDRVLEKLKKTATGWMTTINGKELKVEGQITYYNRYKRQNVVKDLSVELDRLSEESVNNDISSWTKGRSGEALSLLKKRFSHRPVQEKFVCLNCGFETHADEQAALNIARSWLFLRSQEYKKYQTNKTTGNTDKRAFVETWQSFYRKKLKEVWKPAV

SEQ ID NO: 41658 - protein, 978 aa, synthetic construct
  REGION 1..978: note = engineered CasX variant
QEIKRANKIRRRLVKDSNTKKAGKTGPMKTLLVRVMTPDLRERLENLRKKPENIPQPISNTSRANLNKLLTDYTEMKKAILHVYWEEFQKDPVGLMSRVAQPASKKIDQNKLKPEMDEKGNLTTAGFACSQCGQPLFVYKLEQVSEKGKAYTNYFGRCNVAEHEKLILLAQLKPEKDSDEAVTYSLGKFGQRALDFYSIHVTKESTHPVKPLAQIAGNRYASYPVGKALSDACMGTIASFLSKYQDIIIEHQKVVKGNQKRLESLRELAGKENLEYPSVTLPPQPHTKEGVDAYNEVIARVRMWVNLNLWQKLKLSRDDAKPLLRLKGFPSFPLVERQANEVDWWDMVCNVKKLINEKKEDGKVFWQNLAGYKRQEALRPYLSSEEDRKKGKKFARYQLGDLLLHLYKKHGEDWGKVYDEAWERIDKKVEGLSKHIKLEEERRSEDAQSKAALTDWLRAKASFVIEGLKEADKDEFCRCELKLQKWYGDLRGKPFAIEAENSILDISGFSKQYNCAFIWQKDGVKKLNLYLIINYFKGGKLRFKKIKPEAFEANRFYTVINKKSGEIVPMEVNFNFDDPNLIILPLAFGKRQGREFIWNDLLSLETGSLKLANGRVIEKTLYNRRTRQDEPALFVALTFERREVLDSSNIKPMNLIGVDRGENIPAVIALTDPEGCPLSRFKDSLGNPTHILRIGESYKEKQRTIQAKKEVEQRRAGGYSRKYASKAKNLADDMVRNTARDLLYYAVTQDAMLIFENLSRGFGRQGKRTFMAERQYTRMEDWLTAKLAYEGLPSKTYLSKTLAQYTSKTCSNCGFTITSADYDRVLEKLKKTATGWMTTINGKELKVEGQITYYNRYKRQNVVKDLSVELDRLSEESVNNDISSWTKGRSGEALSLLKKRFSHRPVQEKFVCLNCGFETHADEQAALNIARSWLFLRSQEYKKYQTNKTTGNTDKRAFVETWQSFYRKKLKEVWKPAV

SEQ ID NO: 41659 - protein, 978 aa, synthetic construct
  REGION 1..978: note = engineered CasX variant
QEIKRANKIRRRLVKDSNTKKAGKTGPMKTLLVRVMTPDLRERLENLRKKPENIPQPISNTSRANLNKLLTDYTEMKKAILHVYWEEFQKDPVGLMSRVAQPASKKIDQNKLKPEMDEKGNLTTAGFACSQCGQPLFVYKLEQVSEKGKAYTNYFGRCNVAEHEKLILLAQLKPEKDSDEAVTYSLGKFGQRALDFYSIHVTKESTHPVKPLAQIAGNRYASHPVGKALSDACMGTIASFLSKYQDIIIEHQKVVKGNQKRLESLRELAGKENLEYPSVTLPPQPHTKEGVDAYNEVIARVRMWVNLNLWQKLKLSRDDAKPLLRLKGFPSFPLVERQANEVDWWDMVCNVKKLINEKKEDGKVFWQNLAGYKRQEALRPYLSSEEDRKKGKKFARYQLGDLLLHLYKKHGEDWGKVYDEAWERIDKKVEGLSKHIKLEEERRSEDAQSKAALTDWLRAKASFVIEGLKEADKDEFCRCELKLQKWYGDLRGKPFAIEAENSILDISGFSKQYNCAFIWQKDGVKKLNLYLIINYFKGGKLRFKKIKPEAFEANRFYTVINKKSGEIVPMEVNFNFDDPNLIILPLAFGKRQGREFIWNDLLSLETGSLKLANGRVIEKTLYNRRTRQDEPALFVALTFERREVLDSSNIKPMNLIGVDRGENIPAVIALTDPEGCPLSRFKDSLGNPTHILRIGESYKEKQRTIQAKKEVEQRRAGGYSRKYASKAKNLADDMVRNTARDLLYYAVTQDAMLIFENLSRGFGRQGKRTFMAERQYTRMEDWLTAKLAYEGLPSKTYLSKTLAQYTSKTCSNCGFTITSADYDRVLEKLKKTATGWMTTINGKELKVEGQITYYNRYKRQNVVKDLSVELDRLSEESVNNDISSWTKGRSGEALSLLKKRFSHRPVQEKFVCLNCGFETHADEQAALNIARSWLFLRSQEYKKYQTNKTTGNTDKRAFVETWQSFYRKKLKEVWKPAV

SEQ ID NO: 41660 - protein, 978 aa, synthetic construct
  REGION 1..978: note = engineered CasX variant
QEIKRANKIRRRLVKDSNTKKAGKTGPMKTLLVRVMTPDLRERLENLRKKPENIPQPISNTSRANLNKLLTDYTEMKKAILHVYWEEFQKDPVGLMSRVAQPASKKIDQNKLKPEMDEKGNLTTAGFACSQCGQPLFVYKLEQVSEKGKAYTNYFGRCNVAEHEKLILLAQLKPEKDSDEAVTYSLGKFGQRALDFYSIHVTKESTHPVKPLAQIAGNRYASSPVGKALSDACMGTIASFLSKYQDIIIEHQKVVKGNQKRLESLRELAGKENLEYPSVTLPPQPHTKEGVDAYNEVIARVRMWVNLNLWQKLKLSRDDAKPLLRLKGFPSFPLVERQANEVDWWDMVCNVKKLINEKKEDGKVFWQNLAGYKRQEALRPYLSSEEDRKKGKKFARYQLGDLLLHLYKKHGEDWGKVYDEAWERIDKKVEGLSKHIKLEEERRSEDAQSKAALTDWLRAKASFVIEGLKEADKDEFCRCELKLQKWYGDLRGKPFAIEAENSILDISGFSKQYNCAFIWQKDGVKKLNLYLIINYFKGGKLRFKKIKPEAFEANRFYTVINKKSGEIVPMEVNFNFDDPNLIILPLAFGKRQGREFIWNDLLSLETGSLKLANGRVIEKTLYNRRTRQDEPALFVALTFERREVLDSSNIKPMNLIGVDRGENIPAVIALTDPEGCPLSRFKDSLGNPTHILRIGESYKEKQRTIQAKKEVEQRRAGGYSRKYASKAKNLADDMVRNTARDLLYYAVTQDAMLIFENLSRGFGRQGKRTFMAERQYTRMEDWLTAKLAYEGLPSKTYLSKTLAQYTSKTCSNCGFTITSADYDRVLEKLKKTATGWMTTINGKELKVEGQITYYNRYKRQNVVKDLSVELDRLSEESVNNDISSWTKGRSGEALSLLKKRFSHRPVQEKFVCLNCGFETHADEQAALNIARSWLFLRSQEYKKYQTNKTTGNTDKRAFVETWQSFYRKKLKEVWKPAV

SEQ ID NO: 41661 - protein, 978 aa, synthetic construct
  REGION 1..978: note = engineered CasX variant
QEIKRANKIRRRLVKDSNTKKAGKTGPMKTLLVRVMTPDLRERLENLRKKPENIPQPISNTSRANLNKLLTDYTEMKKAILHVYWEEFQKDPVGLMSRVAQPASKKIDQNKLKPEMDEKGNLTTAGFACSQCGQPLFVYKLEQVSEKGKAYTNYFGRCNVAEHEKLILLAQLKPEKDSDEAVTYSLGKFGQRALDFYSIHVTKESTHPVKPLAQIAGNRYASTPVGKALSDACMGTIASFLSKYQDIIIEHQKVVKGNQKRLESLRELAGKENLEYPSVTLPPQPHTKEGVDAYNEVIARVRMWVNLNLWQKLKLSRDDAKPLLRLKGFPSFPLVERQANEVDWWDMVCNVKKLINEKKEDGKVFWQNLAGYKRQEALRPYLSSEEDRKKGKKFARYQLGDLLLHLYKKHGEDWGKVYDEAWERIDKKVEGLSKHIKLEEERRSEDAQSKAALTDWLRAKASFVIEGLKEADKDEFCRCELKLQKWYGDLRGKPFAIEAENSILDISGFSKQYNCAFIWQKDGVKKLNLYLIINYFKGGKLRFKKIKPEAFEANRFYTVINKKSGEIVPMEVNFNFDDPNLIILPLAFGKRQGREFIWNDLLSLETGSLKLANGRVIEKTLYNRRTRQDEPALFVALTFERREVLDSSNIKPMNLIGVDRGENIPAVIALTDPEGCPLSRFKDSLGNPTHILRIGESYKEKQRTIQAKKEVEQRRAGGYSRKYASKAKNLADDMVRNTARDLLYYAVTQDAMLIFENLSRGFGRQGKRTFMAERQYTRMEDWLTAKLAYEGLPSKTYLSKTLAQYTSKTCSNCGFTITSADYDRVLEKLKKTATGWMTTINGKELKVEGQITYYNRYKRQNVVKDLSVELDRLSEESVNNDISSWTKGRSGEALSLLKKRFSHRPVQEKFVCLNCGFETHADEQAALNIARSWLFLRSQEYKKYQTNKTTGNTDKRAFVETWQSFYRKKLKEVWKPAV

SEQ ID NO: 41662 - protein, 978 aa, synthetic construct
  REGION 1..978: note = engineered CasX variant
QEIKRANKIRRRLVKDSNTKKAGKTGPMKTLLVRVMTPDLRERLENLRKKPENIPQPISNTSRANLNKLLTDYTEMKKAILHVYWEEFQKDPVGLMSRVAQPASKKIDQNKLKPEMDEKGNLTTAGFACSQCGQPLFVYKLEQVSEKGKAYTNYFGRCNVAEHEKLILLAQLKPEKDSDEAVTYSLGKFGQRALDFYSIHVTKESTHPVKPLAQIAGNRYASAPVGKALSDACMGTIASFLSKYQDIIIEHQKVVKGNQKRLESLRELAGKENLEYPSVTLPPQPHTKEGVDAYNEVIARVRMWVNLNLWQKLKLSRDDAKPLLRLKGFPSFPLVERQANEVDWWDMVCNVKKLINEKKEDGKVFWQNLAGYKRQEALRPYLSSEEDRKKGKKFARYQLGDLLLHLYKKHGEDWGKVYDEAWERIDKKVEGLSKHIKLEEERRSEDAQSKAALTDWLRAKASFVIEGLKEADKDEFCRCELKLQKWYGDLRGKPFAIEAENSILDISGFSKQYNCAFIWQKDGVKKLNLYLIINYFKGGKLRFKKIKPEAFEANRFYTVINKKSGEIVPMEVNFNFDDPNLIILPLAFGKRQGREFIWNDLLSLETGSLKLANGRVIEKTLYNRRTRQDEPALFVALTFERREVLDSSNIKPMNLIGVDRGENIPAVIALTDPEGCPLSRFKDSLGNPTHILRIGESYKEKQRTIQAKKEVEQRRAGGYSRKYASKAKNLADDMVRNTARDLLYYAVTQDAMLIFENLSRGFGRQGKRTFMAERQYTRMEDWLTAKLAYEGLPSKTYLSKTLAQYTSKTCSNCGFTITSADYDRVLEKLKKTATGWMTTINGKELKVEGQITYYNRYKRQNVVKDLSVELDRLSEESVNNDISSWTKGRSGEALSLLKKRFSHRPVQEKFVCLNCGFETHADEQAALNIARSWLFLRSQEYKKYQTNKTTGNTDKRAFVETWQSFYRKKLKEVWKPAV

SEQ ID NO: 41663 - protein, 978 aa, synthetic construct
  REGION 1..978: note = engineered CasX variant
QEIKRANKIRRRLVKDSNTKKAGKTGPMKTLLVRVMTPDLRERLENLRKKPENIPQPISNTSRANLNKLLTDYTEMKKAILHVYWEEFQKDPVGLMSRVAQPASKKIDQNKLKPEMDEKGNLTTAGFACSQCGQPLFVYKLEQVSEKGKAYTNYFGRCNVAEHEKLILLAQLKPEKDSDEAVTYSLGKFGQRALDFYSIHVTKESTHPVKPLAQIAGNRYASVPVGKALSDACMGTIASFLSKYQDIIIEHQKVVKGNQKRLESLRELAGKENLEYPSVTLPPQPHTKEGVDAYNEVIARVRMWVNLNLWQKLKLSRDDAKPLLRLKGFPSFPLVERQANEVDWWDMVCNVKKLINEKKEDGKVFWQNLAGYKRQEALRPYLSSEEDRKKGKKFARYQLGDLLLHLYKKHGEDWGKVYDEAWERIDKKVEGLSKHIKLEEERRSEDAQSKAALTDWLRAKASFVIEGLKEADKDEFCRCELKLQKWYGDLRGKPFAIEAENSILDISGFSKQYNCAFIWQKDGVKKLNLYLIINYFKGGKLRFKKIKPEAFEANRFYTVINKKSGEIVPMEVNFNFDDPNLIILPLAFGKRQGREFIWNDLLSLETGSLKLANGRVIEKTLYNRRTRQDEPALFVALTFERREVLDSSNIKPMNLIGVDRGENIPAVIALTDPEGCPLSRFKDSLGNPTHILRIGESYKEKQRTIQAKKEVEQRRAGGYSRKYASKAKNLADDMVRNTARDLLYYAVTQDAMLIFENLSRGFGRQGKRTFMAERQYTRMEDWLTAKLAYEGLPSKTYLSKTLAQYTSKTCSNCGFTITSADYDRVLEKLKKTATGWMTTINGKELKVEGQITYYNRYKRQNVVKDLSVELDRLSEESVNNDISSWTKGRSGEALSLLKKRFSHRPVQEKFVCLNCGFETHADEQAALNIARSWLFLRSQEYKKYQTNKTTGNTDKRAFVETWQSFYRKKLKEVWKPAV

SEQ ID NO: 41664 - protein, 978 aa, synthetic construct
  REGION 1..978: note = engineered CasX variant
QEIKRANKIRRRLVKDSNTKKAGKTGPMKTLLVRVMTPDLRERLENLRKKPENIPQPISNTSRANLNKLLTDYTEMKKAILHVYWEEFQKDPVGLMSRVAQPASKKIDQNKLKPEMDEKGNLTTAGFACSQCGQPLFVYKLEQVSEKGKAYTNYFGRCNVAEHEKLIKLAQLKPEKDSDEAVTYSLGKFGQRALDFYSIHVTKESTHPVKPLAQIAGNRYASGPVGKALSDACMGTIASFLSKYQDIIIEHQKVVKGNQKRLESLRELAGKENLEYPSVTLPPQPHTKEGVDAYNEVIARVRMWVNLNLWQKLKLSRDDAKPLLRLKGFPSFPLVERQANEVDWWDMVCNVKKLINEKKEDGKVFWQNLAGYKRQEALRPYLSSEEDRKKGKKFARYQLGDLLLHLYKKHGEDWGKVYDEAWERIDKKVEGLSKHIKLEEERRSEDAQSKAALTDWLRAKASFVIEGLKEADKDEFCRCELKLQKWYGDLRGKPFAIEAENSILDISGFSKQYNCAFIWQKDGVKKLNLYLIINYFKGGKLRFKKIKPEAFEANRFYTVINKKSGEIVPMEVNFNFDDPNLIILPLAFGKRQGREFIWNDLLSLETGSLKLANGRVIEKTLYNRRTRQDEPALFVALTFERREVLDSSNIKPMNLIGVDRGENIPAVIALTDPEGCPLSRFKDSLGNPTHILRIGESYKEKQRTIQAKKEVEQRRAGGYSRKYASKAKNLADDMVRNTARDLLYYAVTQDAMLIFENLSRGFGRQGKRTFMAERQYTRMEDWLTAKLAYEGLPSKTYLSKTLAQYTSKTCSNCGFTITSADYDRVLEKLKKTATGWMTTINGKELKVEGQITYYNRYKRQNVVKDLSVELDRLSEESVNNDISSWTKGRSGEALSLLKKRFSHRPVQEKFVCLNCGFETHADEQAALNIARSWLFLRSQEYKKYQTNKTTGNTDKRAFVETWQSFYRKKLKEVWKPAV

SEQ ID NO: 41665 - protein, 977 aa, synthetic construct
  REGION 1..977: note = engineered CasX variant
QEIKRANKIRRRLVKDSNTKKAGKTGPMKTLLVRVMTPDLRERLENLRKKPENIPQPISNTSRANLNKLLTDYTEMKKAILHVYWEEFQKDPVGLMSRVAQPASKKIDQNKLKPEMDEKGNLTTAGFACSQCGQPLFVYKLEQVSEKGKAYTNYFGRCNVAEHEKLILLAQLKPEKDSDEAVTYSLGKFGQRALDFYSIHVTKESTHPVKPLAQIAGNRYASPVGKALSDACMGTIASFLSKYQDIIIEHQKVVKGNQKRLESLRELAGKENLEYPSVTLPPQPHTKEGVDAYNEVIARVRMWVNLNLWQKLKLSRDDAKPLLRLKGFPSFPLVERQANEVDWWDMVCNVKKLINEKKEDGKVFWQNLAGYKRQEALRPYLSSEEDRKKGKKFARYQLGDLLLHLYKKHGEDWGKVYDEAWERIDKKVEGLSKHIKLEEERRSEDAQSKAALTDWLRAKASFVIEGLKEADKDEFCRCELKLQKWYGDLRGKPFAIEAENSILDISGFSKQYNCAFIWQKDGVKKLNLYLIINYFKGGKLRFKKIKPEAFEANRFYTVINKKSGEIVPMEVNFNFDDPNLIILPLAFGKRQGREFIWNDLLSLETGSLKLANGRVIEKTLYNRRTRQDEPALFVALTFERREVLDSSNIKPMNLIGVDRGENIPAVIALTDPEGCPLSRFKDSLGNPTHILRIGESYKEKQRTIQAKKEVEQRRAGGYSRKYASKAKNLADDMVRNTARDLLYYAVTQDAMLIFENLSRGFGRQGKRTFMAERQYTRMEDWLTAKLAYEGLPSKTYLSKTLAQYTSKTCSNCGFTITSADYDRVLEKLKKTATGWMTTINGKELKVEGQITYYNRYKRQNVVKDLSVELDRLSEESVNNDISSWTKGRSGEALSLLKKRFSHRPVQEKFVCLNCGFETHADEQAALNIARSWLFLRSQEYKKYQTNKTTGNTDKRAFVETWQSFYRKKLKEVWKPAV

SEQ ID NO: 41666 - protein, 978 aa, synthetic construct
  REGION 1..978: note = engineered CasX variant
QEIKRANKIRRRLVKDSNTKKAGKTGPMKTLLVRVMTPDLRERLENLRKKPENIPQPISNTSRANLNKLLTDYTEMKKAILHVYWEEFQKDPVGLMSRVAQPASKKIDQNKLKPEMDEKGNLTTAGFACSQCGQPLFVYKLEQVSEKGKAYTNYFGRCNVAEHEKLILLAQLKPEKDSDEAVTYSLGKFGQRALDFYSIHVTKESTHPVKPLAQIAGNRYASYPVGKALSDACMGTIASFLSKYQDIIIEHQKVVKGNQKRLESLRELAGKENLEYPSVTLPPQPHTKEGVDAYNEVIARVRMWVNLNLWQKLKLSRDDAKPLLRLKGFPSFPLVERQANEVDWWDMVCNVKKLINEKKEDGKVFWQNLAGYKRQEALRPYLSSEEDRKKGKKFARYQLGDLLLHLEKKHPEDWGKVYDEAWERIDKKVEGLSKHIKLEEERRSEDAQSKAALTDWLRAKASFVIEGLKEADKDEFCRCELKLQKWYGDLRGKPFAIEAENSILDISGFSKQYNCAFIWQKDGVKKLNLYLIINYFKGGKLRFKKIKPEAFEANRFYTVINKKSGEIVPMEVNFNFDDPNLIILPLAFGKRQGREFIWNDLLSLETGSLKLANGRVIEKTLYNRRTRQDEPALFVALTFERREVLDSSNIKPMNLIGVDRGENIPAVIALTDPEGCPLSRFKDSLGNPTHILRIGESYKEKQRTIQAKKEVEQRRAGGYSRKYASKAKNLADDMVRNTARDLLYYAVTQDAMLIFENLSRGFGRQGKRTFMAERQYTRMEDWLTAKLAYEGLPSKTYLSKTLAQYTSKTCSNCGFTITSADYDRVLEKLKKTATGWMTTINGKELKVEGQITYYNRYKRQNVVKDLSVELDRLSEESVNNDISSWTKGRSGEALSLLKKRFSHRPVQEKFVCLNCGFETHADEQAALNIARSWLFLRSQEYKKYQTNKTTGNTDKRAFVETWQSFYRKKLKEVWKPAV

SEQ ID NO: 41667 - protein, 978 aa, synthetic construct
  REGION 1..978: note = engineered CasX variant
QEIKRANKIRRRLVKDSNTKKAGKTGPMKTLLVRVMTPDLRERLENLRKKPENIPQPISNTSRANLNKLLTDYTEMKKAILHVYWEEFQKDPVGLMSRVAQPASKKIDQNKLKPEMDEKGNLTTAGFACSQCGQPLFVYKLEQVSEKGKAYTNYFGRCNVAEHEKLILLAQLKPEKDSDEAVTYSLGKFGQRALDFYSIHVTKESTHPVKPLAQIAGNRYASHPVGKALSDACMGTIASFLSKYQDIIIEHQKVVKGNQKRLESLRELAGKENLEYPSVTLPPQPHTKEGVDAYNEVIARVRMWVNLNLWQKLKLSRDDAKPLLRLKGFPSFPLVERQANEVDWWDMVCNVKKLINEKKEDGKVFWQNLAGYKRQEALRPYLSSEEDRKKGKKFARYQLGDLLLHLEKKHPEDWGKVYDEAWERIDKKVEGLSKHIKLEEERRSEDAQSKAALTDWLRAKASFVIEGLKEADKDEFCRCELKLQKWYGDLRGKPFAIEAENSILDISGFSKQYNCAFIWQKDGVKKLNLYLIINYFKGGKLRFKKIKPEAFEANRFYTVINKKSGEIVPMEVNFNFDDPNLIILPLAFGKRQGREFIWNDLLSLETGSLKLANGRVIEKTLYNRRTRQDEPALFVALTFERREVLDSSNIKPMNLIGVDRGENIPAVIALTDPEGCPLSRFKDSLGNPTHILRIGESYKEKQRTIQAKKEVEQRRAGGYSRKYASKAKNLADDMVRNTARDLLYYAVTQDAMLIFENLSRGFGRQGKRTFMAERQYTRMEDWLTAKLAYEGLPSKTYLSKTLAQYTSKTCSNCGFTITSADYDRVLEKLKKTATGWMTTINGKELKVEGQITYYNRYKRQNVVKDLSVELDRLSEESVNNDISSWTKGRSGEALSLLKKRFSHRPVQEKFVCLNCGFETHADEQAALNIARSWLFLRSQEYKKYQTNKTTGNTDKRAFVETWQSFYRKKLKEVWKPAV

SEQ ID NO: 41668 - protein, 978 aa, synthetic construct
  REGION 1..978: note = engineered CasX variant
QEIKRANKIRRRLVKDSNTKKAGKTGPMKTLLVRVMTPDLRERLENLRKKPENIPQPISNTSRANLNKLLTDYTEMKKAILHVYWEEFQKDPVGLMSRVAQPASKKIDQNKLKPEMDEKGNLTTAGFACSQCGQPLFVYKLEQVSEKGKAYTNYFGRCNVAEHEKLILLAQLKPEKDSDEAVTYSLGKFGQRALDFYSIHVTKESTHPVKPLAQIAGNRYASSPVGKALSDACMGTIASFLSKYQDIIIEHQKVVKGNQKRLESLRELAGKENLEYPSVTLPPQPHTKEGVDAYNEVIARVRMWVNLNLWQKLKLSRDDAKPLLRLKGFPSFPLVERQANEVDWWDMVCNVKKLINEKKEDGKVFWQNLAGYKRQEALRPYLSSEEDRKKGKKFARYQLGDLLLHLEKKHPEDWGKVYDEAWERIDKKVEGLSKHIKLEEERRSEDAQSKAALTDWLRAKASFVIEGLKEADKDEFCRCELKLQKWYGDLRGKPFAIEAENSILDISGFSKQYNCAFIWQKDGVKKLNLYLIINYFKGGKLRFKKIKPEAFEANRFYTVINKKSGEIVPMEVNFNFDDPNLIILPLAFGKRQGREFIWNDLLSLETGSLKLANGRVIEKTLYNRRTRQDEPALFVALTFERREVLDSSNIKPMNLIGVDRGENIPAVIALTDPEGCPLSRFKDSLGNPTHILRIGESYKEKQRTIQAKKEVEQRRAGGYSRKYASKAKNLADDMVRNTARDLLYYAVTQDAMLIFENLSRGFGRQGKRTFMAERQYTRMEDWLTAKLAYEGLPSKTYLSKTLAQYTSKTCSNCGFTITSADYDRVLEKLKKTATGWMTTINGKELKVEGQITYYNRYKRQNVVKDLSVELDRLSEESVNNDISSWTKGRSGEALSLLKKRFSHRPVQEKFVCLNCGFETHADEQAALNIARSWLFLRSQEYKKYQTNKTTGNTDKRAFVETWQSFYRKKLKEVWKPAV

SEQ ID NO: 41669 - protein, 978 aa, synthetic construct
  REGION 1..978: note = engineered CasX variant
QEIKRANKIRRRLVKDSNTKKAGKTGPMKTLLVRVMTPDLRERLENLRKKPENIPQPISNTSRANLNKLLTDYTEMKKAILHVYWEEFQKDPVGLMSRVAQPASKKIDQNKLKPEMDEKGNLTTAGFACSQCGQPLFVYKLEQVSEKGKAYTNYFGRCNVAEHEKLILLAQLKPEKDSDEAVTYSLGKFGQRALDFYSIHVTKESTHPVKPLAQIAGNRYASTPVGKALSDACMGTIASFLSKYQDIIIEHQKVVKGNQKRLESLRELAGKENLEYPSVTLPPQPHTKEGVDAYNEVIARVRMWVNLNLWQKLKLSRDDAKPLLRLKGFPSFPLVERQANEVDWWDMVCNVKKLINEKKEDGKVFWQNLAGYKRQEALRPYLSSEEDRKKGKKFARYQLGDLLLHLEKKHPEDWGKVYDEAWERIDKKVEGLSKHIKLEEERRSEDAQSKAALTDWLRAKASFVIEGLKEADKDEFCRCELKLQKWYGDLRGKPFAIEAENSILDISGFSKQYNCAFIWQKDGVKKLNLYLIINYFKGGKLRFKKIKPEAFEANRFYTVINKKSGEIVPMEVNFNFDDPNLIILPLAFGKRQGREFIWNDLLSLETGSLKLANGRVIEKTLYNRRTRQDEPALFVALTFERREVLDSSNIKPMNLIGVDRGENIPAVIALTDPEGCPLSRFKDSLGNPTHILRIGESYKEKQRTIQAKKEVEQRRAGGYSRKYASKAKNLADDMVRNTARDLLYYAVTQDAMLIFENLSRGFGRQGKRTFMAERQYTRMEDWLTAKLAYEGLPSKTYLSKTLAQYTSKTCSNCGFTITSADYDRVLEKLKKTATGWMTTINGKELKVEGQITYYNRYKRQNVVKDLSVELDRLSEESVNNDISSWTKGRSGEALSLLKKRFSHRPVQEKFVCLNCGFETHADEQAALNIARSWLFLRSQEYKKYQTNKTTGNTDKRAFVETWQSFYRKKLKEVWKPAV

SEQ ID NO: 41670 - protein, 978 aa, synthetic construct
  REGION 1..978: note = engineered CasX variant
QEIKRANKIRRRLVKDSNTKKAGKTGPMKTLLVRVMTPDLRERLENLRKKPENIPQPISNTSRANLNKLLTDYTEMKKAILHVYWEEFQKDPVGLMSRVAQPASKKIDQNKLKPEMDEKGNLTTAGFACSQCGQPLFVYKLEQVSEKGKAYTNYFGRCNVAEHEKLILLAQLKPEKDSDEAVTYSLGKFGQRALDFYSIHVTKESTHPVKPLAQIAGNRYASAPVGKALSDACMGTIASFLSKYQDIIIEHQKVVKGNQKRLESLRELAGKENLEYPSVTLPPQPHTKEGVDAYNEVIARVRMWVNLNLWQKLKLSRDDAKPLLRLKGFPSFPLVERQANEVDWWDMVCNVKKLINEKKEDGKVFWQNLAGYKRQEALRPYLSSEEDRKKGKKFARYQLGDLLLHLEKKHPEDWGKVYDEAWERIDKKVEGLSKHIKLEEERRSEDAQSKAALTDWLRAKASFVIEGLKEADKDEFCRCELKLQKWYGDLRGKPFAIEAENSILDISGFSKQYNCAFIWQKDGVKKLNLYLIINYFKGGKLRFKKIKPEAFEANRFYTVINKKSGEIVPMEVNFNFDDPNLIILPLAFGKRQGREFIWNDLLSLETGSLKLANGRVIEKTLYNRRTRQDEPALFVALTFERREVLDSSNIKPMNLIGVDRGENIPAVIALTDPEGCPLSRFKDSLGNPTHILRIGESYKEKQRTIQAKKEVEQRRAGGYSRKYASKAKNLADDMVRNTARDLLYYAVTQDAMLIFENLSRGFGRQGKRTFMAERQYTRMEDWLTAKLAYEGLPSKTYLSKTLAQYTSKTCSNCGFTITSADYDRVLEKLKKTATGWMTTINGKELKVEGQITYYNRYKRQNVVKDLSVELDRLSEESVNNDISSWTKGRSGEALSLLKKRFSHRPVQEKFVCLNCGFETHADEQAALNIARSWLFLRSQEYKKYQTNKTTGNTDKRAFVETWQSFYRKKLKEVWKPAV

SEQ ID NO: 41671 - protein, 978 aa, synthetic construct
  REGION 1..978: note = engineered CasX variant
QEIKRANKIRRRLVKDSNTKKAGKTGPMKTLLVRVMTPDLRERLENLRKKPENIPQPISNTSRANLNKLLTDYTEMKKAILHVYWEEFQKDPVGLMSRVAQPASKKIDQNKLKPEMDEKGNLTTAGFACSQCGQPLFVYKLEQVSEKGKAYTNYFGRCNVAEHEKLILLAQLKPEKDSDEAVTYSLGKFGQRALDFYSIHVTKESTHPVKPLAQIAGNRYASVPVGKALSDACMGTIASFLSKYQDIIIEHQKVVKGNQKRLESLRELAGKENLEYPSVTLPPQPHTKEGVDAYNEVIARVRMWVNLNLWQKLKLSRDDAKPLLRLKGFPSFPLVERQANEVDWWDMVCNVKKLINEKKEDGKVFWQNLAGYKRQEALRPYLSSEEDRKKGKKFARYQLGDLLLHLEKKHPEDWGKVYDEAWERIDKKVEGLSKHIKLEEERRSEDAQSKAALTDWLRAKASFVIEGLKEADKDEFCRCELKLQKWYGDLRGKPFAIEAENSILDISGFSKQYNCAFIWQKDGVKKLNLYLIINYFKGGKLRFKKIKPEAFEANRFYTVINKKSGEIVPMEVNFNFDDPNLIILPLAFGKRQGREFIWNDLLSLETGSLKLANGRVIEKTLYNRRTRQDEPALFVALTFERREVLDSSNIKPMNLIGVDRGENIPAVIALTDPEGCPLSRFKDSLGNPTHILRIGESYKEKQRTIQAKKEVEQRRAGGYSRKYASKAKNLADDMVRNTARDLLYYAVTQDAMLIFENLSRGFGRQGKRTFMAERQYTRMEDWLTAKLAYEGLPSKTYLSKTLAQYTSKTCSNCGFTITSADYDRVLEKLKKTATGWMTTINGKELKVEGQITYYNRYKRQNVVKDLSVELDRLSEESVNNDISSWTKGRSGEALSLLKKRFSHRPVQEKFVCLNCGFETHADEQAALNIARSWLFLRSQEYKKYQTNKTTGNTDKRAFVETWQSFYRKKLKEVWKPAV

SEQ ID NO: 41672 - protein, 978 aa, synthetic construct
  REGION 1..978: note = engineered CasX variant
QEIKRANKIRRRLVKDSNTKKAGKTGPMKTLLVRVMTPDLRERLENLRKKPENIPQPISNTSRANLNKLLTDYTEMKKAILHVYWEEFQKDPVGLMSRVAQPASKKIDQNKLKPEMDEKGNLTTAGFACSQCGQPLFVYKLEQVSEKGKAYTNYFGRCNVAEHEKLIKLAQLKPEKDSDEAVTYSLGKFGQRALDFYSIHVTKESTHPVKPLAQIAGNRYASGPVGKALSDACMGTIASFLSKYQDIIIEHQKVVKGNQKRLESLRELAGKENLEYPSVTLPPQPHTKEGVDAYNEVIARVRMWVNLNLWQKLKLSRDDAKPLLRLKGFPSFPLVERQANEVDWWDMVCNVKKLINEKKEDGKVFWQNLAGYKRQEALRPYLSSEEDRKKGKKFARYQLGDLLLHLEKKHPEDWGKVYDEAWERIDKKVEGLSKHIKLEEERRSEDAQSKAALTDWLRAKASFVIEGLKEADKDEFCRCELKLQKWYGDLRGKPFAIEAENSILDISGFSKQYNCAFIWQKDGVKKLNLYLIINYFKGGKLRFKKIKPEAFEANRFYTVINKKSGEIVPMEVNFNFDDPNLIILPLAFGKRQGREFIWNDLLSLETGSLKLANGRVIEKTLYNRRTRQDEPALFVALTFERREVLDSSNIKPMNLIGVDRGENIPAVIALTDPEGCPLSRFKDSLGNPTHILRIGESYKEKQRTIQAKKEVEQRRAGGYSRKYASKAKNLADDMVRNTARDLLYYAVTQDAMLIFENLSRGFGRQGKRTFMAERQYTRMEDWLTAKLAYEGLPSKTYLSKTLAQYTSKTCSNCGFTITSADYDRVLEKLKKTATGWMTTINGKELKVEGQITYYNRYKRQNVVKDLSVELDRLSEESVNNDISSWTKGRSGEALSLLKKRFSHRPVQEKFVCLNCGFETHADEQAALNIARSWLFLRSQEYKKYQTNKTTGNTDKRAFVETWQSFYRKKLKEVWKPAV

SEQ ID NO: 41673 - protein, 977 aa, synthetic construct
  REGION 1..977: note = engineered CasX variant
QEIKRANKIRRRLVKDSNTKKAGKTGPMKTLLVRVMTPDLRERLENLRKKPENIPQPISNTSRANLNKLLTDYTEMKKAILHVYWEEFQKDPVGLMSRVAQPASKKIDQNKLKPEMDEKGNLTTAGFACSQCGQPLFVYKLEQVSEKGKAYTNYFGRCNVAEHEKLILLAQLKPEKDSDEAVTYSLGKFGQRALDFYSIHVTKESTHPVKPLAQIAGNRYASPVGKALSDACMGTIASFLSKYQDIIIEHQKVVKGNQKRLESLRELAGKENLEYPSVTLPPQPHTKEGVDAYNEVIARVRMWVNLNLWQKLKLSRDDAKPLLRLKGFPSFPLVERQANEVDWWDMVCNVKKLINEKKEDGKVFWQNLAGYKRQEALRPYLSSEEDRKKGKKFARYQLGDLLLHLEKKHPEDWGKVYDEAWERIDKKVEGLSKHIKLEEERRSEDAQSKAALTDWLRAKASFVIEGLKEADKDEFCRCELKLQKWYGDLRGKPFAIEAENSILDISGFSKQYNCAFIWQKDGVKKLNLYLIINYFKGGKLRFKKIKPEAFEANRFYTVINKKSGEIVPMEVNFNFDDPNLIILPLAFGKRQGREFIWNDLLSLETGSLKLANGRVIEKTLYNRRTRQDEPALFVALTFERREVLDSSNIKPMNLIGVDRGENIPAVIALTDPEGCPLSRFKDSLGNPTHILRIGESYKEKQRTIQAKKEVEQRRAGGYSRKYASKAKNLADDMVRNTARDLLYYAVTQDAMLIFENLSRGFGRQGKRTFMAERQYTRMEDWLTAKLAYEGLPSKTYLSKTLAQYTSKTCSNCGFTITSADYDRVLEKLKKTATGWMTTINGKELKVEGQITYYNRYKRQNVVKDLSVELDRLSEESVNNDISSWTKGRSGEALSLLKKRFSHRPVQEKFVCLNCGFETHADEQAALNIARSWLFLRSQEYKKYQTNKTTGNTDKRAFVETWQSFYRKKLKEVWKPAV

SEQ ID NO: 41674 - protein, 979 aa, synthetic construct
  REGION 1..979: note = engineered CasX variant
QEIKRANKIRRRLVKDSNTKKAGKTGPMKTLLVRVMTPDLRERLENLRKKPENIPQPISNTSRANLNKLLTDYTEMKKAILHVYWEEFQKDPVGLMSRVAQPASKKIDQNKLKPEMDEKGNLTTAGFACSQCGQPLFVYKLEQVSEKGKAYTNYFGRCNVAEHEKLILLAQLKPEKDSDEAVTYSLGKFGQRALDFYSIHVTKESTHPVKPLAQIAGNRYASYPVGKALSDACMGTIASFLSKYQDIIIEHQKVVKGNQKRLESLRELAGKENLEYPSVTLPPQPHTKEGVDAYNEVIARVRMWVNLNLWQKLKLSRDDAKPLLRLKGFPSFPLVERQANEVDWWDMVCNVKKLINEKKEDGKVFWQNLAGYKRQEALRPYLSSEEDRKKGKKFARYQLGDLLLHLEKKHGERDWGKVYDEAWERIDKKVEGLSKHIKLEEERRSEDAQSKAALTDWLRAKASFVIEGLKEADKDEFCRCELKLQKWYGDLRGKPFAIEAENSILDISGFSKQYNCAFIWQKDGVKKLNLYLIINYFKGGKLRFKKIKPEAFEANRFYTVINKKSGEIVPMEVNFNFDDPNLIILPLAFGKRQGREFIWNDLLSLETGSLKLANGRVIEKTLYNRRTRQDEPALFVALTFERREVLDSSNIKPMNLIGVDRGENIPAVIALTDPEGCPLSRFKDSLGNPTHILRIGESYKEKQRTIQAKKEVEQRRAGGYSRKYASKAKNLADDMVRNTARDLLYYAVTQDAMLIFENLSRGFGRQGKRTFMAERQYTRMEDWLTAKLAYEGLPSKTYLSKTLAQYTSKTCSNCGFTITSADYDRVLEKLKKTATGWMTTINGKELKVEGQITYYNRYKRQNVVKDLSVELDRLSEESVNNDISSWTKGRSGEALSLLKKRFSHRPVQEKFVCLNCGFETHADEQAALNIARSWLFLRSQEYKKYQTNKTTGNTDKRAFVETWQSFYRKKLKEVWKPAV

SEQ ID NO: 41675 - protein, 979 aa, synthetic construct
  REGION 1..979: note = engineered CasX variant
QEIKRANKIRRRLVKDSNTKKAGKTGPMKTLLVRVMTPDLRERLENLRKKPENIPQPISNTSRANLNKLLTDYTEMKKAILHVYWEEFQKDPVGLMSRVAQPASKKIDQNKLKPEMDEKGNLTTAGFACSQCGQPLFVYKLEQVSEKGKAYTNYFGRCNVAEHEKLILLAQLKPEKDSDEAVTYSLGKFGQRALDFYSIHVTKESTHPVKPLAQIAGNRYASHPVGKALSDACMGTIASFLSKYQDIIIEHQKVVKGNQKRLESLRELAGKENLEYPSVTLPPQPHTKEGVDAYNEVIARVRMWVNLNLWQKLKLSRDDAKPLLRLKGFPSFPLVERQANEVDWWDMVCNVKKLINEKKEDGKVFWQNLAGYKRQEALRPYLSSEEDRKKGKKFARYQLGDLLLHLEKKHGERDWGKVYDEAWERIDKKVEGLSKHIKLEEERRSEDAQSKAALTDWLRAKASFVIEGLKEADKDEFCRCELKLQKWYGDLRGKPFAIEAENSILDISGFSKQYNCAFIWQKDGVKKLNLYLIINYFKGGKLRFKKIKPEAFEANRFYTVINKKSGEIVPMEVNFNFDDPNLIILPLAFGKRQGREFIWNDLLSLETGSLKLANGRVIEKTLYNRRTRQDEPALFVALTFERREVLDSSNIKPMNLIGVDRGENIPAVIALTDPEGCPLSRFKDSLGNPTHILRIGESYKEKQRTIQAKKEVEQRRAGGYSRKYASKAKNLADDMVRNTARDLLYYAVTQDAMLIFENLSRGFGRQGKRTFMAERQYTRMEDWLTAKLAYEGLPSKTYLSKTLAQYTSKTCSNCGFTITSADYDRVLEKLKKTATGWMTTINGKELKVEGQITYYNRYKRQNVVKDLSVELDRLSEESVNNDISSWTKGRSGEALSLLKKRFSHRPVQEKFVCLNCGFETHADEQAALNIARSWLFLRSQEYKKYQTNKTTGNTDKRAFVETWQSFYRKKLKEVWKPAV

SEQ ID NO: 41676 - protein, 979 aa, synthetic construct
  REGION 1..979: note = engineered CasX variant
QEIKRANKIRRRLVKDSNTKKAGKTGPMKTLLVRVMTPDLRERLENLRKKPENIPQPISNTSRANLNKLLTDYTEMKKAILHVYWEEFQKDPVGLMSRVAQPASKKIDQNKLKPEMDEKGNLTTAGFACSQCGQPLFVYKLEQVSEKGKAYTNYFGRCNVAEHEKLILLAQLKPEKDSDEAVTYSLGKFGQRALDFYSIHVTKESTHPVKPLAQIAGNRYASSPVGKALSDACMGTIASFLSKYQDIIIEHQKVVKGNQKRLESLRELAGKENLEYPSVTLPPQPHTKEGVDAYNEVIARVRMWVNLNLWQKLKLSRDDAKPLLRLKGFPSFPLVERQANEVDWWDMVCNVKKLINEKKEDGKVFWQNLAGYKRQEALRPYLSSEEDRKKGKKFARYQLGDLLLHLEKKHGERDWGKVYDEAWERIDKKVEGLSKHIKLEEERRSEDAQSKAALTDWLRAKASFVIEGLKEADKDEFCRCELKLQKWYGDLRGKPFAIEAENSILDISGFSKQYNCAFIWQKDGVKKLNLYLIINYFKGGKLRFKKIKPEAFEANRFYTVINKKSGEIVPMEVNFNFDDPNLIILPLAFGKRQGREFIWNDLLSLETGSLKLANGRVIEKTLYNRRTRQDEPALFVALTFERREVLDSSNIKPMNLIGVDRGENIPAVIALTDPEGCPLSRFKDSLGNPTHILRIGESYKEKQRTIQAKKEVEQRRAGGYSRKYASKAKNLADDMVRNTARDLLYYAVTQDAMLIFENLSRGFGRQGKRTFMAERQYTRMEDWLTAKLAYEGLPSKTYLSKTLAQYTSKTCSNCGFTITSADYDRVLEKLKKTATGWMTTINGKELKVEGQITYYNRYKRQNVVKDLSVELDRLSEESVNNDISSWTKGRSGEALSLLKKRFSHRPVQEKFVCLNCGFETHADEQAALNIARSWLFLRSQEYKKYQTNKTTGNTDKRAFVETWQSFYRKKLKEVWKPAV

SEQ ID NO: 41677 - protein, 979 aa, synthetic construct
  REGION 1..979: note = engineered CasX variant
QEIKRANKIRRRLVKDSNTKKAGKTGPMKTLLVRVMTPDLRERLENLRKKPENIPQPISNTSRANLNKLLTDYTEMKKAILHVYWEEFQKDPVGLMSRVAQPASKKIDQNKLKPEMDEKGNLTTAGFACSQCGQPLFVYKLEQVSEKGKAYTNYFGRCNVAEHEKLILLAQLKPEKDSDEAVTYSLGKFGQRALDFYSIHVTKESTHPVKPLAQIAGNRYASTPVGKALSDACMGTIASFLSKYQDIIIEHQKVVKGNQKRLESLRELAGKENLEYPSVTLPPQPHTKEGVDAYNEVIARVRMWVNLNLWQKLKLSRDDAKPLLRLKGFPSFPLVERQANEVDWWDMVCNVKKLINEKKEDGKVFWQNLAGYKRQEALRPYLSSEEDRKKGKKFARYQLGDLLLHLEKKHGERDWGKVYDEAWERIDKKVEGLSKHIKLEEERRSEDAQSKAALTDWLRAKASFVIEGLKEADKDEFCRCELKLQKWYGDLRGKPFAIEAENSILDISGFSKQYNCAFIWQKDGVKKLNLYLIINYFKGGKLRFKKIKPEAFEANRFYTVINKKSGEIVPMEVNFNFDDPNLIILPLAFGKRQGREFIWNDLLSLETGSLKLANGRVIEKTLYNRRTRQDEPALFVALTFERREVLDSSNIKPMNLIGVDRGENIPAVIALTDPEGCPLSRFKDSLGNPTHILRIGESYKEKQRTIQAKKEVEQRRAGGYSRKYASKAKNLADDMVRNTARDLLYYAVTQDAMLIFENLSRGFGRQGKRTFMAERQYTRMEDWLTAKLAYEGLPSKTYLSKTLAQYTSKTCSNCGFTITSADYDRVLEKLKKTATGWMTTINGKELKVEGQITYYNRYKRQNVVKDLSVELDRLSEESVNNDISSWTKGRSGEALSLLKKRFSHRPVQEKFVCLNCGFETHADEQAALNIARSWLFLRSQEYKKYQTNKTTGNTDKRAFVETWQSFYRKKLKEVWKPAV

SEQ ID NO: 41678 - protein, 979 aa, synthetic construct
  REGION 1..979: note = engineered CasX variant
QEIKRANKIRRRLVKDSNTKKAGKTGPMKTLLVRVMTPDLRERLENLRKKPENIPQPISNTSRANLNKLLTDYTEMKKAILHVYWEEFQKDPVGLMSRVAQPASKKIDQNKLKPEMDEKGNLTTAGFACSQCGQPLFVYKLEQVSEKGKAYTNYFGRCNVAEHEKLILLAQLKPEKDSDEAVTYSLGKFGQRALDFYSIHVTKESTHPVKPLAQIAGNRYASAPVGKALSDACMGTIASFLSKYQDIIIEHQKVVKGNQKRLESLRELAGKENLEYPSVTLPPQPHTKEGVDAYNEVIARVRMWVNLNLWQKLKLSRDDAKPLLRLKGFPSFPLVERQANEVDWWDMVCNVKKLINEKKEDGKVFWQNLAGYKRQEALRPYLSSEEDRKKGKKFARYQLGDLLLHLEKKHGERDWGKVYDEAWERIDKKVEGLSKHIKLEEERRSEDAQSKAALTDWLRAKASFVIEGLKEADKDEFCRCELKLQKWYGDLRGKPFAIEAENSILDISGFSKQYNCAFIWQKDGVKKLNLYLIINYFKGGKLRFKKIKPEAFEANRFYTVINKKSGEIVPMEVNFNFDDPNLIILPLAFGKRQGREFIWNDLLSLETGSLKLANGRVIEKTLYNRRTRQDEPALFVALTFERREVLDSSNIKPMNLIGVDRGENIPAVIALTDPEGCPLSRFKDSLGNPTHILRIGESYKEKQRTIQAKKEVEQRRAGGYSRKYASKAKNLADDMVRNTARDLLYYAVTQDAMLIFENLSRGFGRQGKRTFMAERQYTRMEDWLTAKLAYEGLPSKTYLSKTLAQYTSKTCSNCGFTITSADYDRVLEKLKKTATGWMTTINGKELKVEGQITYYNRYKRQNVVKDLSVELDRLSEESVNNDISSWTKGRSGEALSLLKKRFSHRPVQEKFVCLNCGFETHADEQAALNIARSWLFLRSQEYKKYQTNKTTGNTDKRAFVETWQSFYRKKLKEVWKPAV

SEQ ID NO: 41679 - protein, 979 aa, synthetic construct
  REGION 1..979: note = engineered CasX variant
QEIKRANKIRRRLVKDSNTKKAGKTGPMKTLLVRVMTPDLRERLENLRKKPENIPQPISNTSRANLNKLLTDYTEMKKAILHVYWEEFQKDPVGLMSRVAQPASKKIDQNKLKPEMDEKGNLTTAGFACSQCGQPLFVYKLEQVSEKGKAYTNYFGRCNVAEHEKLILLAQLKPEKDSDEAVTYSLGKFGQRALDFYSIHVTKESTHPVKPLAQIAGNRYASVPVGKALSDACMGTIASFLSKYQDIIIEHQKVVKGNQKRLESLRELAGKENLEYPSVTLPPQPHTKEGVDAYNEVIARVRMWVNLNLWQKLKLSRDDAKPLLRLKGFPSFPLVERQANEVDWWDMVCNVKKLINEKKEDGKVFWQNLAGYKRQEALRPYLSSEEDRKKGKKFARYQLGDLLLHLEKKHGERDWGKVYDEAWERIDKKVEGLSKHIKLEEERRSEDAQSKAALTDWLRAKASFVIEGLKEADKDEFCRCELKLQKWYGDLRGKPFAIEAENSILDISGFSKQYNCAFIWQKDGVKKLNLYLIINYFKGGKLRFKKIKPEAFEANRFYTVINKKSGEIVPMEVNFNFDDPNLIILPLAFGKRQGREFIWNDLLSLETGSLKLANGRVIEKTLYNRRTRQDEPALFVALTFERREVLDSSNIKPMNLIGVDRGENIPAVIALTDPEGCPLSRFKDSLGNPTHILRIGESYKEKQRTIQAKKEVEQRRAGGYSRKYASKAKNLADDMVRNTARDLLYYAVTQDAMLIFENLSRGFGRQGKRTFMAERQYTRMEDWLTAKLAYEGLPSKTYLSKTLAQYTSKTCSNCGFTITSADYDRVLEKLKKTATGWMTTINGKELKVEGQITYYNRYKRQNVVKDLSVELDRLSEESVNNDISSWTKGRSGEALSLLKKRFSHRPVQEKFVCLNCGFETHADEQAALNIARSWLFLRSQEYKKYQTNKTTGNTDKRAFVETWQSFYRKKLKEVWKPAV

SEQ ID NO: 41680 - protein, 979 aa, synthetic construct
  REGION 1..979: note = engineered CasX variant
QEIKRANKIRRRLVKDSNTKKAGKTGPMKTLLVRVMTPDLRERLENLRKKPENIPQPISNTSRANLNKLLTDYTEMKKAILHVYWEEFQKDPVGLMSRVAQPASKKIDQNKLKPEMDEKGNLTTAGFACSQCGQPLFVYKLEQVSEKGKAYTNYFGRCNVAEHEKLIKLAQLKPEKDSDEAVTYSLGKFGQRALDFYSIHVTKESTHPVKPLAQIAGNRYASGPVGKALSDACMGTIASFLSKYQDIIIEHQKVVKGNQKRLESLRELAGKENLEYPSVTLPPQPHTKEGVDAYNEVIARVRMWVNLNLWQKLKLSRDDAKPLLRLKGFPSFPLVERQANEVDWWDMVCNVKKLINEKKEDGKVFWQNLAGYKRQEALRPYLSSEEDRKKGKKFARYQLGDLLLHLEKKHGERDWGKVYDEAWERIDKKVEGLSKHIKLEEERRSEDAQSKAALTDWLRAKASFVIEGLKEADKDEFCRCELKLQKWYGDLRGKPFAIEAENSILDISGFSKQYNCAFIWQKDGVKKLNLYLIINYFKGGKLRFKKIKPEAFEANRFYTVINKKSGEIVPMEVNFNFDDPNLIILPLAFGKRQGREFIWNDLLSLETGSLKLANGRVIEKTLYNRRTRQDEPALFVALTFERREVLDSSNIKPMNLIGVDRGENIPAVIALTDPEGCPLSRFKDSLGNPTHILRIGESYKEKQRTIQAKKEVEQRRAGGYSRKYASKAKNLADDMVRNTARDLLYYAVTQDAMLIFENLSRGFGRQGKRTFMAERQYTRMEDWLTAKLAYEGLPSKTYLSKTLAQYTSKTCSNCGFTITSADYDRVLEKLKKTATGWMTTINGKELKVEGQITYYNRYKRQNVVKDLSVELDRLSEESVNNDISSWTKGRSGEALSLLKKRFSHRPVQEKFVCLNCGFETHADEQAALNIARSWLFLRSQEYKKYQTNKTTGNTDKRAFVETWQSFYRKKLKEVWKPAV

SEQ ID NO: 41681 - protein, 978 aa, synthetic construct
  REGION 1..978: note = engineered CasX variant
QEIKRANKIRRRLVKDSNTKKAGKTGPMKTLLVRVMTPDLRERLENLRKKPENIPQPISNTSRANLNKLLTDYTEMKKAILHVYWEEFQKDPVGLMSRVAQPASKKIDQNKLKPEMDEKGNLTTAGFACSQCGQPLFVYKLEQVSEKGKAYTNYFGRCNVAEHEKLILLAQLKPEKDSDEAVTYSLGKFGQRALDFYSIHVTKESTHPVKPLAQIAGNRYASPVGKALSDACMGTIASFLSKYQDIIIEHQKVVKGNQKRLESLRELAGKENLEYPSVTLPPQPHTKEGVDAYNEVIARVRMWVNLNLWQKLKLSRDDAKPLLRLKGFPSFPLVERQANEVDWWDMVCNVKKLINEKKEDGKVFWQNLAGYKRQEALRPYLSSEEDRKKGKKFARYQLGDLLLHLEKKHGERDWGKVYDEAWERIDKKVEGLSKHIKLEEERRSEDAQSKAALTDWLRAKASFVIEGLKEADKDEFCRCELKLQKWYGDLRGKPFAIEAENSILDISGFSKQYNCAFIWQKDGVKKLNLYLIINYFKGGKLRFKKIKPEAFEANRFYTVINKKSGEIVPMEVNFNFDDPNLIILPLAFGKRQGREFIWNDLLSLETGSLKLANGRVIEKTLYNRRTRQDEPALFVALTFERREVLDSSNIKPMNLIGVDRGENIPAVIALTDPEGCPLSRFKDSLGNPTHILRIGESYKEKQRTIQAKKEVEQRRAGGYSRKYASKAKNLADDMVRNTARDLLYYAVTQDAMLIFENLSRGFGRQGKRTFMAERQYTRMEDWLTAKLAYEGLPSKTYLSKTLAQYTSKTCSNCGFTITSADYDRVLEKLKKTATGWMTTINGKELKVEGQITYYNRYKRQNVVKDLSVELDRLSEESVNNDISSWTKGRSGEALSLLKKRFSHRPVQEKFVCLNCGFETHADEQAALNIARSWLFLRSQEYKKYQTNKTTGNTDKRAFVETWQSFYRKKLKEVWKPAV

SEQ ID NO: 41682 - protein, 979 aa, synthetic construct
  REGION 1..979: note = engineered CasX variant
QEIKRANKIRRRLVKDSNTKKAGKTGPMKTLLVRVMTPDLRERLENLRKKPENIPQPISNTSRANLNKLLTDYTEMKKAILHVYWEEFQKDPVGLMSRVAQPASKKIDQNKLKPEMDEKGNLTTAGFACSQCGQPLFVYKLEQVSEKGKAYTNYFGRCNVAEHEKLILLAQLKPEKDSDEAVTYSLGKFGQRALDFYSIHVTKESTHPVKPLAQIAGNRYASYPVGKALSDACMGTIASFLSKYQDIIIEHQKVVKGNQKRLESLRELAGKENLEYPSVTLPPQPHTKEGVDAYNEVIARVRMWVNLNLWQKLKLSRDDAKPLLRLKGFPSFPLVERQANEVDWWDMVCNVKKLINEKKEDGKVFWQNLAGYKRQEALRPYLSSEEDRKKGKKFARYQLGDLLLHLEKKHGEYDWGKVYDEAWERIDKKVEGLSKHIKLEEERRSEDAQSKAALTDWLRAKASFVIEGLKEADKDEFCRCELKLQKWYGDLRGKPFAIEAENSILDISGFSKQYNCAFIWQKDGVKKLNLYLIINYFKGGKLRFKKIKPEAFEANRFYTVINKKSGEIVPMEVNFNFDDPNLIILPLAFGKRQGREFIWNDLLSLETGSLKLANGRVIEKTLYNRRTRQDEPALFVALTFERREVLDSSNIKPMNLIGVDRGENIPAVIALTDPEGCPLSRFKDSLGNPTHILRIGESYKEKQRTIQAKKEVEQRRAGGYSRKYASKAKNLADDMVRNTARDLLYYAVTQDAMLIFENLSRGFGRQGKRTFMAERQYTRMEDWLTAKLAYEGLPSKTYLSKTLAQYTSKTCSNCGFTITSADYDRVLEKLKKTATGWMTTINGKELKVEGQITYYNRYKRQNVVKDLSVELDRLSEESVNNDISSWTKGRSGEALSLLKKRFSHRPVQEKFVCLNCGFETHADEQAALNIARSWLFLRSQEYKKYQTNKTTGNTDKRAFVETWQSFYRKKLKEVWKPAV

SEQ ID NO: 41683 - protein, 979 aa, synthetic construct
  REGION 1..979: note = engineered CasX variant
QEIKRANKIRRRLVKDSNTKKAGKTGPMKTLLVRVMTPDLRERLENLRKKPENIPQPISNTSRANLNKLLTDYTEMKKAILHVYWEEFQKDPVGLMSRVAQPASKKIDQNKLKPEMDEKGNLTTAGFACSQCGQPLFVYKLEQVSEKGKAYTNYFGRCNVAEHEKLILLAQLKPEKDSDEAVTYSLGKFGQRALDFYSIHVTKESTHPVKPLAQIAGNRYASHPVGKALSDACMGTIASFLSKYQDIIIEHQKVVKGNQKRLESLRELAGKENLEYPSVTLPPQPHTKEGVDAYNEVIARVRMWVNLNLWQKLKLSRDDAKPLLRLKGFPSFPLVERQANEVDWWDMVCNVKKLINEKKEDGKVFWQNLAGYKRQEALRPYLSSEEDRKKGKKFARYQLGDLLLHLEKKHGEYDWGKVYDEAWERIDKKVEGLSKHIKLEEERRSEDAQSKAALTDWLRAKASFVIEGLKEADKDEFCRCELKLQKWYGDLRGKPFAIEAENSILDISGFSKQYNCAFIWQKDGVKKLNLYLIINYFKGGKLRFKKIKPEAFEANRFYTVINKKSGEIVPMEVNFNFDDPNLIILPLAFGKRQGREFIWNDLLSLETGSLKLANGRVIEKTLYNRRTRQDEPALFVALTFERREVLDSSNIKPMNLIGVDRGENIPAVIALTDPEGCPLSRFKDSLGNPTHILRIGESYKEKQRTIQAKKEVEQRRAGGYSRKYASKAKNLADDMVRNTARDLLYYAVTQDAMLIFENLSRGFGRQGKRTFMAERQYTRMEDWLTAKLAYEGLPSKTYLSKTLAQYTSKTCSNCGFTITSADYDRVLEKLKKTATGWMTTINGKELKVEGQITYYNRYKRQNVVKDLSVELDRLSEESVNNDISSWTKGRSGEALSLLKKRFSHRPVQEKFVCLNCGFETHADEQAALNIARSWLFLRSQEYKKYQTNKTTGNTDKRAFVETWQSFYRKKLKEVWKPAV

SEQ ID NO: 41684 - protein, 979 aa, synthetic construct
  REGION 1..979: note = engineered CasX variant
QEIKRANKIRRRLVKDSNTKKAGKTGPMKTLLVRVMTPDLRERLENLRKKPENIPQPISNTSRANLNKLLTDYTEMKKAILHVYWEEFQKDPVGLMSRVAQPASKKIDQNKLKPEMDEKGNLTTAGFACSQCGQPLFVYKLEQVSEKGKAYTNYFGRCNVAEHEKLILLAQLKPEKDSDEAVTYSLGKFGQRALDFYSIHVTKESTHPVKPLAQIAGNRYASSPVGKALSDACMGTIASFLSKYQDIIIEHQKVVKGNQKRLESLRELAGKENLEYPSVTLPPQPHTKEGVDAYNEVIARVRMWVNLNLWQKLKLSRDDAKPLLRLKGFPSFPLVERQANEVDWWDMVCNVKKLINEKKEDGKVFWQNLAGYKRQEALRPYLSSEEDRKKGKKFARYQLGDLLLHLEKKHGEYDWGKVYDEAWERIDKKVEGLSKHIKLEEERRSEDAQSKAALTDWLRAKASFVIEGLKEADKDEFCRCELKLQKWYGDLRGKPFAIEAENSILDISGFSKQYNCAFIWQKDGVKKLNLYLIINYFKGGKLRFKKIKPEAFEANRFYTVINKKSGEIVPMEVNFNFDDPNLIILPLAFGKRQGREFIWNDLLSLETGSLKLANGRVIEKTLYNRRTRQDEPALFVALTFERREVLDSSNIKPMNLIGVDRGENIPAVIALTDPEGCPLSRFKDSLGNPTHILRIGESYKEKQRTIQAKKEVEQRRAGGYSRKYASKAKNLADDMVRNTARDLLYYAVTQDAMLIFENLSRGFGRQGKRTFMAERQYTRMEDWLTAKLAYEGLPSKTYLSKTLAQYTSKTCSNCGFTITSADYDRVLEKLKKTATGWMTTINGKELKVEGQITYYNRYKRQNVVKDLSVELDRLSEESVNNDISSWTKGRSGEALSLLKKRFSHRPVQEKFVCLNCGFETHADEQAALNIARSWLFLRSQEYKKYQTNKTTGNTDKRAFVETWQSFYRKKLKEVWKPAV

SEQ ID NO: 41685 - protein, 979 aa, synthetic construct
  REGION 1..979: note = engineered CasX variant
QEIKRANKIRRRLVKDSNTKKAGKTGPMKTLLVRVMTPDLRERLENLRKKPENIPQPISNTSRANLNKLLTDYTEMKKAILHVYWEEFQKDPVGLMSRVAQPASKKIDQNKLKPEMDEKGNLTTAGFACSQCGQPLFVYKLEQVSEKGKAYTNYFGRCNVAEHEKLILLAQLKPEKDSDEAVTYSLGKFGQRALDFYSIHVTKESTHPVKPLAQIAGNRYASTPVGKALSDACMGTIASFLSKYQDIIIEHQKVVKGNQKRLESLRELAGKENLEYPSVTLPPQPHTKEGVDAYNEVIARVRMWVNLNLWQKLKLSRDDAKPLLRLKGFPSFPLVERQANEVDWWDMVCNVKKLINEKKEDGKVFWQNLAGYKRQEALRPYLSSEEDRKKGKKFARYQLGDLLLHLEKKHGEYDWGKVYDEAWERIDKKVEGLSKHIKLEEERRSEDAQSKAALTDWLRAKASFVIEGLKEADKDEFCRCELKLQKWYGDLRGKPFAIEAENSILDISGFSKQYNCAFIWQKDGVKKLNLYLIINYFKGGKLRFKKIKPEAFEANRFYTVINKKSGEIVPMEVNFNFDDPNLIILPLAFGKRQGREFIWNDLLSLETGSLKLANGRVIEKTLYNRRTRQDEPALFVALTFERREVLDSSNIKPMNLIGVDRGENIPAVIALTDPEGCPLSRFKDSLGNPTHILRIGESYKEKQRTIQAKKEVEQRRAGGYSRKYASKAKNLADDMVRNTARDLLYYAVTQDAMLIFENLSRGFGRQGKRTFMAERQYTRMEDWLTAKLAYEGLPSKTYLSKTLAQYTSKTCSNCGFTITSADYDRVLEKLKKTATGWMTTINGKELKVEGQITYYNRYKRQNVVKDLSVELDRLSEESVNNDISSWTKGRSGEALSLLKKRFSHRPVQEKFVCLNCGFETHADEQAALNIARSWLFLRSQEYKKYQTNKTTGNTDKRAFVETWQSFYRKKLKEVWKPAV

SEQ ID NO: 41686 - protein, 979 aa, synthetic construct
  REGION 1..979: note = engineered CasX variant
QEIKRANKIRRRLVKDSNTKKAGKTGPMKTLLVRVMTPDLRERLENLRKKPENIPQPISNTSRANLNKLLTDYTEMKKAILHVYWEEFQKDPVGLMSRVAQPASKKIDQNKLKPEMDEKGNLTTAGFACSQCGQPLFVYKLEQVSEKGKAYTNYFGRCNVAEHEKLILLAQLKPEKDSDEAVTYSLGKFGQRALDFYSIHVTKESTHPVKPLAQIAGNRYASAPVGKALSDACMGTIASFLSKYQDIIIEHQKVVKGNQKRLESLRELAGKENLEYPSVTLPPQPHTKEGVDAYNEVIARVRMWVNLNLWQKLKLSRDDAKPLLRLKGFPSFPLVERQANEVDWWDMVCNVKKLINEKKEDGKVFWQNLAGYKRQEALRPYLSSEEDRKKGKKFARYQLGDLLLHLEKKHGEYDWGKVYDEAWERIDKKVEGLSKHIKLEEERRSEDAQSKAALTDWLRAKASFVIEGLKEADKDEFCRCELKLQKWYGDLRGKPFAIEAENSILDISGFSKQYNCAFIWQKDGVKKLNLYLIINYFKGGKLRFKKIKPEAFEANRFYTVINKKSGEIVPMEVNFNFDDPNLIILPLAFGKRQGREFIWNDLLSLETGSLKLANGRVIEKTLYNRRTRQDEPALFVALTFERREVLDSSNIKPMNLIGVDRGENIPAVIALTDPEGCPLSRFKDSLGNPTHILRIGESYKEKQRTIQAKKEVEQRRAGGYSRKYASKAKNLADDMVRNTARDLLYYAVTQDAMLIFENLSRGFGRQGKRTFMAERQYTRMEDWLTAKLAYEGLPSKTYLSKTLAQYTSKTCSNCGFTITSADYDRVLEKLKKTATGWMTTINGKELKVEGQITYYNRYKRQNVVKDLSVELDRLSEESVNNDISSWTKGRSGEALSLLKKRFSHRPVQEKFVCLNCGFETHADEQAALNIARSWLFLRSQEYKKYQTNKTTGNTDKRAFVETWQSFYRKKLKEVWKPAV

SEQ ID NO: 41687 - protein, 979 aa, synthetic construct
  REGION 1..979: note = engineered CasX variant
QEIKRANKIRRRLVKDSNTKKAGKTGPMKTLLVRVMTPDLRERLENLRKKPENIPQPISNTSRANLNKLLTDYTEMKKAILHVYWEEFQKDPVGLMSRVAQPASKKIDQNKLKPEMDEKGNLTTAGFACSQCGQPLFVYKLEQVSEKGKAYTNYFGRCNVAEHEKLILLAQLKPEKDSDEAVTYSLGKFGQRALDFYSIHVTKESTHPVKPLAQIAGNRYASVPVGKALSDACMGTIASFLSKYQDIIIEHQKVVKGNQKRLESLRELAGKENLEYPSVTLPPQPHTKEGVDAYNEVIARVRMWVNLNLWQKLKLSRDDAKPLLRLKGFPSFPLVERQANEVDWWDMVCNVKKLINEKKEDGKVFWQNLAGYKRQEALRPYLSSEEDRKKGKKFARYQLGDLLLHLEKKHGEYDWGKVYDEAWERIDKKVEGLSKHIKLEEERRSEDAQSKAALTDWLRAKASFVIEGLKEADKDEFCRCELKLQKWYGDLRGKPFAIEAENSILDISGFSKQYNCAFIWQKDGVKKLNLYLIINYFKGGKLRFKKIKPEAFEANRFYTVINKKSGEIVPMEVNFNFDDPNLIILPLAFGKRQGREFIWNDLLSLETGSLKLANGRVIEKTLYNRRTRQDEPALFVALTFERREVLDSSNIKPMNLIGVDRGENIPAVIALTDPEGCPLSRFKDSLGNPTHILRIGESYKEKQRTIQAKKEVEQRRAGGYSRKYASKAKNLADDMVRNTARDLLYYAVTQDAMLIFENLSRGFGRQGKRTFMAERQYTRMEDWLTAKLAYEGLPSKTYLSKTLAQYTSKTCSNCGFTITSADYDRVLEKLKKTATGWMTTINGKELKVEGQITYYNRYKRQNVVKDLSVELDRLSEESVNNDISSWTKGRSGEALSLLKKRFSHRPVQEKFVCLNCGFETHADEQAALNIARSWLFLRSQEYKKYQTNKTTGNTDKRAFVETWQSFYRKKLKEVWKPAV

SEQ ID NO: 41688 - protein, 979 aa, synthetic construct
  REGION 1..979: note = engineered CasX variant
QEIKRANKIRRRLVKDSNTKKAGKTGPMKTLLVRVMTPDLRERLENLRKKPENIPQPISNTSRANLNKLLTDYTEMKKAILHVYWEEFQKDPVGLMSRVAQPASKKIDQNKLKPEMDEKGNLTTAGFACSQCGQPLFVYKLEQVSEKGKAYTNYFGRCNVAEHEKLIKLAQLKPEKDSDEAVTYSLGKFGQRALDFYSIHVTKESTHPVKPLAQIAGNRYASGPVGKALSDACMGTIASFLSKYQDIIIEHQKVVKGNQKRLESLRELAGKENLEYPSVTLPPQPHTKEGVDAYNEVIARVRMWVNLNLWQKLKLSRDDAKPLLRLKGFPSFPLVERQANEVDWWDMVCNVKKLINEKKEDGKVFWQNLAGYKRQEALRPYLSSEEDRKKGKKFARYQLGDLLLHLEKKHGEYDWGKVYDEAWERIDKKVEGLSKHIKLEEERRSEDAQSKAALTDWLRAKASFVIEGLKEADKDEFCRCELKLQKWYGDLRGKPFAIEAENSILDISGFSKQYNCAFIWQKDGVKKLNLYLIINYFKGGKLRFKKIKPEAFEANRFYTVINKKSGEIVPMEVNFNFDDPNLIILPLAFGKRQGREFIWNDLLSLETGSLKLANGRVIEKTLYNRRTRQDEPALFVALTFERREVLDSSNIKPMNLIGVDRGENIPAVIALTDPEGCPLSRFKDSLGNPTHILRIGESYKEKQRTIQAKKEVEQRRAGGYSRKYASKAKNLADDMVRNTARDLLYYAVTQDAMLIFENLSRGFGRQGKRTFMAERQYTRMEDWLTAKLAYEGLPSKTYLSKTLAQYTSKTCSNCGFTITSADYDRVLEKLKKTATGWMTTINGKELKVEGQITYYNRYKRQNVVKDLSVELDRLSEESVNNDISSWTKGRSGEALSLLKKRFSHRPVQEKFVCLNCGFETHADEQAALNIARSWLFLRSQEYKKYQTNKTTGNTDKRAFVETWQSFYRKKLKEVWKPAV

SEQ ID NO: 41689 - protein, 978 aa, synthetic construct
  REGION 1..978: note = engineered CasX variant
QEIKRANKIRRRLVKDSNTKKAGKTGPMKTLLVRVMTPDLRERLENLRKKPENIPQPISNTSRANLNKLLTDYTEMKKAILHVYWEEFQKDPVGLMSRVAQPASKKIDQNKLKPEMDEKGNLTTAGFACSQCGQPLFVYKLEQVSEKGKAYTNYFGRCNVAEHEKLILLAQLKPEKDSDEAVTYSLGKFGQRALDFYSIHVTKESTHPVKPLAQIAGNRYASPVGKALSDACMGTIASFLSKYQDIIIEHQKVVKGNQKRLESLRELAGKENLEYPSVTLPPQPHTKEGVDAYNEVIARVRMWVNLNLWQKLKLSRDDAKPLLRLKGFPSFPLVERQANEVDWWDMVCNVKKLINEKKEDGKVFWQNLAGYKRQEALRPYLSSEEDRKKGKKFARYQLGDLLLHLEKKHGEYDWGKVYDEAWERIDKKVEGLSKHIKLEEERRSEDAQSKAALTDWLRAKASFVIEGLKEADKDEFCRCELKLQKWYGDLRGKPFAIEAENSILDISGFSKQYNCAFIWQKDGVKKLNLYLIINYFKGGKLRFKKIKPEAFEANRFYTVINKKSGEIVPMEVNFNFDDPNLIILPLAFGKRQGREFIWNDLLSLETGSLKLANGRVIEKTLYNRRTRQDEPALFVALTFERREVLDSSNIKPMNLIGVDRGENIPAVIALTDPEGCPLSRFKDSLGNPTHILRIGESYKEKQRTIQAKKEVEQRRAGGYSRKYASKAKNLADDMVRNTARDLLYYAVTQDAMLIFENLSRGFGRQGKRTFMAERQYTRMEDWLTAKLAYEGLPSKTYLSKTLAQYTSKTCSNCGFTITSADYDRVLEKLKKTATGWMTTINGKELKVEGQITYYNRYKRQNVVKDLSVELDRLSEESVNNDISSWTKGRSGEALSLLKKRFSHRPVQEKFVCLNCGFETHADEQAALNIARSWLFLRSQEYKKYQTNKTTGNTDKRAFVETWQSFYRKKLKEVWKPAV

SEQ ID NO: 41690 - protein, 978 aa, synthetic construct
  REGION 1..978: note = engineered CasX variant
QEIKRANKIRRRLVKDSNTKKAGKTGPMKTLLVRVMTPDLRERLENLRKKPENIPQPISNTSRANLNKLLTDYTEMKKAILHVYWEEFQKDPVGLMSRVAQPASKKIDQNKLKPEMDEKGNLTTAGFACSQCGQPLFVYKLEQVSEKGKAYTNYFGRCNVAEHEKLILLAQLKPEKDSDEAVTYSLGKFGQRALDFYSIHVTKESTHPVKPLAQIAGNRYASYPVGKALSDACMGTIASFLSKYQDIIIEHQKVVKGNQKRLESLRELAGKENLEYPSVTLPPQPHTKEGVDAYNEVIARVRMWVNLNLWQKLKLSRDDAKPLLRLKGFPSFPLVERQANEVDWWDMVCNVKKLINEKKEDGKVFWQNLAGYKRQEALRPYLSSEEDRKKGKKFARYQLGDLLLHLEKKHGEDWGDVYDEAWERIDKKVEGLSKHIKLEEERRSEDAQSKAALTDWLRAKASFVIEGLKEADKDEFCRCELKLQKWYGDLRGKPFAIEAENSILDISGFSKQYNCAFIWQKDGVKKLNLYLIINYFKGGKLRFKKIKPEAFEANRFYTVINKKSGEIVPMEVNFNFDDPNLIILPLAFGKRQGREFIWNDLLSLETGSLKLANGRVIEKTLYNRRTRQDEPALFVALTFERREVLDSSNIKPMNLIGVDRGENIPAVIALTDPEGCPLSRFKDSLGNPTHILRIGESYKEKQRTIQAKKEVEQRRAGGYSRKYASKAKNLADDMVRNTARDLLYYAVTQDAMLIFENLSRGFGRQGKRTFMAERQYTRMEDWLTAKLAYEGLPSKTYLSKTLAQYTSKTCSNCGFTITSADYDRVLEKLKKTATGWMTTINGKELKVEGQITYYNRYKRQNVVKDLSVELDRLSEESVNNDISSWTKGRSGEALSLLKKRFSHRPVQEKFVCLNCGFETHADEQAALNIARSWLFLRSQEYKKYQTNKTTGNTDKRAFVETWQSFYRKKLKEVWKPAV

SEQ ID NO: 41691 - protein, 978 aa, synthetic construct
  REGION 1..978: note = engineered CasX variant
QEIKRANKIRRRLVKDSNTKKAGKTGPMKTLLVRVMTPDLRERLENLRKKPENIPQPISNTSRANLNKLLTDYTEMKKAILHVYWEEFQKDPVGLMSRVAQPASKKIDQNKLKPEMDEKGNLTTAGFACSQCGQPLFVYKLEQVSEKGKAYTNYFGRCNVAEHEKLILLAQLKPEKDSDEAVTYSLGKFGQRALDFYSIHVTKESTHPVKPLAQIAGNRYASHPVGKALSDACMGTIASFLSKYQDIIIEHQKVVKGNQKRLESLRELAGKENLEYPSVTLPPQPHTKEGVDAYNEVIARVRMWVNLNLWQKLKLSRDDAKPLLRLKGFPSFPLVERQANEVDWWDMVCNVKKLINEKKEDGKVFWQNLAGYKRQEALRPYLSSEEDRKKGKKFARYQLGDLLLHLEKKHGEDWGDVYDEAWERIDKKVEGLSKHIKLEEERRSEDAQSKAALTDWLRAKASFVIEGLKEADKDEFCRCELKLQKWYGDLRGKPFAIEAENSILDISGFSKQYNCAFIWQKDGVKKLNLYLIINYFKGGKLRFKKIKPEAFEANRFYTVINKKSGEIVPMEVNFNFDDPNLIILPLAFGKRQGREFIWNDLLSLETGSLKLANGRVIEKTLYNRRTRQDEPALFVALTFERREVLDSSNIKPMNLIGVDRGENIPAVIALTDPEGCPLSRFKDSLGNPTHILRIGESYKEKQRTIQAKKEVEQRRAGGYSRKYASKAKNLADDMVRNTARDLLYYAVTQDAMLIFENLSRGFGRQGKRTFMAERQYTRMEDWLTAKLAYEGLPSKTYLSKTLAQYTSKTCSNCGFTITSADYDRVLEKLKKTATGWMTTINGKELKVEGQITYYNRYKRQNVVKDLSVELDRLSEESVNNDISSWTKGRSGEALSLLKKRFSHRPVQEKFVCLNCGFETHADEQAALNIARSWLFLRSQEYKKYQTNKTTGNTDKRAFVETWQSFYRKKLKEVWKPAV

SEQ ID NO: 41692 - protein, 978 aa, synthetic construct
  REGION 1..978: note = engineered CasX variant
QEIKRANKIRRRLVKDSNTKKAGKTGPMKTLLVRVMTPDLRERLENLRKKPENIPQPISNTSRANLNKLLTDYTEMKKAILHVYWEEFQKDPVGLMSRVAQPASKKIDQNKLKPEMDEKGNLTTAGFACSQCGQPLFVYKLEQVSEKGKAYTNYFGRCNVAEHEKLILLAQLKPEKDSDEAVTYSLGKFGQRALDFYSIHVTKESTHPVKPLAQIAGNRYASSPVGKALSDACMGTIASFLSKYQDIIIEHQKVVKGNQKRLESLRELAGKENLEYPSVTLPPQPHTKEGVDAYNEVIARVRMWVNLNLWQKLKLSRDDAKPLLRLKGFPSFPLVERQANEVDWWDMVCNVKKLINEKKEDGKVFWQNLAGYKRQEALRPYLSSEEDRKKGKKFARYQLGDLLLHLEKKHGEDWGDVYDEAWERIDKKVEGLSKHIKLEEERRSEDAQSKAALTDWLRAKASFVIEGLKEADKDEFCRCELKLQKWYGDLRGKPFAIEAENSILDISGFSKQYNCAFIWQKDGVKKLNLYLIINYFKGGKLRFKKIKPEAFEANRFYTVINKKSGEIVPMEVNFNFDDPNLIILPLAFGKRQGREFIWNDLLSLETGSLKLANGRVIEKTLYNRRTRQDEPALFVALTFERREVLDSSNIKPMNLIGVDRGENIPAVIALTDPEGCPLSRFKDSLGNPTHILRIGESYKEKQRTIQAKKEVEQRRAGGYSRKYASKAKNLADDMVRNTARDLLYYAVTQDAMLIFENLSRGFGRQGKRTFMAERQYTRMEDWLTAKLAYEGLPSKTYLSKTLAQYTSKTCSNCGFTITSADYDRVLEKLKKTATGWMTTINGKELKVEGQITYYNRYKRQNVVKDLSVELDRLSEESVNNDISSWTKGRSGEALSLLKKRFSHRPVQEKFVCLNCGFETHADEQAALNIARSWLFLRSQEYKKYQTNKTTGNTDKRAFVETWQSFYRKKLKEVWKPAV

SEQ ID NO: 41693 - protein, 978 aa, synthetic construct
  REGION 1..978: note = engineered CasX variant
QEIKRANKIRRRLVKDSNTKKAGKTGPMKTLLVRVMTPDLRERLENLRKKPENIPQPISNTSRANLNKLLTDYTEMKKAILHVYWEEFQKDPVGLMSRVAQPASKKIDQNKLKPEMDEKGNLTTAGFACSQCGQPLFVYKLEQVSEKGKAYTNYFGRCNVAEHEKLILLAQLKPEKDSDEAVTYSLGKFGQRALDFYSIHVTKESTHPVKPLAQIAGNRYASTPVGKALSDACMGTIASFLSKYQDIIIEHQKVVKGNQKRLESLRELAGKENLEYPSVTLPPQPHTKEGVDAYNEVIARVRMWVNLNLWQKLKLSRDDAKPLLRLKGFPSFPLVERQANEVDWWDMVCNVKKLINEKKEDGKVFWQNLAGYKRQEALRPYLSSEEDRKKGKKFARYQLGDLLLHLEKKHGEDWGDVYDEAWERIDKKVEGLSKHIKLEEERRSEDAQSKAALTDWLRAKASFVIEGLKEADKDEFCRCELKLQKWYGDLRGKPFAIEAENSILDISGFSKQYNCAFIWQKDGVKKLNLYLIINYFKGGKLRFKKIKPEAFEANRFYTVINKKSGEIVPMEVNFNFDDPNLIILPLAFGKRQGREFIWNDLLSLETGSLKLANGRVIEKTLYNRRTRQDEPALFVALTFERREVLDSSNIKPMNLIGVDRGENIPAVIALTDPEGCPLSRFKDSLGNPTHILRIGESYKEKQRTIQAKKEVEQRRAGGYSRKYASKAKNLADDMVRNTARDLLYYAVTQDAMLIFENLSRGFGRQGKRTFMAERQYTRMEDWLTAKLAYEGLPSKTYLSKTLAQYTSKTCSNCGFTITSADYDRVLEKLKKTATGWMTTINGKELKVEGQITYYNRYKRQNVVKDLSVELDRLSEESVNNDISSWTKGRSGEALSLLKKRFSHRPVQEKFVCLNCGFETHADEQAALNIARSWLFLRSQEYKKYQTNKTTGNTDKRAFVETWQSFYRKKLKEVWKPAV

SEQ ID NO: 41694 - protein, 978 aa, synthetic construct
  REGION 1..978: note = engineered CasX variant
QEIKRANKIRRRLVKDSNTKKAGKTGPMKTLLVRVMTPDLRERLENLRKKPENIPQPISNTSRANLNKLLTDYTEMKKAILHVYWEEFQKDPVGLMSRVAQPASKKIDQNKLKPEMDEKGNLTTAGFACSQCGQPLFVYKLEQVSEKGKAYTNYFGRCNVAEHEKLILLAQLKPEKDSDEAVTYSLGKFGQRALDFYSIHVTKESTHPVKPLAQIAGNRYASAPVGKALSDACMGTIASFLSKYQDIIIEHQKVVKGNQKRLESLRELAGKENLEYPSVTLPPQPHTKEGVDAYNEVIARVRMWVNLNLWQKLKLSRDDAKPLLRLKGFPSFPLVERQANEVDWWDMVCNVKKLINEKKEDGKVFWQNLAGYKRQEALRPYLSSEEDRKKGKKFARYQLGDLLLHLEKKHGEDWGDVYDEAWERIDKKVEGLSKHIKLEEERRSEDAQSKAALTDWLRAKASFVIEGLKEADKDEFCRCELKLQKWYGDLRGKPFAIEAENSILDISGFSKQYNCAFIWQKDGVKKLNLYLIINYFKGGKLRFKKIKPEAFEANRFYTVINKKSGEIVPMEVNFNFDDPNLIILPLAFGKRQGREFIWNDLLSLETGSLKLANGRVIEKTLYNRRTRQDEPALFVALTFERREVLDSSNIKPMNLIGVDRGENIPAVIALTDPEGCPLSRFKDSLGNPTHILRIGESYKEKQRTIQAKKEVEQRRAGGYSRKYASKAKNLADDMVRNTARDLLYYAVTQDAMLIFENLSRGFGRQGKRTFMAERQYTRMEDWLTAKLAYEGLPSKTYLSKTLAQYTSKTCSNCGFTITSADYDRVLEKLKKTATGWMTTINGKELKVEGQITYYNRYKRQNVVKDLSVELDRLSEESVNNDISSWTKGRSGEALSLLKKRFSHRPVQEKFVCLNCGFETHADEQAALNIARSWLFLRSQEYKKYQTNKTTGNTDKRAFVETWQSFYRKKLKEVWKPAV

SEQ ID NO: 41695 - protein, 978 aa, synthetic construct
  REGION 1..978: note = engineered CasX variant
QEIKRANKIRRRLVKDSNTKKAGKTGPMKTLLVRVMTPDLRERLENLRKKPENIPQPISNTSRANLNKLLTDYTEMKKAILHVYWEEFQKDPVGLMSRVAQPASKKIDQNKLKPEMDEKGNLTTAGFACSQCGQPLFVYKLEQVSEKGKAYTNYFGRCNVAEHEKLILLAQLKPEKDSDEAVTYSLGKFGQRALDFYSIHVTKESTHPVKPLAQIAGNRYASVPVGKALSDACMGTIASFLSKYQDIIIEHQKVVKGNQKRLESLRELAGKENLEYPSVTLPPQPHTKEGVDAYNEVIARVRMWVNLNLWQKLKLSRDDAKPLLRLKGFPSFPLVERQANEVDWWDMVCNVKKLINEKKEDGKVFWQNLAGYKRQEALRPYLSSEEDRKKGKKFARYQLGDLLLHLEKKHGEDWGDVYDEAWERIDKKVEGLSKHIKLEEERRSEDAQSKAALTDWLRAKASFVIEGLKEADKDEFCRCELKLQKWYGDLRGKPFAIEAENSILDISGFSKQYNCAFIWQKDGVKKLNLYLIINYFKGGKLRFKKIKPEAFEANRFYTVINKKSGEIVPMEVNFNFDDPNLIILPLAFGKRQGREFIWNDLLSLETGSLKLANGRVIEKTLYNRRTRQDEPALFVALTFERREVLDSSNIKPMNLIGVDRGENIPAVIALTDPEGCPLSRFKDSLGNPTHILRIGESYKEKQRTIQAKKEVEQRRAGGYSRKYASKAKNLADDMVRNTARDLLYYAVTQDAMLIFENLSRGFGRQGKRTFMAERQYTRMEDWLTAKLAYEGLPSKTYLSKTLAQYTSKTCSNCGFTITSADYDRVLEKLKKTATGWMTTINGKELKVEGQITYYNRYKRQNVVKDLSVELDRLSEESVNNDISSWTKGRSGEALSLLKKRFSHRPVQEKFVCLNCGFETHADEQAALNIARSWLFLRSQEYKKYQTNKTTGNTDKRAFVETWQSFYRKKLKEVWKPAV

SEQ ID NO: 41696 - protein, 978 aa, synthetic construct
  REGION 1..978: note = engineered CasX variant
QEIKRANKIRRRLVKDSNTKKAGKTGPMKTLLVRVMTPDLRERLENLRKKPENIPQPISNTSRANLNKLLTDYTEMKKAILHVYWEEFQKDPVGLMSRVAQPASKKIDQNKLKPEMDEKGNLTTAGFACSQCGQPLFVYKLEQVSEKGKAYTNYFGRCNVAEHEKLIKLAQLKPEKDSDEAVTYSLGKFGQRALDFYSIHVTKESTHPVKPLAQIAGNRYASGPVGKALSDACMGTIASFLSKYQDIIIEHQKVVKGNQKRLESLRELAGKENLEYPSVTLPPQPHTKEGVDAYNEVIARVRMWVNLNLWQKLKLSRDDAKPLLRLKGFPSFPLVERQANEVDWWDMVCNVKKLINEKKEDGKVFWQNLAGYKRQEALRPYLSSEEDRKKGKKFARYQLGDLLLHLEKKHGEDWGDVYDEAWERIDKKVEGLSKHIKLEEERRSEDAQSKAALTDWLRAKASFVIEGLKEADKDEFCRCELKLQKWYGDLRGKPFAIEAENSILDISGFSKQYNCAFIWQKDGVKKLNLYLIINYFKGGKLRFKKIKPEAFEANRFYTVINKKSGEIVPMEVNFNFDDPNLIILPLAFGKRQGREFIWNDLLSLETGSLKLANGRVIEKTLYNRRTRQDEPALFVALTFERREVLDSSNIKPMNLIGVDRGENIPAVIALTDPEGCPLSRFKDSLGNPTHILRIGESYKEKQRTIQAKKEVEQRRAGGYSRKYASKAKNLADDMVRNTARDLLYYAVTQDAMLIFENLSRGFGRQGKRTFMAERQYTRMEDWLTAKLAYEGLPSKTYLSKTLAQYTSKTCSNCGFTITSADYDRVLEKLKKTATGWMTTINGKELKVEGQITYYNRYKRQNVVKDLSVELDRLSEESVNNDISSWTKGRSGEALSLLKKRFSHRPVQEKFVCLNCGFETHADEQAALNIARSWLFLRSQEYKKYQTNKTTGNTDKRAFVETWQSFYRKKLKEVWKPAV

SEQ ID NO: 41697 - protein, 977 aa, synthetic construct
  REGION 1..977: note = engineered CasX variant
QEIKRANKIRRRLVKDSNTKKAGKTGPMKTLLVRVMTPDLRERLENLRKKPENIPQPISNTSRANLNKLLTDYTEMKKAILHVYWEEFQKDPVGLMSRVAQPASKKIDQNKLKPEMDEKGNLTTAGFACSQCGQPLFVYKLEQVSEKGKAYTNYFGRCNVAEHEKLILLAQLKPEKDSDEAVTYSLGKFGQRALDFYSIHVTKESTHPVKPLAQIAGNRYASPVGKALSDACMGTIASFLSKYQDIIIEHQKVVKGNQKRLESLRELAGKENLEYPSVTLPPQPHTKEGVDAYNEVIARVRMWVNLNLWQKLKLSRDDAKPLLRLKGFPSFPLVERQANEVDWWDMVCNVKKLINEKKEDGKVFWQNLAGYKRQEALRPYLSSEEDRKKGKKFARYQLGDLLLHLEKKHGEDWGDVYDEAWERIDKKVEGLSKHIKLEEERRSEDAQSKAALTDWLRAKASFVIEGLKEADKDEFCRCELKLQKWYGDLRGKPFAIEAENSILDISGFSKQYNCAFIWQKDGVKKLNLYLIINYFKGGKLRFKKIKPEAFEANRFYTVINKKSGEIVPMEVNFNFDDPNLIILPLAFGKRQGREFIWNDLLSLETGSLKLANGRVIEKTLYNRRTRQDEPALFVALTFERREVLDSSNIKPMNLIGVDRGENIPAVIALTDPEGCPLSRFKDSLGNPTHILRIGESYKEKQRTIQAKKEVEQRRAGGYSRKYASKAKNLADDMVRNTARDLLYYAVTQDAMLIFENLSRGFGRQGKRTFMAERQYTRMEDWLTAKLAYEGLPSKTYLSKTLAQYTSKTCSNCGFTITSADYDRVLEKLKKTATGWMTTINGKELKVEGQITYYNRYKRQNVVKDLSVELDRLSEESVNNDISSWTKGRSGEALSLLKKRFSHRPVQEKFVCLNCGFETHADEQAALNIARSWLFLRSQEYKKYQTNKTTGNTDKRAFVETWQSFYRKKLKEVWKPAV

SEQ ID NO: 41698 - protein, 978 aa, synthetic construct
  REGION 1..978: note = engineered CasX variant
QEIKRANKIRRRLVKDSNTKKAGKTGPMKTLLVRVMTPDLRERLENLRKKPENIPQPISNTSRANLNKLLTDYTEMKKAILHVYWEEFQKDPVGLMSRVAQPASKKIDQNKLKPEMDEKGNLTTAGFACSQCGQPLFVYKLEQVSEKGKAYTNYFGRCNVAEHEKLILLAQLKPEKDSDEAVTYSLGKFGQRALDFYSIHVTKESTHPVKPLAQIAGNRYASYPVGKALSDACMGTIASFLSKYQDIIIEHQKVVKGNQKRLESLRELAGKENLEYPSVTLPPQPHTKEGVDAYNEVIARVRMWVNLNLWQKLKLSRDDAKPLLRLKGFPSFPLVERQANEVDWWDMVCNVKKLINEKKEDGKVFWQNLAGYKRQEALRPYLSSEEDRKKGKKFARYQLGDLLLHLEKKHGEDWGKVYGEAWERIDKKVEGLSKHIKLEEERRSEDAQSKAALTDWLRAKASFVIEGLKEADKDEFCRCELKLQKWYGDLRGKPFAIEAENSILDISGFSKQYNCAFIWQKDGVKKLNLYLIINYFKGGKLRFKKIKPEAFEANRFYTVINKKSGEIVPMEVNFNFDDPNLIILPLAFGKRQGREFIWNDLLSLETGSLKLANGRVIEKTLYNRRTRQDEPALFVALTFERREVLDSSNIKPMNLIGVDRGENIPAVIALTDPEGCPLSRFKDSLGNPTHILRIGESYKEKQRTIQAKKEVEQRRAGGYSRKYASKAKNLADDMVRNTARDLLYYAVTQDAMLIFENLSRGFGRQGKRTFMAERQYTRMEDWLTAKLAYEGLPSKTYLSKTLAQYTSKTCSNCGFTITSADYDRVLEKLKKTATGWMTTINGKELKVEGQITYYNRYKRQNVVKDLSVELDRLSEESVNNDISSWTKGRSGEALSLLKKRFSHRPVQEKFVCLNCGFETHADEQAALNIARSWLFLRSQEYKKYQTNKTTGNTDKRAFVETWQSFYRKKLKEVWKPAV

SEQ ID NO: 41699 - protein, 978 aa, synthetic construct
  REGION 1..978: note = engineered CasX variant
QEIKRANKIRRRLVKDSNTKKAGKTGPMKTLLVRVMTPDLRERLENLRKKPENIPQPISNTSRANLNKLLTDYTEMKKAILHVYWEEFQKDPVGLMSRVAQPASKKIDQNKLKPEMDEKGNLTTAGFACSQCGQPLFVYKLEQVSEKGKAYTNYFGRCNVAEHEKLILLAQLKPEKDSDEAVTYSLGKFGQRALDFYSIHVTKESTHPVKPLAQIAGNRYASHPVGKALSDACMGTIASFLSKYQDIIIEHQKVVKGNQKRLESLRELAGKENLEYPSVTLPPQPHTKEGVDAYNEVIARVRMWVNLNLWQKLKLSRDDAKPLLRLKGFPSFPLVERQANEVDWWDMVCNVKKLINEKKEDGKVFWQNLAGYKRQEALRPYLSSEEDRKKGKKFARYQLGDLLLHLEKKHGEDWGKVYGEAWERIDKKVEGLSKHIKLEEERRSEDAQSKAALTDWLRAKASFVIEGLKEADKDEFCRCELKLQKWYGDLRGKPFAIEAENSILDISGFSKQYNCAFIWQKDGVKKLNLYLIINYFKGGKLRFKKIKPEAFEANRFYTVINKKSGEIVPMEVNFNFDDPNLIILPLAFGKRQGREFIWNDLLSLETGSLKLANGRVIEKTLYNRRTRQDEPALFVALTFERREVLDSSNIKPMNLIGVDRGENIPAVIALTDPEGCPLSRFKDSLGNPTHILRIGESYKEKQRTIQAKKEVEQRRAGGYSRKYASKAKNLADDMVRNTARDLLYYAVTQDAMLIFENLSRGFGRQGKRTFMAERQYTRMEDWLTAKLAYEGLPSKTYLSKTLAQYTSKTCSNCGFTITSADYDRVLEKLKKTATGWMTTINGKELKVEGQITYYNRYKRQNVVKDLSVELDRLSEESVNNDISSWTKGRSGEALSLLKKRFSHRPVQEKFVCLNCGFETHADEQAALNIARSWLFLRSQEYKKYQTNKTTGNTDKRAFVETWQSFYRKKLKEVWKPAV

SEQ ID NO: 41700 - protein, 978 aa, synthetic construct
  REGION 1..978: note = engineered CasX variant
QEIKRANKIRRRLVKDSNTKKAGKTGPMKTLLVRVMTPDLRERLENLRKKPENIPQPISNTSRANLNKLLTDYTEMKKAILHVYWEEFQKDPVGLMSRVAQPASKKIDQNKLKPEMDEKGNLTTAGFACSQCGQPLFVYKLEQVSEKGKAYTNYFGRCNVAEHEKLILLAQLKPEKDSDEAVTYSLGKFGQRALDFYSIHVTKESTHPVKPLAQIAGNRYASSPVGKALSDACMGTIASFLSKYQDIIIEHQKVVKGNQKRLESLRELAGKENLEYPSVTLPPQPHTKEGVDAYNEVIARVRMWVNLNLWQKLKLSRDDAKPLLRLKGFPSFPLVERQANEVDWWDMVCNVKKLINEKKEDGKVFWQNLAGYKRQEALRPYLSSEEDRKKGKKFARYQLGDLLLHLEKKHGEDWGKVYGEAWERIDKKVEGLSKHIKLEEERRSEDAQSKAALTDWLRAKASFVIEGLKEADKDEFCRCELKLQKWYGDLRGKPFAIEAENSILDISGFSKQYNCAFIWQKDGVKKLNLYLIINYFKGGKLRFKKIKPEAFEANRFYTVINKKSGEIVPMEVNFNFDDPNLIILPLAFGKRQGREFIWNDLLSLETGSLKLANGRVIEKTLYNRRTRQDEPALFVALTFERREVLDSSNIKPMNLIGVDRGENIPAVIALTDPEGCPLSRFKDSLGNPTHILRIGESYKEKQRTIQAKKEVEQRRAGGYSRKYASKAKNLADDMVRNTARDLLYYAVTQDAMLIFENLSRGFGRQGKRTFMAERQYTRMEDWLTAKLAYEGLPSKTYLSKTLAQYTSKTCSNCGFTITSADYDRVLEKLKKTATGWMTTINGKELKVEGQITYYNRYKRQNVVKDLSVELDRLSEESVNNDISSWTKGRSGEALSLLKKRFSHRPVQEKFVCLNCGFETHADEQAALNIARSWLFLRSQEYKKYQTNKTTGNTDKRAFVETWQSFYRKKLKEVWKPAV

SEQ ID NO: 41701 - protein, 978 aa, synthetic construct
  REGION 1..978: note = engineered CasX variant
QEIKRANKIRRRLVKDSNTKKAGKTGPMKTLLVRVMTPDLRERLENLRKKPENIPQPISNTSRANLNKLLTDYTEMKKAILHVYWEEFQKDPVGLMSRVAQPASKKIDQNKLKPEMDEKGNLTTAGFACSQCGQPLFVYKLEQVSEKGKAYTNYFGRCNVAEHEKLILLAQLKPEKDSDEAVTYSLGKFGQRALDFYSIHVTKESTHPVKPLAQIAGNRYASTPVGKALSDACMGTIASFLSKYQDIIIEHQKVVKGNQKRLESLRELAGKENLEYPSVTLPPQPHTKEGVDAYNEVIARVRMWVNLNLWQKLKLSRDDAKPLLRLKGFPSFPLVERQANEVDWWDMVCNVKKLINEKKEDGKVFWQNLAGYKRQEALRPYLSSEEDRKKGKKFARYQLGDLLLHLEKKHGEDWGKVYGEAWERIDKKVEGLSKHIKLEEERRSEDAQSKAALTDWLRAKASFVIEGLKEADKDEFCRCELKLQKWYGDLRGKPFAIEAENSILDISGFSKQYNCAFIWQKDGVKKLNLYLIINYFKGGKLRFKKIKPEAFEANRFYTVINKKSGEIVPMEVNFNFDDPNLIILPLAFGKRQGREFIWNDLLSLETGSLKLANGRVIEKTLYNRRTRQDEPALFVALTFERREVLDSSNIKPMNLIGVDRGENIPAVIALTDPEGCPLSRFKDSLGNPTHILRIGESYKEKQRTIQAKKEVEQRRAGGYSRKYASKAKNLADDMVRNTARDLLYYAVTQDAMLIFENLSRGFGRQGKRTFMAERQYTRMEDWLTAKLAYEGLPSKTYLSKTLAQYTSKTCSNCGFTITSADYDRVLEKLKKTATGWMTTINGKELKVEGQITYYNRYKRQNVVKDLSVELDRLSEESVNNDISSWTKGRSGEALSLLKKRFSHRPVQEKFVCLNCGFETHADEQAALNIARSWLFLRSQEYKKYQTNKTTGNTDKRAFVETWQSFYRKKLKEVWKPAV

SEQ ID NO: 41702 - protein, 978 aa, synthetic construct
  REGION 1..978: note = engineered CasX variant
QEIKRANKIRRRLVKDSNTKKAGKTGPMKTLLVRVMTPDLRERLENLRKKPENIPQPISNTSRANLNKLLTDYTEMKKAILHVYWEEFQKDPVGLMSRVAQPASKKIDQNKLKPEMDEKGNLTTAGFACSQCGQPLFVYKLEQVSEKGKAYTNYFGRCNVAEHEKLILLAQLKPEKDSDEAVTYSLGKFGQRALDFYSIHVTKESTHPVKPLAQIAGNRYASAPVGKALSDACMGTIASFLSKYQDIIIEHQKVVKGNQKRLESLRELAGKENLEYPSVTLPPQPHTKEGVDAYNEVIARVRMWVNLNLWQKLKLSRDDAKPLLRLKGFPSFPLVERQANEVDWWDMVCNVKKLINEKKEDGKVFWQNLAGYKRQEALRPYLSSEEDRKKGKKFARYQLGDLLLHLEKKHGEDWGKVYGEAWERIDKKVEGLSKHIKLEEERRSEDAQSKAALTDWLRAKASFVIEGLKEADKDEFCRCELKLQKWYGDLRGKPFAIEAENSILDISGFSKQYNCAFIWQKDGVKKLNLYLIINYFKGGKLRFKKIKPEAFEANRFYTVINKKSGEIVPMEVNFNFDDPNLIILPLAFGKRQGREFIWNDLLSLETGSLKLANGRVIEKTLYNRRTRQDEPALFVALTFERREVLDSSNIKPMNLIGVDRGENIPAVIALTDPEGCPLSRFKDSLGNPTHILRIGESYKEKQRTIQAKKEVEQRRAGGYSRKYASKAKNLADDMVRNTARDLLYYAVTQDAMLIFENLSRGFGRQGKRTFMAERQYTRMEDWLTAKLAYEGLPSKTYLSKTLAQYTSKTCSNCGFTITSADYDRVLEKLKKTATGWMTTINGKELKVEGQITYYNRYKRQNVVKDLSVELDRLSEESVNNDISSWTKGRSGEALSLLKKRFSHRPVQEKFVCLNCGFETHADEQAALNIARSWLFLRSQEYKKYQTNKTTGNTDKRAFVETWQSFYRKKLKEVWKPAV

SEQ ID NO: 41703 - protein, 978 aa, synthetic construct
  REGION 1..978: note = engineered CasX variant
QEIKRANKIRRRLVKDSNTKKAGKTGPMKTLLVRVMTPDLRERLENLRKKPENIPQPISNTSRANLNKLLTDYTEMKKAILHVYWEEFQKDPVGLMSRVAQPASKKIDQNKLKPEMDEKGNLTTAGFACSQCGQPLFVYKLEQVSEKGKAYTNYFGRCNVAEHEKLILLAQLKPEKDSDEAVTYSLGKFGQRALDFYSIHVTKESTHPVKPLAQIAGNRYASVPVGKALSDACMGTIASFLSKYQDIIIEHQKVVKGNQKRLESLRELAGKENLEYPSVTLPPQPHTKEGVDAYNEVIARVRMWVNLNLWQKLKLSRDDAKPLLRLKGFPSFPLVERQANEVDWWDMVCNVKKLINEKKEDGKVFWQNLAGYKRQEALRPYLSSEEDRKKGKKFARYQLGDLLLHLEKKHGEDWGKVYGEAWERIDKKVEGLSKHIKLEEERRSEDAQSKAALTDWLRAKASFVIEGLKEADKDEFCRCELKLQKWYGDLRGKPFAIEAENSILDISGFSKQYNCAFIWQKDGVKKLNLYLIINYFKGGKLRFKKIKPEAFEANRFYTVINKKSGEIVPMEVNFNFDDPNLIILPLAFGKRQGREFIWNDLLSLETGSLKLANGRVIEKTLYNRRTRQDEPALFVALTFERREVLDSSNIKPMNLIGVDRGENIPAVIALTDPEGCPLSRFKDSLGNPTHILRIGESYKEKQRTIQAKKEVEQRRAGGYSRKYASKAKNLADDMVRNTARDLLYYAVTQDAMLIFENLSRGFGRQGKRTFMAERQYTRMEDWLTAKLAYEGLPSKTYLSKTLAQYTSKTCSNCGFTITSADYDRVLEKLKKTATGWMTTINGKELKVEGQITYYNRYKRQNVVKDLSVELDRLSEESVNNDISSWTKGRSGEALSLLKKRFSHRPVQEKFVCLNCGFETHADEQAALNIARSWLFLRSQEYKKYQTNKTTGNTDKRAFVETWQSFYRKKLKEVWKPAV

SEQ ID NO: 41704 - protein, 978 aa, synthetic construct
  REGION 1..978: note = engineered CasX variant
QEIKRANKIRRRLVKDSNTKKAGKTGPMKTLLVRVMTPDLRERLENLRKKPENIPQPISNTSRANLNKLLTDYTEMKKAILHVYWEEFQKDPVGLMSRVAQPASKKIDQNKLKPEMDEKGNLTTAGFACSQCGQPLFVYKLEQVSEKGKAYTNYFGRCNVAEHEKLIKLAQLKPEKDSDEAVTYSLGKFGQRALDFYSIHVTKESTHPVKPLAQIAGNRYASGPVGKALSDACMGTIASFLSKYQDIIIEHQKVVKGNQKRLESLRELAGKENLEYPSVTLPPQPHTKEGVDAYNEVIARVRMWVNLNLWQKLKLSRDDAKPLLRLKGFPSFPLVERQANEVDWWDMVCNVKKLINEKKEDGKVFWQNLAGYKRQEALRPYLSSEEDRKKGKKFARYQLGDLLLHLEKKHGEDWGKVYGEAWERIDKKVEGLSKHIKLEEERRSEDAQSKAALTDWLRAKASFVIEGLKEADKDEFCRCELKLQKWYGDLRGKPFAIEAENSILDISGFSKQYNCAFIWQKDGVKKLNLYLIINYFKGGKLRFKKIKPEAFEANRFYTVINKKSGEIVPMEVNFNFDDPNLIILPLAFGKRQGREFIWNDLLSLETGSLKLANGRVIEKTLYNRRTRQDEPALFVALTFERREVLDSSNIKPMNLIGVDRGENIPAVIALTDPEGCPLSRFKDSLGNPTHILRIGESYKEKQRTIQAKKEVEQRRAGGYSRKYASKAKNLADDMVRNTARDLLYYAVTQDAMLIFENLSRGFGRQGKRTFMAERQYTRMEDWLTAKLAYEGLPSKTYLSKTLAQYTSKTCSNCGFTITSADYDRVLEKLKKTATGWMTTINGKELKVEGQITYYNRYKRQNVVKDLSVELDRLSEESVNNDISSWTKGRSGEALSLLKKRFSHRPVQEKFVCLNCGFETHADEQAALNIARSWLFLRSQEYKKYQTNKTTGNTDKRAFVETWQSFYRKKLKEVWKPAV

SEQ ID NO: 41705 - protein, 977 aa, synthetic construct
  REGION 1..977: note = engineered CasX variant
QEIKRANKIRRRLVKDSNTKKAGKTGPMKTLLVRVMTPDLRERLENLRKKPENIPQPISNTSRANLNKLLTDYTEMKKAILHVYWEEFQKDPVGLMSRVAQPASKKIDQNKLKPEMDEKGNLTTAGFACSQCGQPLFVYKLEQVSEKGKAYTNYFGRCNVAEHEKLILLAQLKPEKDSDEAVTYSLGKFGQRALDFYSIHVTKESTHPVKPLAQIAGNRYASPVGKALSDACMGTIASFLSKYQDIIIEHQKVVKGNQKRLESLRELAGKENLEYPSVTLPPQPHTKEGVDAYNEVIARVRMWVNLNLWQKLKLSRDDAKPLLRLKGFPSFPLVERQANEVDWWDMVCNVKKLINEKKEDGKVFWQNLAGYKRQEALRPYLSSEEDRKKGKKFARYQLGDLLLHLEKKHGEDWGKVYGEAWERIDKKVEGLSKHIKLEEERRSEDAQSKAALTDWLRAKASFVIEGLKEADKDEFCRCELKLQKWYGDLRGKPFAIEAENSILDISGFSKQYNCAFIWQKDGVKKLNLYLIINYFKGGKLRFKKIKPEAFEANRFYTVINKKSGEIVPMEVNFNFDDPNLIILPLAFGKRQGREFIWNDLLSLETGSLKLANGRVIEKTLYNRRTRQDEPALFVALTFERREVLDSSNIKPMNLIGVDRGENIPAVIALTDPEGCPLSRFKDSLGNPTHILRIGESYKEKQRTIQAKKEVEQRRAGGYSRKYASKAKNLADDMVRNTARDLLYYAVTQDAMLIFENLSRGFGRQGKRTFMAERQYTRMEDWLTAKLAYEGLPSKTYLSKTLAQYTSKTCSNCGFTITSADYDRVLEKLKKTATGWMTTINGKELKVEGQITYYNRYKRQNVVKDLSVELDRLSEESVNNDISSWTKGRSGEALSLLKKRFSHRPVQEKFVCLNCGFETHADEQAALNIARSWLFLRSQEYKKYQTNKTTGNTDKRAFVETWQSFYRKKLKEVWKPAV

SEQ ID NO: 41706 - protein, 978 aa, synthetic construct
  REGION 1..978: note = engineered CasX variant
QEIKRANKIRRRLVKDSNTKKAGKTGPMKTLLVRVMTPDLRERLENLRKKPENIPQPISNTSRANLNKLLTDYTEMKKAILHVYWEEFQKDPVGLMSRVAQPASKKIDQNKLKPEMDEKGNLTTAGFACSQCGQPLFVYKLEQVSEKGKAYTNYFGRCNVAEHEKLILLAQLKPEKDSDEAVTYSLGKFGQRALDFYSIHVTKESTHPVKPLAQIAGNRYASYPVGKALSDACMGTIASFLSKYQDIIIEHQKVVKGNQKRLESLRELAGKENLEYPSVTLPPQPHTKEGVDAYNEVIARVRMWVNLNLWQKLKLSRDDAKPLLRLKGFPSFPLVERQANEVDWWDMVCNVKKLINEKKEDGKVFWQNLAGYKRQEALRPYLSSEEDRKKGKKFARYQLGDLLLHLEKKHGEDWGKVYDEAWERIDKKVEGLSKHIKLEEERRSEDAQSKAALTDWLRAKASFVIEGKKEADKDEFCRCELKLQKWYGDLRGKPFAIEAENSILDISGFSKQYNCAFIWQKDGVKKLNLYLIINYFKGGKLRFKKIKPEAFEANRFYTVINKKSGEIVPMEVNFNFDDPNLIILPLAFGKRQGREFIWNDLLSLETGSLKLANGRVIEKTLYNRRTRQDEPALFVALTFERREVLDSSNIKPMNLIGVDRGENIPAVIALTDPEGCPLSRFKDSLGNPTHILRIGESYKEKQRTIQAKKEVEQRRAGGYSRKYASKAKNLADDMVRNTARDLLYYAVTQDAMLIFENLSRGFGRQGKRTFMAERQYTRMEDWLTAKLAYEGLPSKTYLSKTLAQYTSKTCSNCGFTITSADYDRVLEKLKKTATGWMTTINGKELKVEGQITYYNRYKRQNVVKDLSVELDRLSEESVNNDISSWTKGRSGEALSLLKKRFSHRPVQEKFVCLNCGFETHADEQAALNIARSWLFLRSQEYKKYQTNKTTGNTDKRAFVETWQSFYRKKLKEVWKPAV

SEQ ID NO: 41707 - protein, 978 aa, synthetic construct
  REGION 1..978: note = engineered CasX variant
QEIKRANKIRRRLVKDSNTKKAGKTGPMKTLLVRVMTPDLRERLENLRKKPENIPQPISNTSRANLNKLLTDYTEMKKAILHVYWEEFQKDPVGLMSRVAQPASKKIDQNKLKPEMDEKGNLTTAGFACSQCGQPLFVYKLEQVSEKGKAYTNYFGRCNVAEHEKLILLAQLKPEKDSDEAVTYSLGKFGQRALDFYSIHVTKESTHPVKPLAQIAGNRYASHPVGKALSDACMGTIASFLSKYQDIIIEHQKVVKGNQKRLESLRELAGKENLEYPSVTLPPQPHTKEGVDAYNEVIARVRMWVNLNLWQKLKLSRDDAKPLLRLKGFPSFPLVERQANEVDWWDMVCNVKKLINEKKEDGKVFWQNLAGYKRQEALRPYLSSEEDRKKGKKFARYQLGDLLLHLEKKHGEDWGKVYDEAWERIDKKVEGLSKHIKLEEERRSEDAQSKAALTDWLRAKASFVIEGKKEADKDEFCRCELKLQKWYGDLRGKPFAIEAENSILDISGFSKQYNCAFIWQKDGVKKLNLYLIINYFKGGKLRFKKIKPEAFEANRFYTVINKKSGEIVPMEVNFNFDDPNLIILPLAFGKRQGREFIWNDLLSLETGSLKLANGRVIEKTLYNRRTRQDEPALFVALTFERREVLDSSNIKPMNLIGVDRGENIPAVIALTDPEGCPLSRFKDSLGNPTHILRIGESYKEKQRTIQAKKEVEQRRAGGYSRKYASKAKNLADDMVRNTARDLLYYAVTQDAMLIFENLSRGFGRQGKRTFMAERQYTRMEDWLTAKLAYEGLPSKTYLSKTLAQYTSKTCSNCGFTITSADYDRVLEKLKKTATGWMTTINGKELKVEGQITYYNRYKRQNVVKDLSVELDRLSEESVNNDISSWTKGRSGEALSLLKKRFSHRPVQEKFVCLNCGFETHADEQAALNIARSWLFLRSQEYKKYQTNKTTGNTDKRAFVETWQSFYRKKLKEVWKPAV

SEQ ID NO: 41708 - protein, 978 aa, synthetic construct
  REGION 1..978: note = engineered CasX variant
QEIKRANKIRRRLVKDSNTKKAGKTGPMKTLLVRVMTPDLRERLENLRKKPENIPQPISNTSRANLNKLLTDYTEMKKAILHVYWEEFQKDPVGLMSRVAQPASKKIDQNKLKPEMDEKGNLTTAGFACSQCGQPLFVYKLEQVSEKGKAYTNYFGRCNVAEHEKLILLAQLKPEKDSDEAVTYSLGKFGQRALDFYSIHVTKESTHPVKPLAQIAGNRYASSPVGKALSDACMGTIASFLSKYQDIIIEHQKVVKGNQKRLESLRELAGKENLEYPSVTLPPQPHTKEGVDAYNEVIARVRMWVNLNLWQKLKLSRDDAKPLLRLKGFPSFPLVERQANEVDWWDMVCNVKKLINEKKEDGKVFWQNLAGYKRQEALRPYLSSEEDRKKGKKFARYQLGDLLLHLEKKHGEDWGKVYDEAWERIDKKVEGLSKHIKLEEERRSEDAQSKAALTDWLRAKASFVIEGKKEADKDEFCRCELKLQKWYGDLRGKPFAIEAENSILDISGFSKQYNCAFIWQKDGVKKLNLYLIINYFKGGKLRFKKIKPEAFEANRFYTVINKKSGEIVPMEVNFNFDDPNLIILPLAFGKRQGREFIWNDLLSLETGSLKLANGRVIEKTLYNRRTRQDEPALFVALTFERREVLDSSNIKPMNLIGVDRGENIPAVIALTDPEGCPLSRFKDSLGNPTHILRIGESYKEKQRTIQAKKEVEQRRAGGYSRKYASKAKNLADDMVRNTARDLLYYAVTQDAMLIFENLSRGFGRQGKRTFMAERQYTRMEDWLTAKLAYEGLPSKTYLSKTLAQYTSKTCSNCGFTITSADYDRVLEKLKKTATGWMTTINGKELKVEGQITYYNRYKRQNVVKDLSVELDRLSEESVNNDISSWTKGRSGEALSLLKKRFSHRPVQEKFVCLNCGFETHADEQAALNIARSWLFLRSQEYKKYQTNKTTGNTDKRAFVETWQSFYRKKLKEVWKPAV

SEQ ID NO: 41709 - protein, 978 aa, synthetic construct
  REGION 1..978: note = engineered CasX variant
QEIKRANKIRRRLVKDSNTKKAGKTGPMKTLLVRVMTPDLRERLENLRKKPENIPQPISNTSRANLNKLLTDYTEMKKAILHVYWEEFQKDPVGLMSRVAQPASKKIDQNKLKPEMDEKGNLTTAGFACSQCGQPLFVYKLEQVSEKGKAYTNYFGRCNVAEHEKLILLAQLKPEKDSDEAVTYSLGKFGQRALDFYSIHVTKESTHPVKPLAQIAGNRYASTPVGKALSDACMGTIASFLSKYQDIIIEHQKVVKGNQKRLESLRELAGKENLEYPSVTLPPQPHTKEGVDAYNEVIARVRMWVNLNLWQKLKLSRDDAKPLLRLKGFPSFPLVERQANEVDWWDMVCNVKKLINEKKEDGKVFWQNLAGYKRQEALRPYLSSEEDRKKGKKFARYQLGDLLLHLEKKHGEDWGKVYDEAWERIDKKVEGLSKHIKLEEERRSEDAQSKAALTDWLRAKASFVIEGKKEADKDEFCRCELKLQKWYGDLRGKPFAIEAENSILDISGFSKQYNCAFIWQKDGVKKLNLYLIINYFKGGKLRFKKIKPEAFEANRFYTVINKKSGEIVPMEVNFNFDDPNLIILPLAFGKRQGREFIWNDLLSLETGSLKLANGRVIEKTLYNRRTRQDEPALFVALTFERREVLDSSNIKPMNLIGVDRGENIPAVIALTDPEGCPLSRFKDSLGNPTHILRIGESYKEKQRTIQAKKEVEQRRAGGYSRKYASKAKNLADDMVRNTARDLLYYAVTQDAMLIFENLSRGFGRQGKRTFMAERQYTRMEDWLTAKLAYEGLPSKTYLSKTLAQYTSKTCSNCGFTITSADYDRVLEKLKKTATGWMTTINGKELKVEGQITYYNRYKRQNVVKDLSVELDRLSEESVNNDISSWTKGRSGEALSLLKKRFSHRPVQEKFVCLNCGFETHADEQAALNIARSWLFLRSQEYKKYQTNKTTGNTDKRAFVETWQSFYRKKLKEVWKPAV

SEQ ID NO: 41710 - protein, 978 aa, synthetic construct
  REGION 1..978: note = engineered CasX variant
QEIKRANKIRRRLVKDSNTKKAGKTGPMKTLLVRVMTPDLRERLENLRKKPENIPQPISNTSRANLNKLLTDYTEMKKAILHVYWEEFQKDPVGLMSRVAQPASKKIDQNKLKPEMDEKGNLTTAGFACSQCGQPLFVYKLEQVSEKGKAYTNYFGRCNVAEHEKLILLAQLKPEKDSDEAVTYSLGKFGQRALDFYSIHVTKESTHPVKPLAQIAGNRYASAPVGKALSDACMGTIASFLSKYQDIIIEHQKVVKGNQKRLESLRELAGKENLEYPSVTLPPQPHTKEGVDAYNEVIARVRMWVNLNLWQKLKLSRDDAKPLLRLKGFPSFPLVERQANEVDWWDMVCNVKKLINEKKEDGKVFWQNLAGYKRQEALRPYLSSEEDRKKGKKFARYQLGDLLLHLEKKHGEDWGKVYDEAWERIDKKVEGLSKHIKLEEERRSEDAQSKAALTDWLRAKASFVIEGKKEADKDEFCRCELKLQKWYGDLRGKPFAIEAENSILDISGFSKQYNCAFIWQKDGVKKLNLYLIINYFKGGKLRFKKIKPEAFEANRFYTVINKKSGEIVPMEVNFNFDDPNLIILPLAFGKRQGREFIWNDLLSLETGSLKLANGRVIEKTLYNRRTRQDEPALFVALTFERREVLDSSNIKPMNLIGVDRGENIPAVIALTDPEGCPLSRFKDSLGNPTHILRIGESYKEKQRTIQAKKEVEQRRAGGYSRKYASKAKNLADDMVRNTARDLLYYAVTQDAMLIFENLSRGFGRQGKRTFMAERQYTRMEDWLTAKLAYEGLPSKTYLSKTLAQYTSKTCSNCGFTITSADYDRVLEKLKKTATGWMTTINGKELKVEGQITYYNRYKRQNVVKDLSVELDRLSEESVNNDISSWTKGRSGEALSLLKKRFSHRPVQEKFVCLNCGFETHADEQAALNIARSWLFLRSQEYKKYQTNKTTGNTDKRAFVETWQSFYRKKLKEVWKPAV

SEQ ID NO: 41711 - protein, 978 aa, synthetic construct
  REGION 1..978: note = engineered CasX variant
QEIKRANKIRRRLVKDSNTKKAGKTGPMKTLLVRVMTPDLRERLENLRKKPENIPQPISNTSRANLNKLLTDYTEMKKAILHVYWEEFQKDPVGLMSRVAQPASKKIDQNKLKPEMDEKGNLTTAGFACSQCGQPLFVYKLEQVSEKGKAYTNYFGRCNVAEHEKLILLAQLKPEKDSDEAVTYSLGKFGQRALDFYSIHVTKESTHPVKPLAQIAGNRYASVPVGKALSDACMGTIASFLSKYQDIIIEHQKVVKGNQKRLESLRELAGKENLEYPSVTLPPQPHTKEGVDAYNEVIARVRMWVNLNLWQKLKLSRDDAKPLLRLKGFPSFPLVERQANEVDWWDMVCNVKKLINEKKEDGKVFWQNLAGYKRQEALRPYLSSEEDRKKGKKFARYQLGDLLLHLEKKHGEDWGKVYDEAWERIDKKVEGLSKHIKLEEERRSEDAQSKAALTDWLRAKASFVIEGKKEADKDEFCRCELKLQKWYGDLRGKPFAIEAENSILDISGFSKQYNCAFIWQKDGVKKLNLYLIINYFKGGKLRFKKIKPEAFEANRFYTVINKKSGEIVPMEVNFNFDDPNLIILPLAFGKRQGREFIWNDLLSLETGSLKLANGRVIEKTLYNRRTRQDEPALFVALTFERREVLDSSNIKPMNLIGVDRGENIPAVIALTDPEGCPLSRFKDSLGNPTHILRIGESYKEKQRTIQAKKEVEQRRAGGYSRKYASKAKNLADDMVRNTARDLLYYAVTQDAMLIFENLSRGFGRQGKRTFMAERQYTRMEDWLTAKLAYEGLPSKTYLSKTLAQYTSKTCSNCGFTITSADYDRVLEKLKKTATGWMTTINGKELKVEGQITYYNRYKRQNVVKDLSVELDRLSEESVNNDISSWTKGRSGEALSLLKKRFSHRPVQEKFVCLNCGFETHADEQAALNIARSWLFLRSQEYKKYQTNKTTGNTDKRAFVETWQSFYRKKLKEVWKPAV

SEQ ID NO: 41712 - protein, 978 aa, synthetic construct
  REGION 1..978: note = engineered CasX variant
QEIKRANKIRRRLVKDSNTKKAGKTGPMKTLLVRVMTPDLRERLENLRKKPENIPQPISNTSRANLNKLLTDYTEMKKAILHVYWEEFQKDPVGLMSRVAQPASKKIDQNKLKPEMDEKGNLTTAGFACSQCGQPLFVYKLEQVSEKGKAYTNYFGRCNVAEHEKLIKLAQLKPEKDSDEAVTYSLGKFGQRALDFYSIHVTKESTHPVKPLAQIAGNRYASGPVGKALSDACMGTIASFLSKYQDIIIEHQKVVKGNQKRLESLRELAGKENLEYPSVTLPPQPHTKEGVDAYNEVIARVRMWVNLNLWQKLKLSRDDAKPLLRLKGFPSFPLVERQANEVDWWDMVCNVKKLINEKKEDGKVFWQNLAGYKRQEALRPYLSSEEDRKKGKKFARYQLGDLLLHLEKKHGEDWGKVYDEAWERIDKKVEGLSKHIKLEEERRSEDAQSKAALTDWLRAKASFVIEGKKEADKDEFCRCELKLQKWYGDLRGKPFAIEAENSILDISGFSKQYNCAFIWQKDGVKKLNLYLIINYFKGGKLRFKKIKPEAFEANRFYTVINKKSGEIVPMEVNFNFDDPNLIILPLAFGKRQGREFIWNDLLSLETGSLKLANGRVIEKTLYNRRTRQDEPALFVALTFERREVLDSSNIKPMNLIGVDRGENIPAVIALTDPEGCPLSRFKDSLGNPTHILRIGESYKEKQRTIQAKKEVEQRRAGGYSRKYASKAKNLADDMVRNTARDLLYYAVTQDAMLIFENLSRGFGRQGKRTFMAERQYTRMEDWLTAKLAYEGLPSKTYLSKTLAQYTSKTCSNCGFTITSADYDRVLEKLKKTATGWMTTINGKELKVEGQITYYNRYKRQNVVKDLSVELDRLSEESVNNDISSWTKGRSGEALSLLKKRFSHRPVQEKFVCLNCGFETHADEQAALNIARSWLFLRSQEYKKYQTNKTTGNTDKRAFVETWQSFYRKKLKEVWKPAV

SEQ ID NO: 41713 - protein, 977 aa, synthetic construct
  REGION 1..977: note = engineered CasX variant
QEIKRANKIRRRLVKDSNTKKAGKTGPMKTLLVRVMTPDLRERLENLRKKPENIPQPISNTSRANLNKLLTDYTEMKKAILHVYWEEFQKDPVGLMSRVAQPASKKIDQNKLKPEMDEKGNLTTAGFACSQCGQPLFVYKLEQVSEKGKAYTNYFGRCNVAEHEKLILLAQLKPEKDSDEAVTYSLGKFGQRALDFYSIHVTKESTHPVKPLAQIAGNRYASPVGKALSDACMGTIASFLSKYQDIIIEHQKVVKGNQKRLESLRELAGKENLEYPSVTLPPQPHTKEGVDAYNEVIARVRMWVNLNLWQKLKLSRDDAKPLLRLKGFPSFPLVERQANEVDWWDMVCNVKKLINEKKEDGKVFWQNLAGYKRQEALRPYLSSEEDRKKGKKFARYQLGDLLLHLEKKHGEDWGKVYDEAWERIDKKVEGLSKHIKLEEERRSEDAQSKAALTDWLRAKASFVIEGKKEADKDEFCRCELKLQKWYGDLRGKPFAIEAENSILDISGFSKQYNCAFIWQKDGVKKLNLYLIINYFKGGKLRFKKIKPEAFEANRFYTVINKKSGEIVPMEVNFNFDDPNLIILPLAFGKRQGREFIWNDLLSLETGSLKLANGRVIEKTLYNRRTRQDEPALFVALTFERREVLDSSNIKPMNLIGVDRGENIPAVIALTDPEGCPLSRFKDSLGNPTHILRIGESYKEKQRTIQAKKEVEQRRAGGYSRKYASKAKNLADDMVRNTARDLLYYAVTQDAMLIFENLSRGFGRQGKRTFMAERQYTRMEDWLTAKLAYEGLPSKTYLSKTLAQYTSKTCSNCGFTITSADYDRVLEKLKKTATGWMTTINGKELKVEGQITYYNRYKRQNVVKDLSVELDRLSEESVNNDISSWTKGRSGEALSLLKKRFSHRPVQEKFVCLNCGFETHADEQAALNIARSWLFLRSQEYKKYQTNKTTGNTDKRAFVETWQSFYRKKLKEVWKPAV

SEQ ID NO: 41714 - protein, 978 aa, synthetic construct
  REGION 1..978: note = engineered CasX variant
QEIKRANKIRRRLVKDSNTKKAGKTGPMKTLLVRVMTPDLRERLENLRKKPENIPQPISNTSRANLNKLLTDYTEMKKAILHVYWEEFQKDPVGLMSRVAQPASKKIDQNKLKPEMDEKGNLTTAGFACSQCGQPLFVYKLEQVSEKGKAYTNYFGRCNVAEHEKLILLAQLKPEKDSDEAVTYSLGKFGQRALDFYSIHVTKESTHPVKPLAQIAGNRYASYPVGKALSDACMGTIASFLSKYQDIIIEHQKVVKGNQKRLESLRELAGKENLEYPSVTLPPQPHTKEGVDAYNEVIARVRMWVNLNLWQKLKLSRDDAKPLLRLKGFPSFPLVERQANEVDWWDMVCNVKKLINEKKEDGKVFWQNLAGYKRQEALRPYLSSEEDRKKGKKFARYQLGDLLLHLEKKHGEDWGKVYDEAWERIDKKVEGLSKHIKLEEERRSEDAQSKAALTDWLRAKASFVIEGSKEADKDEFCRCELKLQKWYGDLRGKPFAIEAENSILDISGFSKQYNCAFIWQKDGVKKLNLYLIINYFKGGKLRFKKIKPEAFEANRFYTVINKKSGEIVPMEVNFNFDDPNLIILPLAFGKRQGREFIWNDLLSLETGSLKLANGRVIEKTLYNRRTRQDEPALFVALTFERREVLDSSNIKPMNLIGVDRGENIPAVIALTDPEGCPLSRFKDSLGNPTHILRIGESYKEKQRTIQAKKEVEQRRAGGYSRKYASKAKNLADDMVRNTARDLLYYAVTQDAMLIFENLSRGFGRQGKRTFMAERQYTRMEDWLTAKLAYEGLPSKTYLSKTLAQYTSKTCSNCGFTITSADYDRVLEKLKKTATGWMTTINGKELKVEGQITYYNRYKRQNVVKDLSVELDRLSEESVNNDISSWTKGRSGEALSLLKKRFSHRPVQEKFVCLNCGFETHADEQAALNIARSWLFLRSQEYKKYQTNKTTGNTDKRAFVETWQSFYRKKLKEVWKPAV

SEQ ID NO: 41715 - protein, 978 aa, synthetic construct
  REGION 1..978: note = engineered CasX variant
QEIKRANKIRRRLVKDSNTKKAGKTGPMKTLLVRVMTPDLRERLENLRKKPENIPQPISNTSRANLNKLLTDYTEMKKAILHVYWEEFQKDPVGLMSRVAQPASKKIDQNKLKPEMDEKGNLTTAGFACSQCGQPLFVYKLEQVSEKGKAYTNYFGRCNVAEHEKLILLAQLKPEKDSDEAVTYSLGKFGQRALDFYSIHVTKESTHPVKPLAQIAGNRYASHPVGKALSDACMGTIASFLSKYQDIIIEHQKVVKGNQKRLESLRELAGKENLEYPSVTLPPQPHTKEGVDAYNEVIARVRMWVNLNLWQKLKLSRDDAKPLLRLKGFPSFPLVERQANEVDWWDMVCNVKKLINEKKEDGKVFWQNLAGYKRQEALRPYLSSEEDRKKGKKFARYQLGDLLLHLEKKHGEDWGKVYDEAWERIDKKVEGLSKHIKLEEERRSEDAQSKAALTDWLRAKASFVIEGSKEADKDEFCRCELKLQKWYGDLRGKPFAIEAENSILDISGFSKQYNCAFIWQKDGVKKLNLYLIINYFKGGKLRFKKIKPEAFEANRFYTVINKKSGEIVPMEVNFNFDDPNLIILPLAFGKRQGREFIWNDLLSLETGSLKLANGRVIEKTLYNRRTRQDEPALFVALTFERREVLDSSNIKPMNLIGVDRGENIPAVIALTDPEGCPLSRFKDSLGNPTHILRIGESYKEKQRTIQAKKEVEQRRAGGYSRKYASKAKNLADDMVRNTARDLLYYAVTQDAMLIFENLSRGFGRQGKRTFMAERQYTRMEDWLTAKLAYEGLPSKTYLSKTLAQYTSKTCSNCGFTITSADYDRVLEKLKKTATGWMTTINGKELKVEGQITYYNRYKRQNVVKDLSVELDRLSEESVNNDISSWTKGRSGEALSLLKKRFSHRPVQEKFVCLNCGFETHADEQAALNIARSWLFLRSQEYKKYQTNKTTGNTDKRAFVETWQSFYRKKLKEVWKPAV

SEQ ID NO: 41716 - protein, 978 aa, synthetic construct
  REGION 1..978: note = engineered CasX variant
QEIKRANKIRRRLVKDSNTKKAGKTGPMKTLLVRVMTPDLRERLENLRKKPENIPQPISNTSRANLNKLLTDYTEMKKAILHVYWEEFQKDPVGLMSRVAQPASKKIDQNKLKPEMDEKGNLTTAGFACSQCGQPLFVYKLEQVSEKGKAYTNYFGRCNVAEHEKLILLAQLKPEKDSDEAVTYSLGKFGQRALDFYSIHVTKESTHPVKPLAQIAGNRYASSPVGKALSDACMGTIASFLSKYQDIIIEHQKVVKGNQKRLESLRELAGKENLEYPSVTLPPQPHTKEGVDAYNEVIARVRMWVNLNLWQKLKLSRDDAKPLLRLKGFPSFPLVERQANEVDWWDMVCNVKKLINEKKEDGKVFWQNLAGYKRQEALRPYLSSEEDRKKGKKFARYQLGDLLLHLEKKHGEDWGKVYDEAWERIDKKVEGLSKHIKLEEERRSEDAQSKAALTDWLRAKASFVIEGSKEADKDEFCRCELKLQKWYGDLRGKPFAIEAENSILDISGFSKQYNCAFIWQKDGVKKLNLYLIINYFKGGKLRFKKIKPEAFEANRFYTVINKKSGEIVPMEVNFNFDDPNLIILPLAFGKRQGREFIWNDLLSLETGSLKLANGRVIEKTLYNRRTRQDEPALFVALTFERREVLDSSNIKPMNLIGVDRGENIPAVIALTDPEGCPLSRFKDSLGNPTHILRIGESYKEKQRTIQAKKEVEQRRAGGYSRKYASKAKNLADDMVRNTARDLLYYAVTQDAMLIFENLSRGFGRQGKRTFMAERQYTRMEDWLTAKLAYEGLPSKTYLSKTLAQYTSKTCSNCGFTITSADYDRVLEKLKKTATGWMTTINGKELKVEGQITYYNRYKRQNVVKDLSVELDRLSEESVNNDISSWTKGRSGEALSLLKKRFSHRPVQEKFVCLNCGFETHADEQAALNIARSWLFLRSQEYKKYQTNKTTGNTDKRAFVETWQSFYRKKLKEVWKPAV

SEQ ID NO: 41717 - protein, 978 aa, synthetic construct
  REGION 1..978: note = engineered CasX variant
QEIKRANKIRRRLVKDSNTKKAGKTGPMKTLLVRVMTPDLRERLENLRKKPENIPQPISNTSRANLNKLLTDYTEMKKAILHVYWEEFQKDPVGLMSRVAQPASKKIDQNKLKPEMDEKGNLTTAGFACSQCGQPLFVYKLEQVSEKGKAYTNYFGRCNVAEHEKLILLAQLKPEKDSDEAVTYSLGKFGQRALDFYSIHVTKESTHPVKPLAQIAGNRYASTPVGKALSDACMGTIASFLSKYQDIIIEHQKVVKGNQKRLESLRELAGKENLEYPSVTLPPQPHTKEGVDAYNEVIARVRMWVNLNLWQKLKLSRDDAKPLLRLKGFPSFPLVERQANEVDWWDMVCNVKKLINEKKEDGKVFWQNLAGYKRQEALRPYLSSEEDRKKGKKFARYQLGDLLLHLEKKHGEDWGKVYDEAWERIDKKVEGLSKHIKLEEERRSEDAQSKAALTDWLRAKASFVIEGSKEADKDEFCRCELKLQKWYGDLRGKPFAIEAENSILDISGFSKQYNCAFIWQKDGVKKLNLYLIINYFKGGKLRFKKIKPEAFEANRFYTVINKKSGEIVPMEVNFNFDDPNLIILPLAFGKRQGREFIWNDLLSLETGSLKLANGRVIEKTLYNRRTRQDEPALFVALTFERREVLDSSNIKPMNLIGVDRGENIPAVIALTDPEGCPLSRFKDSLGNPTHILRIGESYKEKQRTIQAKKEVEQRRAGGYSRKYASKAKNLADDMVRNTARDLLYYAVTQDAMLIFENLSRGFGRQGKRTFMAERQYTRMEDWLTAKLAYEGLPSKTYLSKTLAQYTSKTCSNCGFTITSADYDRVLEKLKKTATGWMTTINGKELKVEGQITYYNRYKRQNVVKDLSVELDRLSEESVNNDISSWTKGRSGEALSLLKKRFSHRPVQEKFVCLNCGFETHADEQAALNIARSWLFLRSQEYKKYQTNKTTGNTDKRAFVETWQSFYRKKLKEVWKPAV

SEQ ID NO: 41718 - protein, 978 aa, synthetic construct
  REGION 1..978: note = engineered CasX variant
QEIKRANKIRRRLVKDSNTKKAGKTGPMKTLLVRVMTPDLRERLENLRKKPENIPQPISNTSRANLNKLLTDYTEMKKAILHVYWEEFQKDPVGLMSRVAQPASKKIDQNKLKPEMDEKGNLTTAGFACSQCGQPLFVYKLEQVSEKGKAYTNYFGRCNVAEHEKLILLAQLKPEKDSDEAVTYSLGKFGQRALDFYSIHVTKESTHPVKPLAQIAGNRYASAPVGKALSDACMGTIASFLSKYQDIIIEHQKVVKGNQKRLESLRELAGKENLEYPSVTLPPQPHTKEGVDAYNEVIARVRMWVNLNLWQKLKLSRDDAKPLLRLKGFPSFPLVERQANEVDWWDMVCNVKKLINEKKEDGKVFWQNLAGYKRQEALRPYLSSEEDRKKGKKFARYQLGDLLLHLEKKHGEDWGKVYDEAWERIDKKVEGLSKHIKLEEERRSEDAQSKAALTDWLRAKASFVIEGSKEADKDEFCRCELKLQKWYGDLRGKPFAIEAENSILDISGFSKQYNCAFIWQKDGVKKLNLYLIINYFKGGKLRFKKIKPEAFEANRFYTVINKKSGEIVPMEVNFNFDDPNLIILPLAFGKRQGREFIWNDLLSLETGSLKLANGRVIEKTLYNRRTRQDEPALFVALTFERREVLDSSNIKPMNLIGVDRGENIPAVIALTDPEGCPLSRFKDSLGNPTHILRIGESYKEKQRTIQAKKEVEQRRAGGYSRKYASKAKNLADDMVRNTARDLLYYAVTQDAMLIFENLSRGFGRQGKRTFMAERQYTRMEDWLTAKLAYEGLPSKTYLSKTLAQYTSKTCSNCGFTITSADYDRVLEKLKKTATGWMTTINGKELKVEGQITYYNRYKRQNVVKDLSVELDRLSEESVNNDISSWTKGRSGEALSLLKKRFSHRPVQEKFVCLNCGFETHADEQAALNIARSWLFLRSQEYKKYQTNKTTGNTDKRAFVETWQSFYRKKLKEVWKPAV

SEQ ID NO: 41719 - protein, 978 aa, synthetic construct
  REGION 1..978: note = engineered CasX variant
QEIKRANKIRRRLVKDSNTKKAGKTGPMKTLLVRVMTPDLRERLENLRKKPENIPQPISNTSRANLNKLLTDYTEMKKAILHVYWEEFQKDPVGLMSRVAQPASKKIDQNKLKPEMDEKGNLTTAGFACSQCGQPLFVYKLEQVSEKGKAYTNYFGRCNVAEHEKLILLAQLKPEKDSDEAVTYSLGKFGQRALDFYSIHVTKESTHPVKPLAQIAGNRYASVPVGKALSDACMGTIASFLSKYQDIIIEHQKVVKGNQKRLESLRELAGKENLEYPSVTLPPQPHTKEGVDAYNEVIARVRMWVNLNLWQKLKLSRDDAKPLLRLKGFPSFPLVERQANEVDWWDMVCNVKKLINEKKEDGKVFWQNLAGYKRQEALRPYLSSEEDRKKGKKFARYQLGDLLLHLEKKHGEDWGKVYDEAWERIDKKVEGLSKHIKLEEERRSEDAQSKAALTDWLRAKASFVIEGSKEADKDEFCRCELKLQKWYGDLRGKPFAIEAENSILDISGFSKQYNCAFIWQKDGVKKLNLYLIINYFKGGKLRFKKIKPEAFEANRFYTVINKKSGEIVPMEVNFNFDDPNLIILPLAFGKRQGREFIWNDLLSLETGSLKLANGRVIEKTLYNRRTRQDEPALFVALTFERREVLDSSNIKPMNLIGVDRGENIPAVIALTDPEGCPLSRFKDSLGNPTHILRIGESYKEKQRTIQAKKEVEQRRAGGYSRKYASKAKNLADDMVRNTARDLLYYAVTQDAMLIFENLSRGFGRQGKRTFMAERQYTRMEDWLTAKLAYEGLPSKTYLSKTLAQYTSKTCSNCGFTITSADYDRVLEKLKKTATGWMTTINGKELKVEGQITYYNRYKRQNVVKDLSVELDRLSEESVNNDISSWTKGRSGEALSLLKKRFSHRPVQEKFVCLNCGFETHADEQAALNIARSWLFLRSQEYKKYQTNKTTGNTDKRAFVETWQSFYRKKLKEVWKPAV

SEQ ID NO: 41720 - protein, 978 aa, synthetic construct
  REGION 1..978: note = engineered CasX variant
QEIKRANKIRRRLVKDSNTKKAGKTGPMKTLLVRVMTPDLRERLENLRKKPENIPQPISNTSRANLNKLLTDYTEMKKAILHVYWEEFQKDPVGLMSRVAQPASKKIDQNKLKPEMDEKGNLTTAGFACSQCGQPLFVYKLEQVSEKGKAYTNYFGRCNVAEHEKLIKLAQLKPEKDSDEAVTYSLGKFGQRALDFYSIHVTKESTHPVKPLAQIAGNRYASGPVGKALSDACMGTIASFLSKYQDIIIEHQKVVKGNQKRLESLRELAGKENLEYPSVTLPPQPHTKEGVDAYNEVIARVRMWVNLNLWQKLKLSRDDAKPLLRLKGFPSFPLVERQANEVDWWDMVCNVKKLINEKKEDGKVFWQNLAGYKRQEALRPYLSSEEDRKKGKKFARYQLGDLLLHLEKKHGEDWGKVYDEAWERIDKKVEGLSKHIKLEEERRSEDAQSKAALTDWLRAKASFVIEGSKEADKDEFCRCELKLQKWYGDLRGKPFAIEAENSILDISGFSKQYNCAFIWQKDGVKKLNLYLIINYFKGGKLRFKKIKPEAFEANRFYTVINKKSGEIVPMEVNFNFDDPNLIILPLAFGKRQGREFIWNDLLSLETGSLKLANGRVIEKTLYNRRTRQDEPALFVALTFERREVLDSSNIKPMNLIGVDRGENIPAVIALTDPEGCPLSRFKDSLGNPTHILRIGESYKEKQRTIQAKKEVEQRRAGGYSRKYASKAKNLADDMVRNTARDLLYYAVTQDAMLIFENLSRGFGRQGKRTFMAERQYTRMEDWLTAKLAYEGLPSKTYLSKTLAQYTSKTCSNCGFTITSADYDRVLEKLKKTATGWMTTINGKELKVEGQITYYNRYKRQNVVKDLSVELDRLSEESVNNDISSWTKGRSGEALSLLKKRFSHRPVQEKFVCLNCGFETHADEQAALNIARSWLFLRSQEYKKYQTNKTTGNTDKRAFVETWQSFYRKKLKEVWKPAV

SEQ ID NO: 41721 - protein, 977 aa, synthetic construct
  REGION 1..977: note = engineered CasX variant
QEIKRANKIRRRLVKDSNTKKAGKTGPMKTLLVRVMTPDLRERLENLRKKPENIPQPISNTSRANLNKLLTDYTEMKKAILHVYWEEFQKDPVGLMSRVAQPASKKIDQNKLKPEMDEKGNLTTAGFACSQCGQPLFVYKLEQVSEKGKAYTNYFGRCNVAEHEKLILLAQLKPEKDSDEAVTYSLGKFGQRALDFYSIHVTKESTHPVKPLAQIAGNRYASPVGKALSDACMGTIASFLSKYQDIIIEHQKVVKGNQKRLESLRELAGKENLEYPSVTLPPQPHTKEGVDAYNEVIARVRMWVNLNLWQKLKLSRDDAKPLLRLKGFPSFPLVERQANEVDWWDMVCNVKKLINEKKEDGKVFWQNLAGYKRQEALRPYLSSEEDRKKGKKFARYQLGDLLLHLEKKHGEDWGKVYDEAWERIDKKVEGLSKHIKLEEERRSEDAQSKAALTDWLRAKASFVIEGSKEADKDEFCRCELKLQKWYGDLRGKPFAIEAENSILDISGFSKQYNCAFIWQKDGVKKLNLYLIINYFKGGKLRFKKIKPEAFEANRFYTVINKKSGEIVPMEVNFNFDDPNLIILPLAFGKRQGREFIWNDLLSLETGSLKLANGRVIEKTLYNRRTRQDEPALFVALTFERREVLDSSNIKPMNLIGVDRGENIPAVIALTDPEGCPLSRFKDSLGNPTHILRIGESYKEKQRTIQAKKEVEQRRAGGYSRKYASKAKNLADDMVRNTARDLLYYAVTQDAMLIFENLSRGFGRQGKRTFMAERQYTRMEDWLTAKLAYEGLPSKTYLSKTLAQYTSKTCSNCGFTITSADYDRVLEKLKKTATGWMTTINGKELKVEGQITYYNRYKRQNVVKDLSVELDRLSEESVNNDISSWTKGRSGEALSLLKKRFSHRPVQEKFVCLNCGFETHADEQAALNIARSWLFLRSQEYKKYQTNKTTGNTDKRAFVETWQSFYRKKLKEVWKPAV

SEQ ID NO: 41722 - protein, 979 aa, synthetic construct
  REGION 1..979: note = engineered CasX variant
QEIKRANKIRRRLVKDSNTKKAGKTGPMKTLLVRVMTPDLRERLENLRKKPENIPQPISNTSRANLNKLLTDYTEMKKAILHVYWEEFQKDPVGLMSRVAQPASKKIDQNKLKPEMDEKGNLTTAGFACSQCGQPLFVYKLEQVSEKGKAYTNYFGRCNVAEHEKLILLAQLKPEKDSDEAVTYSLGKFGQRALDFYSIHVTKESTHPVKPLAQIAGNRYASYPVGKALSDACMGTIASFLSKYQDIIIEHQKVVKGNQKRLESLRELAGKENLEYPSVTLPPQPHTKEGVDAYNEVIARVRMWVNLNLWQKLKLSRDDAKPLLRLKGFPSFPLVERQANEVDWWDMVCNVKKLINEKKEDGKVFWQNLAGYKRQEALRPYLSSEEDRKKGKKFARYQLGDLLLHLEKKHGEDWGKVYDEAWERIDKKVEGLSKHIKLEEERRSEDAQSKAALTDWLRAKASFVIEGLKEADDKDEFCRCELKLQKWYGDLRGKPFAIEAENSILDISGFSKQYNCAFIWQKDGVKKLNLYLIINYFKGGKLRFKKIKPEAFEANRFYTVINKKSGEIVPMEVNFNFDDPNLIILPLAFGKRQGREFIWNDLLSLETGSLKLANGRVIEKTLYNRRTRQDEPALFVALTFERREVLDSSNIKPMNLIGVDRGENIPAVIALTDPEGCPLSRFKDSLGNPTHILRIGESYKEKQRTIQAKKEVEQRRAGGYSRKYASKAKNLADDMVRNTARDLLYYAVTQDAMLIFENLSRGFGRQGKRTFMAERQYTRMEDWLTAKLAYEGLPSKTYLSKTLAQYTSKTCSNCGFTITSADYDRVLEKLKKTATGWMTTINGKELKVEGQITYYNRYKRQNVVKDLSVELDRLSEESVNNDISSWTKGRSGEALSLLKKRFSHRPVQEKFVCLNCGFETHADEQAALNIARSWLFLRSQEYKKYQTNKTTGNTDKRAFVETWQSFYRKKLKEVWKPAV

SEQ ID NO: 41723 - protein, 979 aa, synthetic construct
  REGION 1..979: note = engineered CasX variant
QEIKRANKIRRRLVKDSNTKKAGKTGPMKTLLVRVMTPDLRERLENLRKKPENIPQPISNTSRANLNKLLTDYTEMKKAILHVYWEEFQKDPVGLMSRVAQPASKKIDQNKLKPEMDEKGNLTTAGFACSQCGQPLFVYKLEQVSEKGKAYTNYFGRCNVAEHEKLILLAQLKPEKDSDEAVTYSLGKFGQRALDFYSIHVTKESTHPVKPLAQIAGNRYASHPVGKALSDACMGTIASFLSKYQDIIIEHQKVVKGNQKRLESLRELAGKENLEYPSVTLPPQPHTKEGVDAYNEVIARVRMWVNLNLWQKLKLSRDDAKPLLRLKGFPSFPLVERQANEVDWWDMVCNVKKLINEKKEDGKVFWQNLAGYKRQEALRPYLSSEEDRKKGKKFARYQLGDLLLHLEKKHGEDWGKVYDEAWERIDKKVEGLSKHIKLEEERRSEDAQSKAALTDWLRAKASFVIEGLKEADDKDEFCRCELKLQKWYGDLRGKPFAIEAENSILDISGFSKQYNCAFIWQKDGVKKLNLYLIINYFKGGKLRFKKIKPEAFEANRFYTVINKKSGEIVPMEVNFNFDDPNLIILPLAFGKRQGREFIWNDLLSLETGSLKLANGRVIEKTLYNRRTRQDEPALFVALTFERREVLDSSNIKPMNLIGVDRGENIPAVIALTDPEGCPLSRFKDSLGNPTHILRIGESYKEKQRTIQAKKEVEQRRAGGYSRKYASKAKNLADDMVRNTARDLLYYAVTQDAMLIFENLSRGFGRQGKRTFMAERQYTRMEDWLTAKLAYEGLPSKTYLSKTLAQYTSKTCSNCGFTITSADYDRVLEKLKKTATGWMTTINGKELKVEGQITYYNRYKRQNVVKDLSVELDRLSEESVNNDISSWTKGRSGEALSLLKKRFSHRPVQEKFVCLNCGFETHADEQAALNIARSWLFLRSQEYKKYQTNKTTGNTDKRAFVETWQSFYRKKLKEVWKPAV

SEQ ID NO: 41724 - protein, 979 aa, synthetic construct
  REGION 1..979: note = engineered CasX variant
QEIKRANKIRRRLVKDSNTKKAGKTGPMKTLLVRVMTPDLRERLENLRKKPENIPQPISNTSRANLNKLLTDYTEMKKAILHVYWEEFQKDPVGLMSRVAQPASKKIDQNKLKPEMDEKGNLTTAGFACSQCGQPLFVYKLEQVSEKGKAYTNYFGRCNVAEHEKLILLAQLKPEKDSDEAVTYSLGKFGQRALDFYSIHVTKESTHPVKPLAQIAGNRYASSPVGKALSDACMGTIASFLSKYQDIIIEHQKVVKGNQKRLESLRELAGKENLEYPSVTLPPQPHTKEGVDAYNEVIARVRMWVNLNLWQKLKLSRDDAKPLLRLKGFPSFPLVERQANEVDWWDMVCNVKKLINEKKEDGKVFWQNLAGYKRQEALRPYLSSEEDRKKGKKFARYQLGDLLLHLEKKHGEDWGKVYDEAWERIDKKVEGLSKHIKLEEERRSEDAQSKAALTDWLRAKASFVIEGLKEADDKDEFCRCELKLQKWYGDLRGKPFAIEAENSILDISGFSKQYNCAFIWQKDGVKKLNLYLIINYFKGGKLRFKKIKPEAFEANRFYTVINKKSGEIVPMEVNFNFDDPNLIILPLAFGKRQGREFIWNDLLSLETGSLKLANGRVIEKTLYNRRTRQDEPALFVALTFERREVLDSSNIKPMNLIGVDRGENIPAVIALTDPEGCPLSRFKDSLGNPTHILRIGESYKEKQRTIQAKKEVEQRRAGGYSRKYASKAKNLADDMVRNTARDLLYYAVTQDAMLIFENLSRGFGRQGKRTFMAERQYTRMEDWLTAKLAYEGLPSKTYLSKTLAQYTSKTCSNCGFTITSADYDRVLEKLKKTATGWMTTINGKELKVEGQITYYNRYKRQNVVKDLSVELDRLSEESVNNDISSWTKGRSGEALSLLKKRFSHRPVQEKFVCLNCGFETHADEQAALNIARSWLFLRSQEYKKYQTNKTTGNTDKRAFVETWQSFYRKKLKEVWKPAV

SEQ ID NO: 41725 - protein, 979 aa, synthetic construct
  REGION 1..979: note = engineered CasX variant
QEIKRANKIRRRLVKDSNTKKAGKTGPMKTLLVRVMTPDLRERLENLRKKPENIPQPISNTSRANLNKLLTDYTEMKKAILHVYWEEFQKDPVGLMSRVAQPASKKIDQNKLKPEMDEKGNLTTAGFACSQCGQPLFVYKLEQVSEKGKAYTNYFGRCNVAEHEKLILLAQLKPEKDSDEAVTYSLGKFGQRALDFYSIHVTKESTHPVKPLAQIAGNRYASTPVGKALSDACMGTIASFLSKYQDIIIEHQKVVKGNQKRLESLRELAGKENLEYPSVTLPPQPHTKEGVDAYNEVIARVRMWVNLNLWQKLKLSRDDAKPLLRLKGFPSFPLVERQANEVDWWDMVCNVKKLINEKKEDGKVFWQNLAGYKRQEALRPYLSSEEDRKKGKKFARYQLGDLLLHLEKKHGEDWGKVYDEAWERIDKKVEGLSKHIKLEEERRSEDAQSKAALTDWLRAKASFVIEGLKEADDKDEFCRCELKLQKWYGDLRGKPFAIEAENSILDISGFSKQYNCAFIWQKDGVKKLNLYLIINYFKGGKLRFKKIKPEAFEANRFYTVINKKSGEIVPMEVNFNFDDPNLIILPLAFGKRQGREFIWNDLLSLETGSLKLANGRVIEKTLYNRRTRQDEPALFVALTFERREVLDSSNIKPMNLIGVDRGENIPAVIALTDPEGCPLSRFKDSLGNPTHILRIGESYKEKQRTIQAKKEVEQRRAGGYSRKYASKAKNLADDMVRNTARDLLYYAVTQDAMLIFENLSRGFGRQGKRTFMAERQYTRMEDWLTAKLAYEGLPSKTYLSKTLAQYTSKTCSNCGFTITSADYDRVLEKLKKTATGWMTTINGKELKVEGQITYYNRYKRQNVVKDLSVELDRLSEESVNNDISSWTKGRSGEALSLLKKRFSHRPVQEKFVCLNCGFETHADEQAALNIARSWLFLRSQEYKKYQTNKTTGNTDKRAFVETWQSFYRKKLKEVWKPAV

SEQ ID NO: 41726 - protein, 979 aa, synthetic construct
  REGION 1..979: note = engineered CasX variant
QEIKRANKIRRRLVKDSNTKKAGKTGPMKTLLVRVMTPDLRERLENLRKKPENIPQPISNTSRANLNKLLTDYTEMKKAILHVYWEEFQKDPVGLMSRVAQPASKKIDQNKLKPEMDEKGNLTTAGFACSQCGQPLFVYKLEQVSEKGKAYTNYFGRCNVAEHEKLILLAQLKPEKDSDEAVTYSLGKFGQRALDFYSIHVTKESTHPVKPLAQIAGNRYASAPVGKALSDACMGTIASFLSKYQDIIIEHQKVVKGNQKRLESLRELAGKENLEYPSVTLPPQPHTKEGVDAYNEVIARVRMWVNLNLWQKLKLSRDDAKPLLRLKGFPSFPLVERQANEVDWWDMVCNVKKLINEKKEDGKVFWQNLAGYKRQEALRPYLSSEEDRKKGKKFARYQLGDLLLHLEKKHGEDWGKVYDEAWERIDKKVEGLSKHIKLEEERRSEDAQSKAALTDWLRAKASFVIEGLKEADDKDEFCRCELKLQKWYGDLRGKPFAIEAENSILDISGFSKQYNCAFIWQKDGVKKLNLYLIINYFKGGKLRFKKIKPEAFEANRFYTVINKKSGEIVPMEVNFNFDDPNLIILPLAFGKRQGREFIWNDLLSLETGSLKLANGRVIEKTLYNRRTRQDEPALFVALTFERREVLDSSNIKPMNLIGVDRGENIPAVIALTDPEGCPLSRFKDSLGNPTHILRIGESYKEKQRTIQAKKEVEQRRAGGYSRKYASKAKNLADDMVRNTARDLLYYAVTQDAMLIFENLSRGFGRQGKRTFMAERQYTRMEDWLTAKLAYEGLPSKTYLSKTLAQYTSKTCSNCGFTITSADYDRVLEKLKKTATGWMTTINGKELKVEGQITYYNRYKRQNVVKDLSVELDRLSEESVNNDISSWTKGRSGEALSLLKKRFSHRPVQEKFVCLNCGFETHADEQAALNIARSWLFLRSQEYKKYQTNKTTGNTDKRAFVETWQSFYRKKLKEVWKPAV

SEQ ID NO: 41727 - protein, 979 aa, synthetic construct
  REGION 1..979: note = engineered CasX variant
QEIKRANKIRRRLVKDSNTKKAGKTGPMKTLLVRVMTPDLRERLENLRKKPENIPQPISNTSRANLNKLLTDYTEMKKAILHVYWEEFQKDPVGLMSRVAQPASKKIDQNKLKPEMDEKGNLTTAGFACSQCGQPLFVYKLEQVSEKGKAYTNYFGRCNVAEHEKLILLAQLKPEKDSDEAVTYSLGKFGQRALDFYSIHVTKESTHPVKPLAQIAGNRYASVPVGKALSDACMGTIASFLSKYQDIIIEHQKVVKGNQKRLESLRELAGKENLEYPSVTLPPQPHTKEGVDAYNEVIARVRMWVNLNLWQKLKLSRDDAKPLLRLKGFPSFPLVERQANEVDWWDMVCNVKKLINEKKEDGKVFWQNLAGYKRQEALRPYLSSEEDRKKGKKFARYQLGDLLLHLEKKHGEDWGKVYDEAWERIDKKVEGLSKHIKLEEERRSEDAQSKAALTDWLRAKASFVIEGLKEADDKDEFCRCELKLQKWYGDLRGKPFAIEAENSILDISGFSKQYNCAFIWQKDGVKKLNLYLIINYFKGGKLRFKKIKPEAFEANRFYTVINKKSGEIVPMEVNFNFDDPNLIILPLAFGKRQGREFIWNDLLSLETGSLKLANGRVIEKTLYNRRTRQDEPALFVALTFERREVLDSSNIKPMNLIGVDRGENIPAVIALTDPEGCPLSRFKDSLGNPTHILRIGESYKEKQRTIQAKKEVEQRRAGGYSRKYASKAKNLADDMVRNTARDLLYYAVTQDAMLIFENLSRGFGRQGKRTFMAERQYTRMEDWLTAKLAYEGLPSKTYLSKTLAQYTSKTCSNCGFTITSADYDRVLEKLKKTATGWMTTINGKELKVEGQITYYNRYKRQNVVKDLSVELDRLSEESVNNDISSWTKGRSGEALSLLKKRFSHRPVQEKFVCLNCGFETHADEQAALNIARSWLFLRSQEYKKYQTNKTTGNTDKRAFVETWQSFYRKKLKEVWKPAV

SEQ ID NO: 41728 - protein, 979 aa, synthetic construct
  REGION 1..979: note = engineered CasX variant
QEIKRANKIRRRLVKDSNTKKAGKTGPMKTLLVRVMTPDLRERLENLRKKPENIPQPISNTSRANLNKLLTDYTEMKKAILHVYWEEFQKDPVGLMSRVAQPASKKIDQNKLKPEMDEKGNLTTAGFACSQCGQPLFVYKLEQVSEKGKAYTNYFGRCNVAEHEKLIKLAQLKPEKDSDEAVTYSLGKFGQRALDFYSIHVTKESTHPVKPLAQIAGNRYASGPVGKALSDACMGTIASFLSKYQDIIIEHQKVVKGNQKRLESLRELAGKENLEYPSVTLPPQPHTKEGVDAYNEVIARVRMWVNLNLWQKLKLSRDDAKPLLRLKGFPSFPLVERQANEVDWWDMVCNVKKLINEKKEDGKVFWQNLAGYKRQEALRPYLSSEEDRKKGKKFARYQLGDLLLHLEKKHGEDWGKVYDEAWERIDKKVEGLSKHIKLEEERRSEDAQSKAALTDWLRAKASFVIEGLKEADDKDEFCRCELKLQKWYGDLRGKPFAIEAENSILDISGFSKQYNCAFIWQKDGVKKLNLYLIINYFKGGKLRFKKIKPEAFEANRFYTVINKKSGEIVPMEVNFNFDDPNLIILPLAFGKRQGREFIWNDLLSLETGSLKLANGRVIEKTLYNRRTRQDEPALFVALTFERREVLDSSNIKPMNLIGVDRGENIPAVIALTDPEGCPLSRFKDSLGNPTHILRIGESYKEKQRTIQAKKEVEQRRAGGYSRKYASKAKNLADDMVRNTARDLLYYAVTQDAMLIFENLSRGFGRQGKRTFMAERQYTRMEDWLTAKLAYEGLPSKTYLSKTLAQYTSKTCSNCGFTITSADYDRVLEKLKKTATGWMTTINGKELKVEGQITYYNRYKRQNVVKDLSVELDRLSEESVNNDISSWTKGRSGEALSLLKKRFSHRPVQEKFVCLNCGFETHADEQAALNIARSWLFLRSQEYKKYQTNKTTGNTDKRAFVETWQSFYRKKLKEVWKPAV

SEQ ID NO: 41729 - protein, 978 aa, synthetic construct
  REGION 1..978: note = engineered CasX variant
QEIKRANKIRRRLVKDSNTKKAGKTGPMKTLLVRVMTPDLRERLENLRKKPENIPQPISNTSRANLNKLLTDYTEMKKAILHVYWEEFQKDPVGLMSRVAQPASKKIDQNKLKPEMDEKGNLTTAGFACSQCGQPLFVYKLEQVSEKGKAYTNYFGRCNVAEHEKLILLAQLKPEKDSDEAVTYSLGKFGQRALDFYSIHVTKESTHPVKPLAQIAGNRYASPVGKALSDACMGTIASFLSKYQDIIIEHQKVVKGNQKRLESLRELAGKENLEYPSVTLPPQPHTKEGVDAYNEVIARVRMWVNLNLWQKLKLSRDDAKPLLRLKGFPSFPLVERQANEVDWWDMVCNVKKLINEKKEDGKVFWQNLAGYKRQEALRPYLSSEEDRKKGKKFARYQLGDLLLHLEKKHGEDWGKVYDEAWERIDKKVEGLSKHIKLEEERRSEDAQSKAALTDWLRAKASFVIEGLKEADDKDEFCRCELKLQKWYGDLRGKPFAIEAENSILDISGFSKQYNCAFIWQKDGVKKLNLYLIINYFKGGKLRFKKIKPEAFEANRFYTVINKKSGEIVPMEVNFNFDDPNLIILPLAFGKRQGREFIWNDLLSLETGSLKLANGRVIEKTLYNRRTRQDEPALFVALTFERREVLDSSNIKPMNLIGVDRGENIPAVIALTDPEGCPLSRFKDSLGNPTHILRIGESYKEKQRTIQAKKEVEQRRAGGYSRKYASKAKNLADDMVRNTARDLLYYAVTQDAMLIFENLSRGFGRQGKRTFMAERQYTRMEDWLTAKLAYEGLPSKTYLSKTLAQYTSKTCSNCGFTITSADYDRVLEKLKKTATGWMTTINGKELKVEGQITYYNRYKRQNVVKDLSVELDRLSEESVNNDISSWTKGRSGEALSLLKKRFSHRPVQEKFVCLNCGFETHADEQAALNIARSWLFLRSQEYKKYQTNKTTGNTDKRAFVETWQSFYRKKLKEVWKPAV

SEQ ID NO: 41730 - protein, 979 aa, synthetic construct
  REGION 1..979: note = engineered CasX variant
QEIKRANKIRRRLVKDSNTKKAGKTGPMKTLLVRVMTPDLRERLENLRKKPENIPQPISNTSRANLNKLLTDYTEMKKAILHVYWEEFQKDPVGLMSRVAQPASKKIDQNKLKPEMDEKGNLTTAGFACSQCGQPLFVYKLEQVSEKGKAYTNYFGRCNVAEHEKLILLAQLKPEKDSDEAVTYSLGKFGQRALDFYSIHVTKESTHPVKPLAQIAGNRYASYPVGKALSDACMGTIASFLSKYQDIIIEHQKVVKGNQKRLESLRELAGKENLEYPSVTLPPQPHTKEGVDAYNEVIARVRMWVNLNLWQKLKLSRDDAKPLLRLKGFPSFPLVERQANEVDWWDMVCNVKKLINEKKEDGKVFWQNLAGYKRQEALRPYLSSEEDRKKGKKFARYQLGDLLLHLEKKHGEDWGKVYDEAWERIDKKVEGLSKHIKLEEERRSEDAQSKAALTDWLRAKASFVIEGLKEADKDEFCRCELKLQKWYGDLRGKPFAIEAENSILDISGFSKQYNCAFIWQKDGVKKLNLYLIINYFKGGKLRFKKIKPEAFEANRFYTVINKKSGEIVPMEVNFNFDDPNLIILPLAFGKRQGREFIWNDLLSLETGSLKLANGRVIEKTLYNRRTRQDEPALFVALTFERREVLDSSNIKPMNLIGVDRGENIPAVIALTDPEGCPLSRFKDSLGNPTHILRIGESYKEKQRTIQAKKEVEQRRAGGYSRKYASKAKNLADDMVRNTARDLLYYAVTQDAMLIFENLSRGFGRQGKRTFMAERQYTRMEDWLTAKLAYEGLPSKTYLSKTLAQYTSKTCSNCGFTITSADYDRVLEKLKKTATGWMTTINGKELKVEGQITYYNRYKRQNVVKDLSVELDRLSEESVNNDISSWTKGRSGNEALSLLKKRFSHRPVQEKFVCLNCGFETHADEQAALNIARSWLFLRSQEYKKYQTNKTTGNTDKRAFVETWQSFYRKKLKEVWKPAV

SEQ ID NO: 41731 - protein, 979 aa, synthetic construct
  REGION 1..979: note = engineered CasX variant
QEIKRANKIRRRLVKDSNTKKAGKTGPMKTLLVRVMTPDLRERLENLRKKPENIPQPISNTSRANLNKLLTDYTEMKKAILHVYWEEFQKDPVGLMSRVAQPASKKIDQNKLKPEMDEKGNLTTAGFACSQCGQPLFVYKLEQVSEKGKAYTNYFGRCNVAEHEKLILLAQLKPEKDSDEAVTYSLGKFGQRALDFYSIHVTKESTHPVKPLAQIAGNRYASHPVGKALSDACMGTIASFLSKYQDIIIEHQKVVKGNQKRLESLRELAGKENLEYPSVTLPPQPHTKEGVDAYNEVIARVRMWVNLNLWQKLKLSRDDAKPLLRLKGFPSFPLVERQANEVDWWDMVCNVKKLINEKKEDGKVFWQNLAGYKRQEALRPYLSSEEDRKKGKKFARYQLGDLLLHLEKKHGEDWGKVYDEAWERIDKKVEGLSKHIKLEEERRSEDAQSKAALTDWLRAKASFVIEGLKEADKDEFCRCELKLQKWYGDLRGKPFAIEAENSILDISGFSKQYNCAFIWQKDGVKKLNLYLIINYFKGGKLRFKKIKPEAFEANRFYTVINKKSGEIVPMEVNFNFDDPNLIILPLAFGKRQGREFIWNDLLSLETGSLKLANGRVIEKTLYNRRTRQDEPALFVALTFERREVLDSSNIKPMNLIGVDRGENIPAVIALTDPEGCPLSRFKDSLGNPTHILRIGESYKEKQRTIQAKKEVEQRRAGGYSRKYASKAKNLADDMVRNTARDLLYYAVTQDAMLIFENLSRGFGRQGKRTFMAERQYTRMEDWLTAKLAYEGLPSKTYLSKTLAQYTSKTCSNCGFTITSADYDRVLEKLKKTATGWMTTINGKELKVEGQITYYNRYKRQNVVKDLSVELDRLSEESVNNDISSWTKGRSGNEALSLLKKRFSHRPVQEKFVCLNCGFETHADEQAALNIARSWLFLRSQEYKKYQTNKTTGNTDKRAFVETWQSFYRKKLKEVWKPAV

SEQ ID NO: 41732 - protein, 979 aa, synthetic construct
  REGION 1..979: note = engineered CasX variant
QEIKRANKIRRRLVKDSNTKKAGKTGPMKTLLVRVMTPDLRERLENLRKKPENIPQPISNTSRANLNKLLTDYTEMKKAILHVYWEEFQKDPVGLMSRVAQPASKKIDQNKLKPEMDEKGNLTTAGFACSQCGQPLFVYKLEQVSEKGKAYTNYFGRCNVAEHEKLILLAQLKPEKDSDEAVTYSLGKFGQRALDFYSIHVTKESTHPVKPLAQIAGNRYASSPVGKALSDACMGTIASFLSKYQDIIIEHQKVVKGNQKRLESLRELAGKENLEYPSVTLPPQPHTKEGVDAYNEVIARVRMWVNLNLWQKLKLSRDDAKPLLRLKGFPSFPLVERQANEVDWWDMVCNVKKLINEKKEDGKVFWQNLAGYKRQEALRPYLSSEEDRKKGKKFARYQLGDLLLHLEKKHGEDWGKVYDEAWERIDKKVEGLSKHIKLEEERRSEDAQSKAALTDWLRAKASFVIEGLKEADKDEFCRCELKLQKWYGDLRGKPFAIEAENSILDISGFSKQYNCAFIWQKDGVKKLNLYLIINYFKGGKLRFKKIKPEAFEANRFYTVINKKSGEIVPMEVNFNFDDPNLIILPLAFGKRQGREFIWNDLLSLETGSLKLANGRVIEKTLYNRRTRQDEPALFVALTFERREVLDSSNIKPMNLIGVDRGENIPAVIALTDPEGCPLSRFKDSLGNPTHILRIGESYKEKQRTIQAKKEVEQRRAGGYSRKYASKAKNLADDMVRNTARDLLYYAVTQDAMLIFENLSRGFGRQGKRTFMAERQYTRMEDWLTAKLAYEGLPSKTYLSKTLAQYTSKTCSNCGFTITSADYDRVLEKLKKTATGWMTTINGKELKVEGQITYYNRYKRQNVVKDLSVELDRLSEESVNNDISSWTKGRSGNEALSLLKKRFSHRPVQEKFVCLNCGFETHADEQAALNIARSWLFLRSQEYKKYQTNKTTGNTDKRAFVETWQSFYRKKLKEVWKPAV

SEQ ID NO: 41733 - protein, 979 aa, synthetic construct
  REGION 1..979: note = engineered CasX variant
QEIKRANKIRRRLVKDSNTKKAGKTGPMKTLLVRVMTPDLRERLENLRKKPENIPQPISNTSRANLNKLLTDYTEMKKAILHVYWEEFQKDPVGLMSRVAQPASKKIDQNKLKPEMDEKGNLTTAGFACSQCGQPLFVYKLEQVSEKGKAYTNYFGRCNVAEHEKLILLAQLKPEKDSDEAVTYSLGKFGQRALDFYSIHVTKESTHPVKPLAQIAGNRYASTPVGKALSDACMGTIASFLSKYQDIIIEHQKVVKGNQKRLESLRELAGKENLEYPSVTLPPQPHTKEGVDAYNEVIARVRMWVNLNLWQKLKLSRDDAKPLLRLKGFPSFPLVERQANEVDWWDMVCNVKKLINEKKEDGKVFWQNLAGYKRQEALRPYLSSEEDRKKGKKFARYQLGDLLLHLEKKHGEDWGKVYDEAWERIDKKVEGLSKHIKLEEERRSEDAQSKAALTDWLRAKASFVIEGLKEADKDEFCRCELKLQKWYGDLRGKPFAIEAENSILDISGFSKQYNCAFIWQKDGVKKLNLYLIINYFKGGKLRFKKIKPEAFEANRFYTVINKKSGEIVPMEVNFNFDDPNLIILPLAFGKRQGREFIWNDLLSLETGSLKLANGRVIEKTLYNRRTRQDEPALFVALTFERREVLDSSNIKPMNLIGVDRGENIPAVIALTDPEGCPLSRFKDSLGNPTHILRIGESYKEKQRTIQAKKEVEQRRAGGYSRKYASKAKNLADDMVRNTARDLLYYAVTQDAMLIFENLSRGFGRQGKRTFMAERQYTRMEDWLTAKLAYEGLPSKTYLSKTLAQYTSKTCSNCGFTITSADYDRVLEKLKKTATGWMTTINGKELKVEGQITYYNRYKRQNVVKDLSVELDRLSEESVNNDISSWTKGRSGNEALSLLKKRFSHRPVQEKFVCLNCGFETHADEQAALNIARSWLFLRSQEYKKYQTNKTTGNTDKRAFVETWQSFYRKKLKEVWKPAV

SEQ ID NO: 41734 - protein, 979 aa, synthetic construct
  REGION 1..979: note = engineered CasX variant
QEIKRANKIRRRLVKDSNTKKAGKTGPMKTLLVRVMTPDLRERLENLRKKPENIPQPISNTSRANLNKLLTDYTEMKKAILHVYWEEFQKDPVGLMSRVAQPASKKIDQNKLKPEMDEKGNLTTAGFACSQCGQPLFVYKLEQVSEKGKAYTNYFGRCNVAEHEKLILLAQLKPEKDSDEAVTYSLGKFGQRALDFYSIHVTKESTHPVKPLAQIAGNRYASAPVGKALSDACMGTIASFLSKYQDIIIEHQKVVKGNQKRLESLRELAGKENLEYPSVTLPPQPHTKEGVDAYNEVIARVRMWVNLNLWQKLKLSRDDAKPLLRLKGFPSFPLVERQANEVDWWDMVCNVKKLINEKKEDGKVFWQNLAGYKRQEALRPYLSSEEDRKKGKKFARYQLGDLLLHLEKKHGEDWGKVYDEAWERIDKKVEGLSKHIKLEEERRSEDAQSKAALTDWLRAKASFVIEGLKEADKDEFCRCELKLQKWYGDLRGKPFAIEAENSILDISGFSKQYNCAFIWQKDGVKKLNLYLIINYFKGGKLRFKKIKPEAFEANRFYTVINKKSGEIVPMEVNFNFDDPNLIILPLAFGKRQGREFIWNDLLSLETGSLKLANGRVIEKTLYNRRTRQDEPALFVALTFERREVLDSSNIKPMNLIGVDRGENIPAVIALTDPEGCPLSRFKDSLGNPTHILRIGESYKEKQRTIQAKKEVEQRRAGGYSRKYASKAKNLADDMVRNTARDLLYYAVTQDAMLIFENLSRGFGRQGKRTFMAERQYTRMEDWLTAKLAYEGLPSKTYLSKTLAQYTSKTCSNCGFTITSADYDRVLEKLKKTATGWMTTINGKELKVEGQITYYNRYKRQNVVKDLSVELDRLSEESVNNDISSWTKGRSGNEALSLLKKRFSHRPVQEKFVCLNCGFETHADEQAALNIARSWLFLRSQEYKKYQTNKTTGNTDKRAFVETWQSFYRKKLKEVWKPAV

SEQ ID NO: 41735 - protein, 979 aa, synthetic construct
  REGION 1..979: note = engineered CasX variant
QEIKRANKIRRRLVKDSNTKKAGKTGPMKTLLVRVMTPDLRERLENLRKKPENIPQPISNTSRANLNKLLTDYTEMKKAILHVYWEEFQKDPVGLMSRVAQPASKKIDQNKLKPEMDEKGNLTTAGFACSQCGQPLFVYKLEQVSEKGKAYTNYFGRCNVAEHEKLILLAQLKPEKDSDEAVTYSLGKFGQRALDFYSIHVTKESTHPVKPLAQIAGNRYASVPVGKALSDACMGTIASFLSKYQDIIIEHQKVVKGNQKRLESLRELAGKENLEYPSVTLPPQPHTKEGVDAYNEVIARVRMWVNLNLWQKLKLSRDDAKPLLRLKGFPSFPLVERQANEVDWWDMVCNVKKLINEKKEDGKVFWQNLAGYKRQEALRPYLSSEEDRKKGKKFARYQLGDLLLHLEKKHGEDWGKVYDEAWERIDKKVEGLSKHIKLEEERRSEDAQSKAALTDWLRAKASFVIEGLKEADKDEFCRCELKLQKWYGDLRGKPFAIEAENSILDISGFSKQYNCAFIWQKDGVKKLNLYLIINYFKGGKLRFKKIKPEAFEANRFYTVINKKSGEIVPMEVNFNFDDPNLIILPLAFGKRQGREFIWNDLLSLETGSLKLANGRVIEKTLYNRRTRQDEPALFVALTFERREVLDSSNIKPMNLIGVDRGENIPAVIALTDPEGCPLSRFKDSLGNPTHILRIGESYKEKQRTIQAKKEVEQRRAGGYSRKYASKAKNLADDMVRNTARDLLYYAVTQDAMLIFENLSRGFGRQGKRTFMAERQYTRMEDWLTAKLAYEGLPSKTYLSKTLAQYTSKTCSNCGFTITSADYDRVLEKLKKTATGWMTTINGKELKVEGQITYYNRYKRQNVVKDLSVELDRLSEESVNNDISSWTKGRSGNEALSLLKKRFSHRPVQEKFVCLNCGFETHADEQAALNIARSWLFLRSQEYKKYQTNKTTGNTDKRAFVETWQSFYRKKLKEVWKPAV

SEQ ID NO: 41736 - protein, 979 aa, synthetic construct
  REGION 1..979: note = engineered CasX variant
QEIKRANKIRRRLVKDSNTKKAGKTGPMKTLLVRVMTPDLRERLENLRKKPENIPQPISNTSRANLNKLLTDYTEMKKAILHVYWEEFQKDPVGLMSRVAQPASKKIDQNKLKPEMDEKGNLTTAGFACSQCGQPLFVYKLEQVSEKGKAYTNYFGRCNVAEHEKLIKLAQLKPEKDSDEAVTYSLGKFGQRALDFYSIHVTKESTHPVKPLAQIAGNRYASGPVGKALSDACMGTIASFLSKYQDIIIEHQKVVKGNQKRLESLRELAGKENLEYPSVTLPPQPHTKEGVDAYNEVIARVRMWVNLNLWQKLKLSRDDAKPLLRLKGFPSFPLVERQANEVDWWDMVCNVKKLINEKKEDGKVFWQNLAGYKRQEALRPYLSSEEDRKKGKKFARYQLGDLLLHLEKKHGEDWGKVYDEAWERIDKKVEGLSKHIKLEEERRSEDAQSKAALTDWLRAKASFVIEGLKEADKDEFCRCELKLQKWYGDLRGKPFAIEAENSILDISGFSKQYNCAFIWQKDGVKKLNLYLIINYFKGGKLRFKKIKPEAFEANRFYTVINKKSGEIVPMEVNFNFDDPNLIILPLAFGKRQGREFIWNDLLSLETGSLKLANGRVIEKTLYNRRTRQDEPALFVALTFERREVLDSSNIKPMNLIGVDRGENIPAVIALTDPEGCPLSRFKDSLGNPTHILRIGESYKEKQRTIQAKKEVEQRRAGGYSRKYASKAKNLADDMVRNTARDLLYYAVTQDAMLIFENLSRGFGRQGKRTFMAERQYTRMEDWLTAKLAYEGLPSKTYLSKTLAQYTSKTCSNCGFTITSADYDRVLEKLKKTATGWMTTINGKELKVEGQITYYNRYKRQNVVKDLSVELDRLSEESVNNDISSWTKGRSGNEALSLLKKRFSHRPVQEKFVCLNCGFETHADEQAALNIARSWLFLRSQEYKKYQTNKTTGNTDKRAFVETWQSFYRKKLKEVWKPAV

SEQ ID NO: 41737 - protein, 978 aa, synthetic construct
  REGION 1..978: note = engineered CasX variant
QEIKRANKIRRRLVKDSNTKKAGKTGPMKTLLVRVMTPDLRERLENLRKKPENIPQPISNTSRANLNKLLTDYTEMKKAILHVYWEEFQKDPVGLMSRVAQPASKKIDQNKLKPEMDEKGNLTTAGFACSQCGQPLFVYKLEQVSEKGKAYTNYFGRCNVAEHEKLILLAQLKPEKDSDEAVTYSLGKFGQRALDFYSIHVTKESTHPVKPLAQIAGNRYASPVGKALSDACMGTIASFLSKYQDIIIEHQKVVKGNQKRLESLRELAGKENLEYPSVTLPPQPHTKEGVDAYNEVIARVRMWVNLNLWQKLKLSRDDAKPLLRLKGFPSFPLVERQANEVDWWDMVCNVKKLINEKKEDGKVFWQNLAGYKRQEALRPYLSSEEDRKKGKKFARYQLGDLLLHLEKKHGEDWGKVYDEAWERIDKKVEGLSKHIKLEEERRSEDAQSKAALTDWLRAKASFVIEGLKEADKDEFCRCELKLQKWYGDLRGKPFAIEAENSILDISGFSKQYNCAFIWQKDGVKKLNLYLIINYFKGGKLRFKKIKPEAFEANRFYTVINKKSGEIVPMEVNFNFDDPNLIILPLAFGKRQGREFIWNDLLSLETGSLKLANGRVIEKTLYNRRTRQDEPALFVALTFERREVLDSSNIKPMNLIGVDRGENIPAVIALTDPEGCPLSRFKDSLGNPTHILRIGESYKEKQRTIQAKKEVEQRRAGGYSRKYASKAKNLADDMVRNTARDLLYYAVTQDAMLIFENLSRGFGRQGKRTFMAERQYTRMEDWLTAKLAYEGLPSKTYLSKTLAQYTSKTCSNCGFTITSADYDRVLEKLKKTATGWMTTINGKELKVEGQITYYNRYKRQNVVKDLSVELDRLSEESVNNDISSWTKGRSGNEALSLLKKRFSHRPVQEKFVCLNCGFETHADEQAALNIARSWLFLRSQEYKKYQTNKTTGNTDKRAFVETWQSFYRKKLKEVWKPAV

SEQ ID NO: 41738 - protein, 978 aa, synthetic construct
  REGION 1..978: note = engineered CasX variant
QEIKRANKIRRRLVKDSNTKKAGKTGPMKTLLVRVMTPDLRERLENLRKKPENIPQPISNTSRANLNKLLTDYTEMKKAILHVYWEEFQKDPVGLMSRVAQPASKKIDQNKLKPEMDEKGNLTTAGFACSQCGQPLFVYKLEQVSEKGKAYTNYFGRCNVAEHEKLILLAQLKPEKDSDEAVTYSLGKFGQRALDFYSIHVTKESTHPVKPLAQIAGNRYASYPVGKALSDACMGTIASFLSKYQDIIIEHQKVVKGNQKRLESLRELAGKENLEYPSVTLPPQPHTKEGVDAYNEVIARVRMWVNLNLWQKLKLSRDDAKPLLRLKGFPSFPLVERQANEVDWWDMVCNVKKLINEKKEDGKVFWQNLAGYKRQEALRPYLSSEEDRQKGKKFARYQLGDLLLHLEKKHGEDWGKVYDEAWERIDKKVEGLSKHIKLEEERRSEDAQSKAALTDWLRAKASFVIEGLKEADKDEFCRCELKLQKWYGDLRGKPFAIEAENSILDISGFSKQYNCAFIWQKDGVKKLNLYLIINYFKGGKLRFKKIKPEAFEANRFYTVINKKSGEIVPMEVNFNFDDPNLIILPLAFGKRQGREFIWNDLLSLETGSLKLANGRVIEKTLYNRRTRQDEPALFVALTFERREVLDSSNIKPMNLIGVDRGENIPAVIALTDPEGCPLSRFKDSLGNPTHILRIGESYKEKQRTIQAKKEVEQRRAGGYSRKYASKAKNLADDMVRNTARDLLYYAVTQDAMLIFENLSRGFGRQGKRTFMAERQYTRMEDWLTAKLAYEGLPSKTYLSKTLAQYTSKTCSNCGFTITSADYDRVLEKLKKTATGWMTTINGKELKVEGQITYYNRYKRQNVVKDLSVELDRLSEESVNNDISSWTKGRSGEALSLLKKRFSHRPVQEKFVCLNCGFETHADEQAALNIARSWLFLRSQEYKKYQTNKTTGNTDKRAFVETWQSFYRKKLKEVWKPAV

SEQ ID NO: 41739 - protein, 978 aa, synthetic construct
  REGION 1..978: note = engineered CasX variant
QEIKRANKIRRRLVKDSNTKKAGKTGPMKTLLVRVMTPDLRERLENLRKKPENIPQPISNTSRANLNKLLTDYTEMKKAILHVYWEEFQKDPVGLMSRVAQPASKKIDQNKLKPEMDEKGNLTTAGFACSQCGQPLFVYKLEQVSEKGKAYTNYFGRCNVAEHEKLILLAQLKPEKDSDEAVTYSLGKFGQRALDFYSIHVTKESTHPVKPLAQIAGNRYASHPVGKALSDACMGTIASFLSKYQDIIIEHQKVVKGNQKRLESLRELAGKENLEYPSVTLPPQPHTKEGVDAYNEVIARVRMWVNLNLWQKLKLSRDDAKPLLRLKGFPSFPLVERQANEVDWWDMVCNVKKLINEKKEDGKVFWQNLAGYKRQEALRPYLSSEEDRQKGKKFARYQLGDLLLHLEKKHGEDWGKVYDEAWERIDKKVEGLSKHIKLEEERRSEDAQSKAALTDWLRAKASFVIEGLKEADKDEFCRCELKLQKWYGDLRGKPFAIEAENSILDISGFSKQYNCAFIWQKDGVKKLNLYLIINYFKGGKLRFKKIKPEAFEANRFYTVINKKSGEIVPMEVNFNFDDPNLIILPLAFGKRQGREFIWNDLLSLETGSLKLANGRVIEKTLYNRRTRQDEPALFVALTFERREVLDSSNIKPMNLIGVDRGENIPAVIALTDPEGCPLSRFKDSLGNPTHILRIGESYKEKQRTIQAKKEVEQRRAGGYSRKYASKAKNLADDMVRNTARDLLYYAVTQDAMLIFENLSRGFGRQGKRTFMAERQYTRMEDWLTAKLAYEGLPSKTYLSKTLAQYTSKTCSNCGFTITSADYDRVLEKLKKTATGWMTTINGKELKVEGQITYYNRYKRQNVVKDLSVELDRLSEESVNNDISSWTKGRSGEALSLLKKRFSHRPVQEKFVCLNCGFETHADEQAALNIARSWLFLRSQEYKKYQTNKTTGNTDKRAFVETWQSFYRKKLKEVWKPAV

SEQ ID NO: 41740 - protein, 978 aa, synthetic construct
  REGION 1..978: note = engineered CasX variant
QEIKRANKIRRRLVKDSNTKKAGKTGPMKTLLVRVMTPDLRERLENLRKKPENIPQPISNTSRANLNKLLTDYTEMKKAILHVYWEEFQKDPVGLMSRVAQPASKKIDQNKLKPEMDEKGNLTTAGFACSQCGQPLFVYKLEQVSEKGKAYTNYFGRCNVAEHEKLILLAQLKPEKDSDEAVTYSLGKFGQRALDFYSIHVTKESTHPVKPLAQIAGNRYASSPVGKALSDACMGTIASFLSKYQDIIIEHQKVVKGNQKRLESLRELAGKENLEYPSVTLPPQPHTKEGVDAYNEVIARVRMWVNLNLWQKLKLSRDDAKPLLRLKGFPSFPLVERQANEVDWWDMVCNVKKLINEKKEDGKVFWQNLAGYKRQEALRPYLSSEEDRQKGKKFARYQLGDLLLHLEKKHGEDWGKVYDEAWERIDKKVEGLSKHIKLEEERRSEDAQSKAALTDWLRAKASFVIEGLKEADKDEFCRCELKLQKWYGDLRGKPFAIEAENSILDISGFSKQYNCAFIWQKDGVKKLNLYLIINYFKGGKLRFKKIKPEAFEANRFYTVINKKSGEIVPMEVNFNFDDPNLIILPLAFGKRQGREFIWNDLLSLETGSLKLANGRVIEKTLYNRRTRQDEPALFVALTFERREVLDSSNIKPMNLIGVDRGENIPAVIALTDPEGCPLSRFKDSLGNPTHILRIGESYKEKQRTIQAKKEVEQRRAGGYSRKYASKAKNLADDMVRNTARDLLYYAVTQDAMLIFENLSRGFGRQGKRTFMAERQYTRMEDWLTAKLAYEGLPSKTYLSKTLAQYTSKTCSNCGFTITSADYDRVLEKLKKTATGWMTTINGKELKVEGQITYYNRYKRQNVVKDLSVELDRLSEESVNNDISSWTKGRSGEALSLLKKRFSHRPVQEKFVCLNCGFETHADEQAALNIARSWLFLRSQEYKKYQTNKTTGNTDKRAFVETWQSFYRKKLKEVWKPAV

SEQ ID NO: 41741 - protein, 978 aa, synthetic construct
  REGION 1..978: note = engineered CasX variant
QEIKRANKIRRRLVKDSNTKKAGKTGPMKTLLVRVMTPDLRERLENLRKKPENIPQPISNTSRANLNKLLTDYTEMKKAILHVYWEEFQKDPVGLMSRVAQPASKKIDQNKLKPEMDEKGNLTTAGFACSQCGQPLFVYKLEQVSEKGKAYTNYFGRCNVAEHEKLILLAQLKPEKDSDEAVTYSLGKFGQRALDFYSIHVTKESTHPVKPLAQIAGNRYASTPVGKALSDACMGTIASFLSKYQDIIIEHQKVVKGNQKRLESLRELAGKENLEYPSVTLPPQPHTKEGVDAYNEVIARVRMWVNLNLWQKLKLSRDDAKPLLRLKGFPSFPLVERQANEVDWWDMVCNVKKLINEKKEDGKVFWQNLAGYKRQEALRPYLSSEEDRQKGKKFARYQLGDLLLHLEKKHGEDWGKVYDEAWERIDKKVEGLSKHIKLEEERRSEDAQSKAALTDWLRAKASFVIEGLKEADKDEFCRCELKLQKWYGDLRGKPFAIEAENSILDISGFSKQYNCAFIWQKDGVKKLNLYLIINYFKGGKLRFKKIKPEAFEANRFYTVINKKSGEIVPMEVNFNFDDPNLIILPLAFGKRQGREFIWNDLLSLETGSLKLANGRVIEKTLYNRRTRQDEPALFVALTFERREVLDSSNIKPMNLIGVDRGENIPAVIALTDPEGCPLSRFKDSLGNPTHILRIGESYKEKQRTIQAKKEVEQRRAGGYSRKYASKAKNLADDMVRNTARDLLYYAVTQDAMLIFENLSRGFGRQGKRTFMAERQYTRMEDWLTAKLAYEGLPSKTYLSKTLAQYTSKTCSNCGFTITSADYDRVLEKLKKTATGWMTTINGKELKVEGQITYYNRYKRQNVVKDLSVELDRLSEESVNNDISSWTKGRSGEALSLLKKRFSHRPVQEKFVCLNCGFETHADEQAALNIARSWLFLRSQEYKKYQTNKTTGNTDKRAFVETWQSFYRKKLKEVWKPAV

SEQ ID NO: 41742 - protein, 978 aa, synthetic construct
  REGION 1..978: note = engineered CasX variant
QEIKRANKIRRRLVKDSNTKKAGKTGPMKTLLVRVMTPDLRERLENLRKKPENIPQPISNTSRANLNKLLTDYTEMKKAILHVYWEEFQKDPVGLMSRVAQPASKKIDQNKLKPEMDEKGNLTTAGFACSQCGQPLFVYKLEQVSEKGKAYTNYFGRCNVAEHEKLILLAQLKPEKDSDEAVTYSLGKFGQRALDFYSIHVTKESTHPVKPLAQIAGNRYASAPVGKALSDACMGTIASFLSKYQDIIIEHQKVVKGNQKRLESLRELAGKENLEYPSVTLPPQPHTKEGVDAYNEVIARVRMWVNLNLWQKLKLSRDDAKPLLRLKGFPSFPLVERQANEVDWWDMVCNVKKLINEKKEDGKVFWQNLAGYKRQEALRPYLSSEEDRQKGKKFARYQLGDLLLHLEKKHGEDWGKVYDEAWERIDKKVEGLSKHIKLEEERRSEDAQSKAALTDWLRAKASFVIEGLKEADKDEFCRCELKLQKWYGDLRGKPFAIEAENSILDISGFSKQYNCAFIWQKDGVKKLNLYLIINYFKGGKLRFKKIKPEAFEANRFYTVINKKSGEIVPMEVNFNFDDPNLIILPLAFGKRQGREFIWNDLLSLETGSLKLANGRVIEKTLYNRRTRQDEPALFVALTFERREVLDSSNIKPMNLIGVDRGENIPAVIALTDPEGCPLSRFKDSLGNPTHILRIGESYKEKQRTIQAKKEVEQRRAGGYSRKYASKAKNLADDMVRNTARDLLYYAVTQDAMLIFENLSRGFGRQGKRTFMAERQYTRMEDWLTAKLAYEGLPSKTYLSKTLAQYTSKTCSNCGFTITSADYDRVLEKLKKTATGWMTTINGKELKVEGQITYYNRYKRQNVVKDLSVELDRLSEESVNNDISSWTKGRSGEALSLLKKRFSHRPVQEKFVCLNCGFETHADEQAALNIARSWLFLRSQEYKKYQTNKTTGNTDKRAFVETWQSFYRKKLKEVWKPAV

SEQ ID NO: 41743 - protein, 978 aa, synthetic construct
  REGION 1..978: note = engineered CasX variant
QEIKRANKIRRRLVKDSNTKKAGKTGPMKTLLVRVMTPDLRERLENLRKKPENIPQPISNTSRANLNKLLTDYTEMKKAILHVYWEEFQKDPVGLMSRVAQPASKKIDQNKLKPEMDEKGNLTTAGFACSQCGQPLFVYKLEQVSEKGKAYTNYFGRCNVAEHEKLILLAQLKPEKDSDEAVTYSLGKFGQRALDFYSIHVTKESTHPVKPLAQIAGNRYASVPVGKALSDACMGTIASFLSKYQDIIIEHQKVVKGNQKRLESLRELAGKENLEYPSVTLPPQPHTKEGVDAYNEVIARVRMWVNLNLWQKLKLSRDDAKPLLRLKGFPSFPLVERQANEVDWWDMVCNVKKLINEKKEDGKVFWQNLAGYKRQEALRPYLSSEEDRQKGKKFARYQLGDLLLHLEKKHGEDWGKVYDEAWERIDKKVEGLSKHIKLEEERRSEDAQSKAALTDWLRAKASFVIEGLKEADKDEFCRCELKLQKWYGDLRGKPFAIEAENSILDISGFSKQYNCAFIWQKDGVKKLNLYLIINYFKGGKLRFKKIKPEAFEANRFYTVINKKSGEIVPMEVNFNFDDPNLIILPLAFGKRQGREFIWNDLLSLETGSLKLANGRVIEKTLYNRRTRQDEPALFVALTFERREVLDSSNIKPMNLIGVDRGENIPAVIALTDPEGCPLSRFKDSLGNPTHILRIGESYKEKQRTIQAKKEVEQRRAGGYSRKYASKAKNLADDMVRNTARDLLYYAVTQDAMLIFENLSRGFGRQGKRTFMAERQYTRMEDWLTAKLAYEGLPSKTYLSKTLAQYTSKTCSNCGFTITSADYDRVLEKLKKTATGWMTTINGKELKVEGQITYYNRYKRQNVVKDLSVELDRLSEESVNNDISSWTKGRSGEALSLLKKRFSHRPVQEKFVCLNCGFETHADEQAALNIARSWLFLRSQEYKKYQTNKTTGNTDKRAFVETWQSFYRKKLKEVWKPAV

SEQ ID NO: 41744 - protein, 978 aa, synthetic construct
  REGION 1..978: note = engineered CasX variant
QEIKRANKIRRRLVKDSNTKKAGKTGPMKTLLVRVMTPDLRERLENLRKKPENIPQPISNTSRANLNKLLTDYTEMKKAILHVYWEEFQKDPVGLMSRVAQPASKKIDQNKLKPEMDEKGNLTTAGFACSQCGQPLFVYKLEQVSEKGKAYTNYFGRCNVAEHEKLIKLAQLKPEKDSDEAVTYSLGKFGQRALDFYSIHVTKESTHPVKPLAQIAGNRYASGPVGKALSDACMGTIASFLSKYQDIIIEHQKVVKGNQKRLESLRELAGKENLEYPSVTLPPQPHTKEGVDAYNEVIARVRMWVNLNLWQKLKLSRDDAKPLLRLKGFPSFPLVERQANEVDWWDMVCNVKKLINEKKEDGKVFWQNLAGYKRQEALRPYLSSEEDRQKGKKFARYQLGDLLLHLEKKHGEDWGKVYDEAWERIDKKVEGLSKHIKLEEERRSEDAQSKAALTDWLRAKASFVIEGLKEADKDEFCRCELKLQKWYGDLRGKPFAIEAENSILDISGFSKQYNCAFIWQKDGVKKLNLYLIINYFKGGKLRFKKIKPEAFEANRFYTVINKKSGEIVPMEVNFNFDDPNLIILPLAFGKRQGREFIWNDLLSLETGSLKLANGRVIEKTLYNRRTRQDEPALFVALTFERREVLDSSNIKPMNLIGVDRGENIPAVIALTDPEGCPLSRFKDSLGNPTHILRIGESYKEKQRTIQAKKEVEQRRAGGYSRKYASKAKNLADDMVRNTARDLLYYAVTQDAMLIFENLSRGFGRQGKRTFMAERQYTRMEDWLTAKLAYEGLPSKTYLSKTLAQYTSKTCSNCGFTITSADYDRVLEKLKKTATGWMTTINGKELKVEGQITYYNRYKRQNVVKDLSVELDRLSEESVNNDISSWTKGRSGEALSLLKKRFSHRPVQEKFVCLNCGFETHADEQAALNIARSWLFLRSQEYKKYQTNKTTGNTDKRAFVETWQSFYRKKLKEVWKPAV

SEQ ID NO: 41745 - protein, 977 aa, synthetic construct
  REGION 1..977: note = engineered CasX variant
QEIKRANKIRRRLVKDSNTKKAGKTGPMKTLLVRVMTPDLRERLENLRKKPENIPQPISNTSRANLNKLLTDYTEMKKAILHVYWEEFQKDPVGLMSRVAQPASKKIDQNKLKPEMDEKGNLTTAGFACSQCGQPLFVYKLEQVSEKGKAYTNYFGRCNVAEHEKLILLAQLKPEKDSDEAVTYSLGKFGQRALDFYSIHVTKESTHPVKPLAQIAGNRYASPVGKALSDACMGTIASFLSKYQDIIIEHQKVVKGNQKRLESLRELAGKENLEYPSVTLPPQPHTKEGVDAYNEVIARVRMWVNLNLWQKLKLSRDDAKPLLRLKGFPSFPLVERQANEVDWWDMVCNVKKLINEKKEDGKVFWQNLAGYKRQEALRPYLSSEEDRQKGKKFARYQLGDLLLHLEKKHGEDWGKVYDEAWERIDKKVEGLSKHIKLEEERRSEDAQSKAALTDWLRAKASFVIEGLKEADKDEFCRCELKLQKWYGDLRGKPFAIEAENSILDISGFSKQYNCAFIWQKDGVKKLNLYLIINYFKGGKLRFKKIKPEAFEANRFYTVINKKSGEIVPMEVNFNFDDPNLIILPLAFGKRQGREFIWNDLLSLETGSLKLANGRVIEKTLYNRRTRQDEPALFVALTFERREVLDSSNIKPMNLIGVDRGENIPAVIALTDPEGCPLSRFKDSLGNPTHILRIGESYKEKQRTIQAKKEVEQRRAGGYSRKYASKAKNLADDMVRNTARDLLYYAVTQDAMLIFENLSRGFGRQGKRTFMAERQYTRMEDWLTAKLAYEGLPSKTYLSKTLAQYTSKTCSNCGFTITSADYDRVLEKLKKTATGWMTTINGKELKVEGQITYYNRYKRQNVVKDLSVELDRLSEESVNNDISSWTKGRSGEALSLLKKRFSHRPVQEKFVCLNCGFETHADEQAALNIARSWLFLRSQEYKKYQTNKTTGNTDKRAFVETWQSFYRKKLKEVWKPAV

SEQ ID NO: 41746 - protein, 978 aa, synthetic construct
  REGION 1..978: note = engineered CasX variant
QEIKRANKIRRRLVKDSNTKKAGKTGPMKTLLVRVMTPDLRERLENLRKKPENIPQPISNTSRANLNKLLTDYTEMKKAILHVYWEEFQKDPVGLMSRVAQPASKKIDQNKLKPEMDEKGNLTTAGFACSQCGQPLFVYKLEQVSEKGKAYTNYFGRCNVAEHEKLILLAQLKPEKDSDEAVTYSLGKFGQRALDFYSIHVTKESTHPVKPLAQIAGNRYASYPVGKALSDACMGTIASFLSKYQDIIIEHQKVVKGNQKRLESLRELAGKENLEYPSVTLPPQPHTKEGVDAYNEVIARVRMWVNLNLWQKLKLSRDDAKPLLRLKGFPSFPLVERQANEVDWWDMVCNVKKLINEKKEDGKVFWQNLAGYKRQEALRPYLSSEEDRKKGKKFARYQLGDLLLHLEKKHGEDWGKVYDEAWERIDKKVEGLSKHIKLEEERRSEDAQSKAALTDWLRAKASFVIEGLKEADKDEFCRCELKLQKWYGDLRGKPFAIEAENSILDISGFSKQYNCAFIWQKDGVKKLNLYLIINYFKGGKLRFKKIKPEAFEANRFYTVINKKSGEIVPMEVNFNFDDPNLIILPLAFGKRQGREFIWNDLLSLETGSLKLANGRVIEKTLYNRRTRQDEPALFVALTFERREVLDSSNIKPMNLIGVDRGENIPAVIALTDPEGCPLSRFKDSLGNPTHILRIGESYKEKQRTIQAKKEVEQRRAGGYSRKYASKAKNLADDMVRNTARDLLYYAVTQDAMLIFENLSRGFGRQGKRTFMAERQYTRMEDWLTAKLAYEGLPSQTYLSKTLAQYTSKTCSNCGFTITSADYDRVLEKLKKTATGWMTTINGKELKVEGQITYYNRYKRQNVVKDLSVELDRLSEESVNNDISSWTKGRSGEALSLLKKRFSHRPVQEKFVCLNCGFETHADEQAALNIARSWLFLRSQEYKKYQTNKTTGNTDKRAFVETWQSFYRKKLKEVWKPAV

SEQ ID NO: 41747 - protein, 978 aa, synthetic construct
  REGION 1..978: note = engineered CasX variant
QEIKRANKIRRRLVKDSNTKKAGKTGPMKTLLVRVMTPDLRERLENLRKKPENIPQPISNTSRANLNKLLTDYTEMKKAILHVYWEEFQKDPVGLMSRVAQPASKKIDQNKLKPEMDEKGNLTTAGFACSQCGQPLFVYKLEQVSEKGKAYTNYFGRCNVAEHEKLILLAQLKPEKDSDEAVTYSLGKFGQRALDFYSIHVTKESTHPVKPLAQIAGNRYASHPVGKALSDACMGTIASFLSKYQDIIIEHQKVVKGNQKRLESLRELAGKENLEYPSVTLPPQPHTKEGVDAYNEVIARVRMWVNLNLWQKLKLSRDDAKPLLRLKGFPSFPLVERQANEVDWWDMVCNVKKLINEKKEDGKVFWQNLAGYKRQEALRPYLSSEEDRKKGKKFARYQLGDLLLHLEKKHGEDWGKVYDEAWERIDKKVEGLSKHIKLEEERRSEDAQSKAALTDWLRAKASFVIEGLKEADKDEFCRCELKLQKWYGDLRGKPFAIEAENSILDISGFSKQYNCAFIWQKDGVKKLNLYLIINYFKGGKLRFKKIKPEAFEANRFYTVINKKSGEIVPMEVNFNFDDPNLIILPLAFGKRQGREFIWNDLLSLETGSLKLANGRVIEKTLYNRRTRQDEPALFVALTFERREVLDSSNIKPMNLIGVDRGENIPAVIALTDPEGCPLSRFKDSLGNPTHILRIGESYKEKQRTIQAKKEVEQRRAGGYSRKYASKAKNLADDMVRNTARDLLYYAVTQDAMLIFENLSRGFGRQGKRTFMAERQYTRMEDWLTAKLAYEGLPSQTYLSKTLAQYTSKTCSNCGFTITSADYDRVLEKLKKTATGWMTTINGKELKVEGQITYYNRYKRQNVVKDLSVELDRLSEESVNNDISSWTKGRSGEALSLLKKRFSHRPVQEKFVCLNCGFETHADEQAALNIARSWLFLRSQEYKKYQTNKTTGNTDKRAFVETWQSFYRKKLKEVWKPAV

SEQ ID NO: 41748 - protein, 978 aa, synthetic construct
  REGION 1..978: note = engineered CasX variant
QEIKRANKIRRRLVKDSNTKKAGKTGPMKTLLVRVMTPDLRERLENLRKKPENIPQPISNTSRANLNKLLTDYTEMKKAILHVYWEEFQKDPVGLMSRVAQPASKKIDQNKLKPEMDEKGNLTTAGFACSQCGQPLFVYKLEQVSEKGKAYTNYFGRCNVAEHEKLILLAQLKPEKDSDEAVTYSLGKFGQRALDFYSIHVTKESTHPVKPLAQIAGNRYASSPVGKALSDACMGTIASFLSKYQDIIIEHQKVVKGNQKRLESLRELAGKENLEYPSVTLPPQPHTKEGVDAYNEVIARVRMWVNLNLWQKLKLSRDDAKPLLRLKGFPSFPLVERQANEVDWWDMVCNVKKLINEKKEDGKVFWQNLAGYKRQEALRPYLSSEEDRKKGKKFARYQLGDLLLHLEKKHGEDWGKVYDEAWERIDKKVEGLSKHIKLEEERRSEDAQSKAALTDWLRAKASFVIEGLKEADKDEFCRCELKLQKWYGDLRGKPFAIEAENSILDISGFSKQYNCAFIWQKDGVKKLNLYLIINYFKGGKLRFKKIKPEAFEANRFYTVINKKSGEIVPMEVNFNFDDPNLIILPLAFGKRQGREFIWNDLLSLETGSLKLANGRVIEKTLYNRRTRQDEPALFVALTFERREVLDSSNIKPMNLIGVDRGENIPAVIALTDPEGCPLSRFKDSLGNPTHILRIGESYKEKQRTIQAKKEVEQRRAGGYSRKYASKAKNLADDMVRNTARDLLYYAVTQDAMLIFENLSRGFGRQGKRTFMAERQYTRMEDWLTAKLAYEGLPSQTYLSKTLAQYTSKTCSNCGFTITSADYDRVLEKLKKTATGWMTTINGKELKVEGQITYYNRYKRQNVVKDLSVELDRLSEESVNNDISSWTKGRSGEALSLLKKRFSHRPVQEKFVCLNCGFETHADEQAALNIARSWLFLRSQEYKKYQTNKTTGNTDKRAFVETWQSFYRKKLKEVWKPAV

SEQ ID NO: 41749 - protein, 978 aa, synthetic construct
  REGION 1..978: note = engineered CasX variant
QEIKRANKIRRRLVKDSNTKKAGKTGPMKTLLVRVMTPDLRERLENLRKKPENIPQPISNTSRANLNKLLTDYTEMKKAILHVYWEEFQKDPVGLMSRVAQPASKKIDQNKLKPEMDEKGNLTTAGFACSQCGQPLFVYKLEQVSEKGKAYTNYFGRCNVAEHEKLILLAQLKPEKDSDEAVTYSLGKFGQRALDFYSIHVTKESTHPVKPLAQIAGNRYASTPVGKALSDACMGTIASFLSKYQDIIIEHQKVVKGNQKRLESLRELAGKENLEYPSVTLPPQPHTKEGVDAYNEVIARVRMWVNLNLWQKLKLSRDDAKPLLRLKGFPSFPLVERQANEVDWWDMVCNVKKLINEKKEDGKVFWQNLAGYKRQEALRPYLSSEEDRKKGKKFARYQLGDLLLHLEKKHGEDWGKVYDEAWERIDKKVEGLSKHIKLEEERRSEDAQSKAALTDWLRAKASFVIEGLKEADKDEFCRCELKLQKWYGDLRGKPFAIEAENSILDISGFSKQYNCAFIWQKDGVKKLNLYLIINYFKGGKLRFKKIKPEAFEANRFYTVINKKSGEIVPMEVNFNFDDPNLIILPLAFGKRQGREFIWNDLLSLETGSLKLANGRVIEKTLYNRRTRQDEPALFVALTFERREVLDSSNIKPMNLIGVDRGENIPAVIALTDPEGCPLSRFKDSLGNPTHILRIGESYKEKQRTIQAKKEVEQRRAGGYSRKYASKAKNLADDMVRNTARDLLYYAVTQDAMLIFENLSRGFGRQGKRTFMAERQYTRMEDWLTAKLAYEGLPSQTYLSKTLAQYTSKTCSNCGFTITSADYDRVLEKLKKTATGWMTTINGKELKVEGQITYYNRYKRQNVVKDLSVELDRLSEESVNNDISSWTKGRSGEALSLLKKRFSHRPVQEKFVCLNCGFETHADEQAALNIARSWLFLRSQEYKKYQTNKTTGNTDKRAFVETWQSFYRKKLKEVWKPAV

SEQ ID NO: 41750 - protein, 978 aa, synthetic construct
  REGION 1..978: note = engineered CasX variant
QEIKRANKIRRRLVKDSNTKKAGKTGPMKTLLVRVMTPDLRERLENLRKKPENIPQPISNTSRANLNKLLTDYTEMKKAILHVYWEEFQKDPVGLMSRVAQPASKKIDQNKLKPEMDEKGNLTTAGFACSQCGQPLFVYKLEQVSEKGKAYTNYFGRCNVAEHEKLILLAQLKPEKDSDEAVTYSLGKFGQRALDFYSIHVTKESTHPVKPLAQIAGNRYASAPVGKALSDACMGTIASFLSKYQDIIIEHQKVVKGNQKRLESLRELAGKENLEYPSVTLPPQPHTKEGVDAYNEVIARVRMWVNLNLWQKLKLSRDDAKPLLRLKGFPSFPLVERQANEVDWWDMVCNVKKLINEKKEDGKVFWQNLAGYKRQEALRPYLSSEEDRKKGKKFARYQLGDLLLHLEKKHGEDWGKVYDEAWERIDKKVEGLSKHIKLEEERRSEDAQSKAALTDWLRAKASFVIEGLKEADKDEFCRCELKLQKWYGDLRGKPFAIEAENSILDISGFSKQYNCAFIWQKDGVKKLNLYLIINYFKGGKLRFKKIKPEAFEANRFYTVINKKSGEIVPMEVNFNFDDPNLIILPLAFGKRQGREFIWNDLLSLETGSLKLANGRVIEKTLYNRRTRQDEPALFVALTFERREVLDSSNIKPMNLIGVDRGENIPAVIALTDPEGCPLSRFKDSLGNPTHILRIGESYKEKQRTIQAKKEVEQRRAGGYSRKYASKAKNLADDMVRNTARDLLYYAVTQDAMLIFENLSRGFGRQGKRTFMAERQYTRMEDWLTAKLAYEGLPSQTYLSKTLAQYTSKTCSNCGFTITSADYDRVLEKLKKTATGWMTTINGKELKVEGQITYYNRYKRQNVVKDLSVELDRLSEESVNNDISSWTKGRSGEALSLLKKRFSHRPVQEKFVCLNCGFETHADEQAALNIARSWLFLRSQEYKKYQTNKTTGNTDKRAFVETWQSFYRKKLKEVWKPAV

SEQ ID NO: 41751 - protein, 978 aa, synthetic construct
  REGION 1..978: note = engineered CasX variant
QEIKRANKIRRRLVKDSNTKKAGKTGPMKTLLVRVMTPDLRERLENLRKKPENIPQPISNTSRANLNKLLTDYTEMKKAILHVYWEEFQKDPVGLMSRVAQPASKKIDQNKLKPEMDEKGNLTTAGFACSQCGQPLFVYKLEQVSEKGKAYTNYFGRCNVAEHEKLILLAQLKPEKDSDEAVTYSLGKFGQRALDFYSIHVTKESTHPVKPLAQIAGNRYASVPVGKALSDACMGTIASFLSKYQDIIIEHQKVVKGNQKRLESLRELAGKENLEYPSVTLPPQPHTKEGVDAYNEVIARVRMWVNLNLWQKLKLSRDDAKPLLRLKGFPSFPLVERQANEVDWWDMVCNVKKLINEKKEDGKVFWQNLAGYKRQEALRPYLSSEEDRKKGKKFARYQLGDLLLHLEKKHGEDWGKVYDEAWERIDKKVEGLSKHIKLEEERRSEDAQSKAALTDWLRAKASFVIEGLKEADKDEFCRCELKLQKWYGDLRGKPFAIEAENSILDISGFSKQYNCAFIWQKDGVKKLNLYLIINYFKGGKLRFKKIKPEAFEANRFYTVINKKSGEIVPMEVNFNFDDPNLIILPLAFGKRQGREFIWNDLLSLETGSLKLANGRVIEKTLYNRRTRQDEPALFVALTFERREVLDSSNIKPMNLIGVDRGENIPAVIALTDPEGCPLSRFKDSLGNPTHILRIGESYKEKQRTIQAKKEVEQRRAGGYSRKYASKAKNLADDMVRNTARDLLYYAVTQDAMLIFENLSRGFGRQGKRTFMAERQYTRMEDWLTAKLAYEGLPSQTYLSKTLAQYTSKTCSNCGFTITSADYDRVLEKLKKTATGWMTTINGKELKVEGQITYYNRYKRQNVVKDLSVELDRLSEESVNNDISSWTKGRSGEALSLLKKRFSHRPVQEKFVCLNCGFETHADEQAALNIARSWLFLRSQEYKKYQTNKTTGNTDKRAFVETWQSFYRKKLKEVWKPAV

SEQ ID NO: 41752 - protein, 978 aa, synthetic construct
  REGION 1..978: note = engineered CasX variant
QEIKRANKIRRRLVKDSNTKKAGKTGPMKTLLVRVMTPDLRERLENLRKKPENIPQPISNTSRANLNKLLTDYTEMKKAILHVYWEEFQKDPVGLMSRVAQPASKKIDQNKLKPEMDEKGNLTTAGFACSQCGQPLFVYKLEQVSEKGKAYTNYFGRCNVAEHEKLIKLAQLKPEKDSDEAVTYSLGKFGQRALDFYSIHVTKESTHPVKPLAQIAGNRYASGPVGKALSDACMGTIASFLSKYQDIIIEHQKVVKGNQKRLESLRELAGKENLEYPSVTLPPQPHTKEGVDAYNEVIARVRMWVNLNLWQKLKLSRDDAKPLLRLKGFPSFPLVERQANEVDWWDMVCNVKKLINEKKEDGKVFWQNLAGYKRQEALRPYLSSEEDRKKGKKFARYQLGDLLLHLEKKHGEDWGKVYDEAWERIDKKVEGLSKHIKLEEERRSEDAQSKAALTDWLRAKASFVIEGLKEADKDEFCRCELKLQKWYGDLRGKPFAIEAENSILDISGFSKQYNCAFIWQKDGVKKLNLYLIINYFKGGKLRFKKIKPEAFEANRFYTVINKKSGEIVPMEVNFNFDDPNLIILPLAFGKRQGREFIWNDLLSLETGSLKLANGRVIEKTLYNRRTRQDEPALFVALTFERREVLDSSNIKPMNLIGVDRGENIPAVIALTDPEGCPLSRFKDSLGNPTHILRIGESYKEKQRTIQAKKEVEQRRAGGYSRKYASKAKNLADDMVRNTARDLLYYAVTQDAMLIFENLSRGFGRQGKRTFMAERQYTRMEDWLTAKLAYEGLPSQTYLSKTLAQYTSKTCSNCGFTITSADYDRVLEKLKKTATGWMTTINGKELKVEGQITYYNRYKRQNVVKDLSVELDRLSEESVNNDISSWTKGRSGEALSLLKKRFSHRPVQEKFVCLNCGFETHADEQAALNIARSWLFLRSQEYKKYQTNKTTGNTDKRAFVETWQSFYRKKLKEVWKPAV

SEQ ID NO: 41753 - protein, 977 aa, synthetic construct
  REGION 1..977: note = engineered CasX variant
QEIKRANKIRRRLVKDSNTKKAGKTGPMKTLLVRVMTPDLRERLENLRKKPENIPQPISNTSRANLNKLLTDYTEMKKAILHVYWEEFQKDPVGLMSRVAQPASKKIDQNKLKPEMDEKGNLTTAGFACSQCGQPLFVYKLEQVSEKGKAYTNYFGRCNVAEHEKLILLAQLKPEKDSDEAVTYSLGKFGQRALDFYSIHVTKESTHPVKPLAQIAGNRYASPVGKALSDACMGTIASFLSKYQDIIIEHQKVVKGNQKRLESLRELAGKENLEYPSVTLPPQPHTKEGVDAYNEVIARVRMWVNLNLWQKLKLSRDDAKPLLRLKGFPSFPLVERQANEVDWWDMVCNVKKLINEKKEDGKVFWQNLAGYKRQEALRPYLSSEEDRKKGKKFARYQLGDLLLHLEKKHGEDWGKVYDEAWERIDKKVEGLSKHIKLEEERRSEDAQSKAALTDWLRAKASFVIEGLKEADKDEFCRCELKLQKWYGDLRGKPFAIEAENSILDISGFSKQYNCAFIWQKDGVKKLNLYLIINYFKGGKLRFKKIKPEAFEANRFYTVINKKSGEIVPMEVNFNFDDPNLIILPLAFGKRQGREFIWNDLLSLETGSLKLANGRVIEKTLYNRRTRQDEPALFVALTFERREVLDSSNIKPMNLIGVDRGENIPAVIALTDPEGCPLSRFKDSLGNPTHILRIGESYKEKQRTIQAKKEVEQRRAGGYSRKYASKAKNLADDMVRNTARDLLYYAVTQDAMLIFENLSRGFGRQGKRTFMAERQYTRMEDWLTAKLAYEGLPSQTYLSKTLAQYTSKTCSNCGFTITSADYDRVLEKLKKTATGWMTTINGKELKVEGQITYYNRYKRQNVVKDLSVELDRLSEESVNNDISSWTKGRSGEALSLLKKRFSHRPVQEKFVCLNCGFETHADEQAALNIARSWLFLRSQEYKKYQTNKTTGNTDKRAFVETWQSFYRKKLKEVWKPAV

SEQ ID NO: 41754 - protein, 978 aa, synthetic construct
  REGION 1..978: note = engineered CasX variant
QEIKRANKIRRRLVKDSNTKKAGKTGPMKTLLVRVMTPDLRERLENLRKKPENIPQPISNTSRANLNKLLTDYTEMKKAILHVYWEEFQKDPVGLMSRVAQPASKKIDQNKLKPEMDEKGNLTTAGFACSQCGQPLFVYKLEQVSEKGKAYTNYFGRCNVAEHEKLILLAQLKPEKDSDEAVTYSLGKFGQRALDFYSIHVTKESTHPVKPLAQIAGNRYASYPVGKALSDACMGTIASFLSKYQDIIIEHQKVVKGNQKRLESLRELAGKENLEYPSVTLPPQPHTKEGVDAYNEVIARVRMWVNLNLWQKLKLSRDDAKPLLRLKGFPSFPLVERQANEVDWWDMVCNVKKLINEKKEDGKVFWQNLAGYKRQEALRPYLSSEEDRKKGKKFARYQLGDLLLHLEKKHGEDWGKVYDEAWERIDKKVEGLSKHIKLEEERRSEDAQSKAALTDWLRAKASFVIEGLKEADKDEFCRCELKLQKWYGDLRGKPFAIEAENSILDISGFSKQYNCAFIWQKDGVKKLNLYLIINYFKGGKLRFKKIKPEAFEANRFYTVINKKSGEIVPMEVNFNFDDPNLIILPLAFGKRQGREFIWNDLLSLETGSLKLANGRVIEKTLYNRRTRQDEPALFVALTFERREVLDSSNIKPMNLIGVDRGENIPAVIALTDPEGCPLSRFKDSLGNPTHILRIGESYKEKQRTIQAKKEVEQRRAGGYSRKYASKAKNLADDMVRNTARDLLYYAVTQDAMLIFENLSRGFGRQGKRTFMAERQYTRMEDWLTAKLAYNGLPSKTYLSKTLAQYTSKTCSNCGFTITSADYDRVLEKLKKTATGWMTTINGKELKVEGQITYYNRYKRQNVVKDLSVELDRLSEESVNNDISSWTKGRSGEALSLLKKRFSHRPVQEKFVCLNCGFETHADEQAALNIARSWLFLRSQEYKKYQTNKTTGNTDKRAFVETWQSFYRKKLKEVWKPAV

SEQ ID NO: 41755 - protein, 978 aa, synthetic construct
  REGION 1..978: note = engineered CasX variant
QEIKRANKIRRRLVKDSNTKKAGKTGPMKTLLVRVMTPDLRERLENLRKKPENIPQPISNTSRANLNKLLTDYTEMKKAILHVYWEEFQKDPVGLMSRVAQPASKKIDQNKLKPEMDEKGNLTTAGFACSQCGQPLFVYKLEQVSEKGKAYTNYFGRCNVAEHEKLILLAQLKPEKDSDEAVTYSLGKFGQRALDFYSIHVTKESTHPVKPLAQIAGNRYASHPVGKALSDACMGTIASFLSKYQDIIIEHQKVVKGNQKRLESLRELAGKENLEYPSVTLPPQPHTKEGVDAYNEVIARVRMWVNLNLWQKLKLSRDDAKPLLRLKGFPSFPLVERQANEVDWWDMVCNVKKLINEKKEDGKVFWQNLAGYKRQEALRPYLSSEEDRKKGKKFARYQLGDLLLHLEKKHGEDWGKVYDEAWERIDKKVEGLSKHIKLEEERRSEDAQSKAALTDWLRAKASFVIEGLKEADKDEFCRCELKLQKWYGDLRGKPFAIEAENSILDISGFSKQYNCAFIWQKDGVKKLNLYLIINYFKGGKLRFKKIKPEAFEANRFYTVINKKSGEIVPMEVNFNFDDPNLIILPLAFGKRQGREFIWNDLLSLETGSLKLANGRVIEKTLYNRRTRQDEPALFVALTFERREVLDSSNIKPMNLIGVDRGENIPAVIALTDPEGCPLSRFKDSLGNPTHILRIGESYKEKQRTIQAKKEVEQRRAGGYSRKYASKAKNLADDMVRNTARDLLYYAVTQDAMLIFENLSRGFGRQGKRTFMAERQYTRMEDWLTAKLAYNGLPSKTYLSKTLAQYTSKTCSNCGFTITSADYDRVLEKLKKTATGWMTTINGKELKVEGQITYYNRYKRQNVVKDLSVELDRLSEESVNNDISSWTKGRSGEALSLLKKRFSHRPVQEKFVCLNCGFETHADEQAALNIARSWLFLRSQEYKKYQTNKTTGNTDKRAFVETWQSFYRKKLKEVWKPAV

SEQ ID NO: 41756 - protein, 978 aa, synthetic construct
  REGION 1..978: note = engineered CasX variant
QEIKRANKIRRRLVKDSNTKKAGKTGPMKTLLVRVMTPDLRERLENLRKKPENIPQPISNTSRANLNKLLTDYTEMKKAILHVYWEEFQKDPVGLMSRVAQPASKKIDQNKLKPEMDEKGNLTTAGFACSQCGQPLFVYKLEQVSEKGKAYTNYFGRCNVAEHEKLILLAQLKPEKDSDEAVTYSLGKFGQRALDFYSIHVTKESTHPVKPLAQIAGNRYASSPVGKALSDACMGTIASFLSKYQDIIIEHQKVVKGNQKRLESLRELAGKENLEYPSVTLPPQPHTKEGVDAYNEVIARVRMWVNLNLWQKLKLSRDDAKPLLRLKGFPSFPLVERQANEVDWWDMVCNVKKLINEKKEDGKVFWQNLAGYKRQEALRPYLSSEEDRKKGKKFARYQLGDLLLHLEKKHGEDWGKVYDEAWERIDKKVEGLSKHIKLEEERRSEDAQSKAALTDWLRAKASFVIEGLKEADKDEFCRCELKLQKWYGDLRGKPFAIEAENSILDISGFSKQYNCAFIWQKDGVKKLNLYLIINYFKGGKLRFKKIKPEAFEANRFYTVINKKSGEIVPMEVNFNFDDPNLIILPLAFGKRQGREFIWNDLLSLETGSLKLANGRVIEKTLYNRRTRQDEPALFVALTFERREVLDSSNIKPMNLIGVDRGENIPAVIALTDPEGCPLSRFKDSLGNPTHILRIGESYKEKQRTIQAKKEVEQRRAGGYSRKYASKAKNLADDMVRNTARDLLYYAVTQDAMLIFENLSRGFGRQGKRTFMAERQYTRMEDWLTAKLAYNGLPSKTYLSKTLAQYTSKTCSNCGFTITSADYDRVLEKLKKTATGWMTTINGKELKVEGQITYYNRYKRQNVVKDLSVELDRLSEESVNNDISSWTKGRSGEALSLLKKRFSHRPVQEKFVCLNCGFETHADEQAALNIARSWLFLRSQEYKKYQTNKTTGNTDKRAFVETWQSFYRKKLKEVWKPAV

SEQ ID NO: 41757 - protein, 978 aa, synthetic construct
  REGION 1..978: note = engineered CasX variant
QEIKRANKIRRRLVKDSNTKKAGKTGPMKTLLVRVMTPDLRERLENLRKKPENIPQPISNTSRANLNKLLTDYTEMKKAILHVYWEEFQKDPVGLMSRVAQPASKKIDQNKLKPEMDEKGNLTTAGFACSQCGQPLFVYKLEQVSEKGKAYTNYFGRCNVAEHEKLILLAQLKPEKDSDEAVTYSLGKFGQRALDFYSIHVTKESTHPVKPLAQIAGNRYASTPVGKALSDACMGTIASFLSKYQDIIIEHQKVVKGNQKRLESLRELAGKENLEYPSVTLPPQPHTKEGVDAYNEVIARVRMWVNLNLWQKLKLSRDDAKPLLRLKGFPSFPLVERQANEVDWWDMVCNVKKLINEKKEDGKVFWQNLAGYKRQEALRPYLSSEEDRKKGKKFARYQLGDLLLHLEKKHGEDWGKVYDEAWERIDKKVEGLSKHIKLEEERRSEDAQSKAALTDWLRAKASFVIEGLKEADKDEFCRCELKLQKWYGDLRGKPFAIEAENSILDISGFSKQYNCAFIWQKDGVKKLNLYLIINYFKGGKLRFKKIKPEAFEANRFYTVINKKSGEIVPMEVNFNFDDPNLIILPLAFGKRQGREFIWNDLLSLETGSLKLANGRVIEKTLYNRRTRQDEPALFVALTFERREVLDSSNIKPMNLIGVDRGENIPAVIALTDPEGCPLSRFKDSLGNPTHILRIGESYKEKQRTIQAKKEVEQRRAGGYSRKYASKAKNLADDMVRNTARDLLYYAVTQDAMLIFENLSRGFGRQGKRTFMAERQYTRMEDWLTAKLAYNGLPSKTYLSKTLAQYTSKTCSNCGFTITSADYDRVLEKLKKTATGWMTTINGKELKVEGQITYYNRYKRQNVVKDLSVELDRLSEESVNNDISSWTKGRSGEALSLLKKRFSHRPVQEKFVCLNCGFETHADEQAALNIARSWLFLRSQEYKKYQTNKTTGNTDKRAFVETWQSFYRKKLKEVWKPAV

SEQ ID NO: 41758 - protein, 978 aa, synthetic construct
  REGION 1..978: note = engineered CasX variant
QEIKRANKIRRRLVKDSNTKKAGKTGPMKTLLVRVMTPDLRERLENLRKKPENIPQPISNTSRANLNKLLTDYTEMKKAILHVYWEEFQKDPVGLMSRVAQPASKKIDQNKLKPEMDEKGNLTTAGFACSQCGQPLFVYKLEQVSEKGKAYTNYFGRCNVAEHEKLILLAQLKPEKDSDEAVTYSLGKFGQRALDFYSIHVTKESTHPVKPLAQIAGNRYASAPVGKALSDACMGTIASFLSKYQDIIIEHQKVVKGNQKRLESLRELAGKENLEYPSVTLPPQPHTKEGVDAYNEVIARVRMWVNLNLWQKLKLSRDDAKPLLRLKGFPSFPLVERQANEVDWWDMVCNVKKLINEKKEDGKVFWQNLAGYKRQEALRPYLSSEEDRKKGKKFARYQLGDLLLHLEKKHGEDWGKVYDEAWERIDKKVEGLSKHIKLEEERRSEDAQSKAALTDWLRAKASFVIEGLKEADKDEFCRCELKLQKWYGDLRGKPFAIEAENSILDISGFSKQYNCAFIWQKDGVKKLNLYLIINYFKGGKLRFKKIKPEAFEANRFYTVINKKSGEIVPMEVNFNFDDPNLIILPLAFGKRQGREFIWNDLLSLETGSLKLANGRVIEKTLYNRRTRQDEPALFVALTFERREVLDSSNIKPMNLIGVDRGENIPAVIALTDPEGCPLSRFKDSLGNPTHILRIGESYKEKQRTIQAKKEVEQRRAGGYSRKYASKAKNLADDMVRNTARDLLYYAVTQDAMLIFENLSRGFGRQGKRTFMAERQYTRMEDWLTAKLAYNGLPSKTYLSKTLAQYTSKTCSNCGFTITSADYDRVLEKLKKTATGWMTTINGKELKVEGQITYYNRYKRQNVVKDLSVELDRLSEESVNNDISSWTKGRSGEALSLLKKRFSHRPVQEKFVCLNCGFETHADEQAALNIARSWLFLRSQEYKKYQTNKTTGNTDKRAFVETWQSFYRKKLKEVWKPAV

SEQ ID NO: 41759 - protein, 978 aa, synthetic construct
  REGION 1..978: note = engineered CasX variant
QEIKRANKIRRRLVKDSNTKKAGKTGPMKTLLVRVMTPDLRERLENLRKKPENIPQPISNTSRANLNKLLTDYTEMKKAILHVYWEEFQKDPVGLMSRVAQPASKKIDQNKLKPEMDEKGNLTTAGFACSQCGQPLFVYKLEQVSEKGKAYTNYFGRCNVAEHEKLILLAQLKPEKDSDEAVTYSLGKFGQRALDFYSIHVTKESTHPVKPLAQIAGNRYASVPVGKALSDACMGTIASFLSKYQDIIIEHQKVVKGNQKRLESLRELAGKENLEYPSVTLPPQPHTKEGVDAYNEVIARVRMWVNLNLWQKLKLSRDDAKPLLRLKGFPSFPLVERQANEVDWWDMVCNVKKLINEKKEDGKVFWQNLAGYKRQEALRPYLSSEEDRKKGKKFARYQLGDLLLHLEKKHGEDWGKVYDEAWERIDKKVEGLSKHIKLEEERRSEDAQSKAALTDWLRAKASFVIEGLKEADKDEFCRCELKLQKWYGDLRGKPFAIEAENSILDISGFSKQYNCAFIWQKDGVKKLNLYLIINYFKGGKLRFKKIKPEAFEANRFYTVINKKSGEIVPMEVNFNFDDPNLIILPLAFGKRQGREFIWNDLLSLETGSLKLANGRVIEKTLYNRRTRQDEPALFVALTFERREVLDSSNIKPMNLIGVDRGENIPAVIALTDPEGCPLSRFKDSLGNPTHILRIGESYKEKQRTIQAKKEVEQRRAGGYSRKYASKAKNLADDMVRNTARDLLYYAVTQDAMLIFENLSRGFGRQGKRTFMAERQYTRMEDWLTAKLAYNGLPSKTYLSKTLAQYTSKTCSNCGFTITSADYDRVLEKLKKTATGWMTTINGKELKVEGQITYYNRYKRQNVVKDLSVELDRLSEESVNNDISSWTKGRSGEALSLLKKRFSHRPVQEKFVCLNCGFETHADEQAALNIARSWLFLRSQEYKKYQTNKTTGNTDKRAFVETWQSFYRKKLKEVWKPAV

SEQ ID NO: 41760 - protein, 978 aa, synthetic construct
  REGION 1..978: note = engineered CasX variant
QEIKRANKIRRRLVKDSNTKKAGKTGPMKTLLVRVMTPDLRERLENLRKKPENIPQPISNTSRANLNKLLTDYTEMKKAILHVYWEEFQKDPVGLMSRVAQPASKKIDQNKLKPEMDEKGNLTTAGFACSQCGQPLFVYKLEQVSEKGKAYTNYFGRCNVAEHEKLIKLAQLKPEKDSDEAVTYSLGKFGQRALDFYSIHVTKESTHPVKPLAQIAGNRYASGPVGKALSDACMGTIASFLSKYQDIIIEHQKVVKGNQKRLESLRELAGKENLEYPSVTLPPQPHTKEGVDAYNEVIARVRMWVNLNLWQKLKLSRDDAKPLLRLKGFPSFPLVERQANEVDWWDMVCNVKKLINEKKEDGKVFWQNLAGYKRQEALRPYLSSEEDRKKGKKFARYQLGDLLLHLEKKHGEDWGKVYDEAWERIDKKVEGLSKHIKLEEERRSEDAQSKAALTDWLRAKASFVIEGLKEADKDEFCRCELKLQKWYGDLRGKPFAIEAENSILDISGFSKQYNCAFIWQKDGVKKLNLYLIINYFKGGKLRFKKIKPEAFEANRFYTVINKKSGEIVPMEVNFNFDDPNLIILPLAFGKRQGREFIWNDLLSLETGSLKLANGRVIEKTLYNRRTRQDEPALFVALTFERREVLDSSNIKPMNLIGVDRGENIPAVIALTDPEGCPLSRFKDSLGNPTHILRIGESYKEKQRTIQAKKEVEQRRAGGYSRKYASKAKNLADDMVRNTARDLLYYAVTQDAMLIFENLSRGFGRQGKRTFMAERQYTRMEDWLTAKLAYNGLPSKTYLSKTLAQYTSKTCSNCGFTITSADYDRVLEKLKKTATGWMTTINGKELKVEGQITYYNRYKRQNVVKDLSVELDRLSEESVNNDISSWTKGRSGEALSLLKKRFSHRPVQEKFVCLNCGFETHADEQAALNIARSWLFLRSQEYKKYQTNKTTGNTDKRAFVETWQSFYRKKLKEVWKPAV

SEQ ID NO: 41761 - protein, 977 aa, synthetic construct
  REGION 1..977: note = engineered CasX variant
QEIKRANKIRRRLVKDSNTKKAGKTGPMKTLLVRVMTPDLRERLENLRKKPENIPQPISNTSRANLNKLLTDYTEMKKAILHVYWEEFQKDPVGLMSRVAQPASKKIDQNKLKPEMDEKGNLTTAGFACSQCGQPLFVYKLEQVSEKGKAYTNYFGRCNVAEHEKLILLAQLKPEKDSDEAVTYSLGKFGQRALDFYSIHVTKESTHPVKPLAQIAGNRYASPVGKALSDACMGTIASFLSKYQDIIIEHQKVVKGNQKRLESLRELAGKENLEYPSVTLPPQPHTKEGVDAYNEVIARVRMWVNLNLWQKLKLSRDDAKPLLRLKGFPSFPLVERQANEVDWWDMVCNVKKLINEKKEDGKVFWQNLAGYKRQEALRPYLSSEEDRKKGKKFARYQLGDLLLHLEKKHGEDWGKVYDEAWERIDKKVEGLSKHIKLEEERRSEDAQSKAALTDWLRAKASFVIEGLKEADKDEFCRCELKLQKWYGDLRGKPFAIEAENSILDISGFSKQYNCAFIWQKDGVKKLNLYLIINYFKGGKLRFKKIKPEAFEANRFYTVINKKSGEIVPMEVNFNFDDPNLIILPLAFGKRQGREFIWNDLLSLETGSLKLANGRVIEKTLYNRRTRQDEPALFVALTFERREVLDSSNIKPMNLIGVDRGENIPAVIALTDPEGCPLSRFKDSLGNPTHILRIGESYKEKQRTIQAKKEVEQRRAGGYSRKYASKAKNLADDMVRNTARDLLYYAVTQDAMLIFENLSRGFGRQGKRTFMAERQYTRMEDWLTAKLAYNGLPSKTYLSKTLAQYTSKTCSNCGFTITSADYDRVLEKLKKTATGWMTTINGKELKVEGQITYYNRYKRQNVVKDLSVELDRLSEESVNNDISSWTKGRSGEALSLLKKRFSHRPVQEKFVCLNCGFETHADEQAALNIARSWLFLRSQEYKKYQTNKTTGNTDKRAFVETWQSFYRKKLKEVWKPAV

SEQ ID NO: 41762 - protein, 978 aa, synthetic construct
  REGION 1..978: note = engineered CasX variant
QEIKRANKIRRRLVKDSNTKKAGKTGPMKTLLVRVMTPDLRERLENLRKKPENIPQPISNTSRANLNKLLTDYTEMKKAILHVYWEEFQKDPVGLMSRVAQPASKKIDQNKLKPEMDEKGNLTTAGFACSQCGQPLFVYKLEQVSEKGKAYTNYFGRCNVAEHEKLIQLAQLKPEKDSDEAVTYSLGKFGQRALDFYSIHVTKESTHPVKPLAQIAGNRYASYPVGKALSDACMGTIASFLSKYQDIIIEHQKVVKGNQKRLESLRELAGKENLEYPSVTLPPQPHTKEGVDAYNEVIARVRMWVNLNLWQKLKLSRDDAKPLLRLKGFPSFPLVERQANEVDWWDMVCNVKKLINEKKEDGKVFWQNLAGYKRQEALRPYLSSEEDRKKGKKFARYQLGDLLLHLEKKHGEDWGKVYDEAWERIDKKVEGLSKHIKLEEERRSEDAQSKAALTDWLRAKASFVIEGLKEADKDEFCRCELKLQKWYGDLRGKPFAIEAENSILDISGFSKQYNCAFIWQKDGVKKLNLYLIINYFKGGKLRFKKIKPEAFEANRFYTVINKKSGEIVPMEVNFNFDDPNLIILPLAFGKRQGREFIWNDLLSLETGSLKLANGRVIEKTLYNRRTRQDEPALFVALTFERREVLDSSNIKPMNLIGVDRGENIPAVIALTDPEGCPLSRFKDSLGNPTHILRIGESYKEKQRTIQAKKEVEQRRAGGYSRKYASKAKNLADDMVRNTARDLLYYAVTQDAMLIFENLSRGFGRQGKRTFMAERQYTRMEDWLTAKLAYEGLPSKTYLSKTLAQYTSKTCSNCGFTITSADYDRVLEKLKKTATGWMTTINGKELKVEGQITYYNRYKRQNVVKDLSVELDRLSEESVNNDISSWTKGRSGEALSLLKKRFSHRPVQEKFVCLNCGFETHADEQAALNIARSWLFLRSQEYKKYQTNKTTGNTDKRAFVETWQSFYRKKLKEVWKPAV

SEQ ID NO: 41763 - protein, 978 aa, synthetic construct
  REGION 1..978: note = engineered CasX variant
QEIKRANKIRRRLVKDSNTKKAGKTGPMKTLLVRVMTPDLRERLENLRKKPENIPQPISNTSRANLNKLLTDYTEMKKAILHVYWEEFQKDPVGLMSRVAQPASKKIDQNKLKPEMDEKGNLTTAGFACSQCGQPLFVYKLEQVSEKGKAYTNYFGRCNVAEHEKLIQLAQLKPEKDSDEAVTYSLGKFGQRALDFYSIHVTKESTHPVKPLAQIAGNRYASHPVGKALSDACMGTIASFLSKYQDIIIEHQKVVKGNQKRLESLRELAGKENLEYPSVTLPPQPHTKEGVDAYNEVIARVRMWVNLNLWQKLKLSRDDAKPLLRLKGFPSFPLVERQANEVDWWDMVCNVKKLINEKKEDGKVFWQNLAGYKRQEALRPYLSSEEDRKKGKKFARYQLGDLLLHLEKKHGEDWGKVYDEAWERIDKKVEGLSKHIKLEEERRSEDAQSKAALTDWLRAKASFVIEGLKEADKDEFCRCELKLQKWYGDLRGKPFAIEAENSILDISGFSKQYNCAFIWQKDGVKKLNLYLIINYFKGGKLRFKKIKPEAFEANRFYTVINKKSGEIVPMEVNFNFDDPNLIILPLAFGKRQGREFIWNDLLSLETGSLKLANGRVIEKTLYNRRTRQDEPALFVALTFERREVLDSSNIKPMNLIGVDRGENIPAVIALTDPEGCPLSRFKDSLGNPTHILRIGESYKEKQRTIQAKKEVEQRRAGGYSRKYASKAKNLADDMVRNTARDLLYYAVTQDAMLIFENLSRGFGRQGKRTFMAERQYTRMEDWLTAKLAYEGLPSKTYLSKTLAQYTSKTCSNCGFTITSADYDRVLEKLKKTATGWMTTINGKELKVEGQITYYNRYKRQNVVKDLSVELDRLSEESVNNDISSWTKGRSGEALSLLKKRFSHRPVQEKFVCLNCGFETHADEQAALNIARSWLFLRSQEYKKYQTNKTTGNTDKRAFVETWQSFYRKKLKEVWKPAV

SEQ ID NO: 41764 - protein, 978 aa, synthetic construct
  REGION 1..978: note = engineered CasX variant
QEIKRANKIRRRLVKDSNTKKAGKTGPMKTLLVRVMTPDLRERLENLRKKPENIPQPISNTSRANLNKLLTDYTEMKKAILHVYWEEFQKDPVGLMSRVAQPASKKIDQNKLKPEMDEKGNLTTAGFACSQCGQPLFVYKLEQVSEKGKAYTNYFGRCNVAEHEKLIQLAQLKPEKDSDEAVTYSLGKFGQRALDFYSIHVTKESTHPVKPLAQIAGNRYASSPVGKALSDACMGTIASFLSKYQDIIIEHQKVVKGNQKRLESLRELAGKENLEYPSVTLPPQPHTKEGVDAYNEVIARVRMWVNLNLWQKLKLSRDDAKPLLRLKGFPSFPLVERQANEVDWWDMVCNVKKLINEKKEDGKVFWQNLAGYKRQEALRPYLSSEEDRKKGKKFARYQLGDLLLHLEKKHGEDWGKVYDEAWERIDKKVEGLSKHIKLEEERRSEDAQSKAALTDWLRAKASFVIEGLKEADKDEFCRCELKLQKWYGDLRGKPFAIEAENSILDISGFSKQYNCAFIWQKDGVKKLNLYLIINYFKGGKLRFKKIKPEAFEANRFYTVINKKSGEIVPMEVNFNFDDPNLIILPLAFGKRQGREFIWNDLLSLETGSLKLANGRVIEKTLYNRRTRQDEPALFVALTFERREVLDSSNIKPMNLIGVDRGENIPAVIALTDPEGCPLSRFKDSLGNPTHILRIGESYKEKQRTIQAKKEVEQRRAGGYSRKYASKAKNLADDMVRNTARDLLYYAVTQDAMLIFENLSRGFGRQGKRTFMAERQYTRMEDWLTAKLAYEGLPSKTYLSKTLAQYTSKTCSNCGFTITSADYDRVLEKLKKTATGWMTTINGKELKVEGQITYYNRYKRQNVVKDLSVELDRLSEESVNNDISSWTKGRSGEALSLLKKRFSHRPVQEKFVCLNCGFETHADEQAALNIARSWLFLRSQEYKKYQTNKTTGNTDKRAFVETWQSFYRKKLKEVWKPAV

SEQ ID NO: 41765 - protein, 978 aa, synthetic construct
  REGION 1..978: note = engineered CasX variant
QEIKRANKIRRRLVKDSNTKKAGKTGPMKTLLVRVMTPDLRERLENLRKKPENIPQPISNTSRANLNKLLTDYTEMKKAILHVYWEEFQKDPVGLMSRVAQPASKKIDQNKLKPEMDEKGNLTTAGFACSQCGQPLFVYKLEQVSEKGKAYTNYFGRCNVAEHEKLIQLAQLKPEKDSDEAVTYSLGKFGQRALDFYSIHVTKESTHPVKPLAQIAGNRYASTPVGKALSDACMGTIASFLSKYQDIIIEHQKVVKGNQKRLESLRELAGKENLEYPSVTLPPQPHTKEGVDAYNEVIARVRMWVNLNLWQKLKLSRDDAKPLLRLKGFPSFPLVERQANEVDWWDMVCNVKKLINEKKEDGKVFWQNLAGYKRQEALRPYLSSEEDRKKGKKFARYQLGDLLLHLEKKHGEDWGKVYDEAWERIDKKVEGLSKHIKLEEERRSEDAQSKAALTDWLRAKASFVIEGLKEADKDEFCRCELKLQKWYGDLRGKPFAIEAENSILDISGFSKQYNCAFIWQKDGVKKLNLYLIINYFKGGKLRFKKIKPEAFEANRFYTVINKKSGEIVPMEVNFNFDDPNLIILPLAFGKRQGREFIWNDLLSLETGSLKLANGRVIEKTLYNRRTRQDEPALFVALTFERREVLDSSNIKPMNLIGVDRGENIPAVIALTDPEGCPLSRFKDSLGNPTHILRIGESYKEKQRTIQAKKEVEQRRAGGYSRKYASKAKNLADDMVRNTARDLLYYAVTQDAMLIFENLSRGFGRQGKRTFMAERQYTRMEDWLTAKLAYEGLPSKTYLSKTLAQYTSKTCSNCGFTITSADYDRVLEKLKKTATGWMTTINGKELKVEGQITYYNRYKRQNVVKDLSVELDRLSEESVNNDISSWTKGRSGEALSLLKKRFSHRPVQEKFVCLNCGFETHADEQAALNIARSWLFLRSQEYKKYQTNKTTGNTDKRAFVETWQSFYRKKLKEVWKPAV

SEQ ID NO: 41766 - protein, 978 aa, synthetic construct
  REGION 1..978: note = engineered CasX variant
QEIKRANKIRRRLVKDSNTKKAGKTGPMKTLLVRVMTPDLRERLENLRKKPENIPQPISNTSRANLNKLLTDYTEMKKAILHVYWEEFQKDPVGLMSRVAQPASKKIDQNKLKPEMDEKGNLTTAGFACSQCGQPLFVYKLEQVSEKGKAYTNYFGRCNVAEHEKLIQLAQLKPEKDSDEAVTYSLGKFGQRALDFYSIHVTKESTHPVKPLAQIAGNRYASAPVGKALSDACMGTIASFLSKYQDIIIEHQKVVKGNQKRLESLRELAGKENLEYPSVTLPPQPHTKEGVDAYNEVIARVRMWVNLNLWQKLKLSRDDAKPLLRLKGFPSFPLVERQANEVDWWDMVCNVKKLINEKKEDGKVFWQNLAGYKRQEALRPYLSSEEDRKKGKKFARYQLGDLLLHLEKKHGEDWGKVYDEAWERIDKKVEGLSKHIKLEEERRSEDAQSKAALTDWLRAKASFVIEGLKEADKDEFCRCELKLQKWYGDLRGKPFAIEAENSILDISGFSKQYNCAFIWQKDGVKKLNLYLIINYFKGGKLRFKKIKPEAFEANRFYTVINKKSGEIVPMEVNFNFDDPNLIILPLAFGKRQGREFIWNDLLSLETGSLKLANGRVIEKTLYNRRTRQDEPALFVALTFERREVLDSSNIKPMNLIGVDRGENIPAVIALTDPEGCPLSRFKDSLGNPTHILRIGESYKEKQRTIQAKKEVEQRRAGGYSRKYASKAKNLADDMVRNTARDLLYYAVTQDAMLIFENLSRGFGRQGKRTFMAERQYTRMEDWLTAKLAYEGLPSKTYLSKTLAQYTSKTCSNCGFTITSADYDRVLEKLKKTATGWMTTINGKELKVEGQITYYNRYKRQNVVKDLSVELDRLSEESVNNDISSWTKGRSGEALSLLKKRFSHRPVQEKFVCLNCGFETHADEQAALNIARSWLFLRSQEYKKYQTNKTTGNTDKRAFVETWQSFYRKKLKEVWKPAV

SEQ ID NO: 41767 - protein, 978 aa, synthetic construct
  REGION 1..978: note = engineered CasX variant
QEIKRANKIRRRLVKDSNTKKAGKTGPMKTLLVRVMTPDLRERLENLRKKPENIPQPISNTSRANLNKLLTDYTEMKKAILHVYWEEFQKDPVGLMSRVAQPASKKIDQNKLKPEMDEKGNLTTAGFACSQCGQPLFVYKLEQVSEKGKAYTNYFGRCNVAEHEKLIQLAQLKPEKDSDEAVTYSLGKFGQRALDFYSIHVTKESTHPVKPLAQIAGNRYASVPVGKALSDACMGTIASFLSKYQDIIIEHQKVVKGNQKRLESLRELAGKENLEYPSVTLPPQPHTKEGVDAYNEVIARVRMWVNLNLWQKLKLSRDDAKPLLRLKGFPSFPLVERQANEVDWWDMVCNVKKLINEKKEDGKVFWQNLAGYKRQEALRPYLSSEEDRKKGKKFARYQLGDLLLHLEKKHGEDWGKVYDEAWERIDKKVEGLSKHIKLEEERRSEDAQSKAALTDWLRAKASFVIEGLKEADKDEFCRCELKLQKWYGDLRGKPFAIEAENSILDISGFSKQYNCAFIWQKDGVKKLNLYLIINYFKGGKLRFKKIKPEAFEANRFYTVINKKSGEIVPMEVNFNFDDPNLIILPLAFGKRQGREFIWNDLLSLETGSLKLANGRVIEKTLYNRRTRQDEPALFVALTFERREVLDSSNIKPMNLIGVDRGENIPAVIALTDPEGCPLSRFKDSLGNPTHILRIGESYKEKQRTIQAKKEVEQRRAGGYSRKYASKAKNLADDMVRNTARDLLYYAVTQDAMLIFENLSRGFGRQGKRTFMAERQYTRMEDWLTAKLAYEGLPSKTYLSKTLAQYTSKTCSNCGFTITSADYDRVLEKLKKTATGWMTTINGKELKVEGQITYYNRYKRQNVVKDLSVELDRLSEESVNNDISSWTKGRSGEALSLLKKRFSHRPVQEKFVCLNCGFETHADEQAALNIARSWLFLRSQEYKKYQTNKTTGNTDKRAFVETWQSFYRKKLKEVWKPAV

SEQ ID NO: 41768 - protein, 979 aa, synthetic construct
  REGION 1..979: note = engineered CasX variant
QEIKRANKIRRRLVKDSNTKKAGKTGPMKTLLVRVMTPDLRERLENLRKKPENIPQPISNTSRANLNKLLTDYTEMKKAILHVYWEEFQKDPVGLMSRVAQPASKKIDQNKLKPEMDEKGNLTTAGFACSQCGQPLFVYKLEQVSEKGKAYTNYFGRCNVAEHEKLIQKLAQLKPEKDSDEAVTYSLGKFGQRALDFYSIHVTKESTHPVKPLAQIAGNRYASGPVGKALSDACMGTIASFLSKYQDIIIEHQKVVKGNQKRLESLRELAGKENLEYPSVTLPPQPHTKEGVDAYNEVIARVRMWVNLNLWQKLKLSRDDAKPLLRLKGFPSFPLVERQANEVDWWDMVCNVKKLINEKKEDGKVFWQNLAGYKRQEALRPYLSSEEDRKKGKKFARYQLGDLLLHLEKKHGEDWGKVYDEAWERIDKKVEGLSKHIKLEEERRSEDAQSKAALTDWLRAKASFVIEGLKEADKDEFCRCELKLQKWYGDLRGKPFAIEAENSILDISGFSKQYNCAFIWQKDGVKKLNLYLIINYFKGGKLRFKKIKPEAFEANRFYTVINKKSGEIVPMEVNFNFDDPNLIILPLAFGKRQGREFIWNDLLSLETGSLKLANGRVIEKTLYNRRTRQDEPALFVALTFERREVLDSSNIKPMNLIGVDRGENIPAVIALTDPEGCPLSRFKDSLGNPTHILRIGESYKEKQRTIQAKKEVEQRRAGGYSRKYASKAKNLADDMVRNTARDLLYYAVTQDAMLIFENLSRGFGRQGKRTFMAERQYTRMEDWLTAKLAYEGLPSKTYLSKTLAQYTSKTCSNCGFTITSADYDRVLEKLKKTATGWMTTINGKELKVEGQITYYNRYKRQNVVKDLSVELDRLSEESVNNDISSWTKGRSGEALSLLKKRFSHRPVQEKFVCLNCGFETHADEQAALNIARSWLFLRSQEYKKYQTNKTTGNTDKRAFVETWQSFYRKKLKEVWKPAV

SEQ ID NO: 41769 - protein, 977 aa, synthetic construct
  REGION 1..977: note = engineered CasX variant
QEIKRANKIRRRLVKDSNTKKAGKTGPMKTLLVRVMTPDLRERLENLRKKPENIPQPISNTSRANLNKLLTDYTEMKKAILHVYWEEFQKDPVGLMSRVAQPASKKIDQNKLKPEMDEKGNLTTAGFACSQCGQPLFVYKLEQVSEKGKAYTNYFGRCNVAEHEKLIQLAQLKPEKDSDEAVTYSLGKFGQRALDFYSIHVTKESTHPVKPLAQIAGNRYASPVGKALSDACMGTIASFLSKYQDIIIEHQKVVKGNQKRLESLRELAGKENLEYPSVTLPPQPHTKEGVDAYNEVIARVRMWVNLNLWQKLKLSRDDAKPLLRLKGFPSFPLVERQANEVDWWDMVCNVKKLINEKKEDGKVFWQNLAGYKRQEALRPYLSSEEDRKKGKKFARYQLGDLLLHLEKKHGEDWGKVYDEAWERIDKKVEGLSKHIKLEEERRSEDAQSKAALTDWLRAKASFVIEGLKEADKDEFCRCELKLQKWYGDLRGKPFAIEAENSILDISGFSKQYNCAFIWQKDGVKKLNLYLIINYFKGGKLRFKKIKPEAFEANRFYTVINKKSGEIVPMEVNFNFDDPNLIILPLAFGKRQGREFIWNDLLSLETGSLKLANGRVIEKTLYNRRTRQDEPALFVALTFERREVLDSSNIKPMNLIGVDRGENIPAVIALTDPEGCPLSRFKDSLGNPTHILRIGESYKEKQRTIQAKKEVEQRRAGGYSRKYASKAKNLADDMVRNTARDLLYYAVTQDAMLIFENLSRGFGRQGKRTFMAERQYTRMEDWLTAKLAYEGLPSKTYLSKTLAQYTSKTCSNCGFTITSADYDRVLEKLKKTATGWMTTINGKELKVEGQITYYNRYKRQNVVKDLSVELDRLSEESVNNDISSWTKGRSGEALSLLKKRFSHRPVQEKFVCLNCGFETHADEQAALNIARSWLFLRSQEYKKYQTNKTTGNTDKRAFVETWQSFYRKKLKEVWKPAV

SEQ ID NO: 41770 - protein, 978 aa, synthetic construct
  REGION 1..978: note = engineered CasX variant
QEIKRANKIRRRLVKDSNTKKAGKTGPMKTLLVRVMTPDLRERLENLRKKPENIPQPISNTSRANLNKLLTDYTEMKKAILHVYWEEFQKDPVGLMSRVAQPASKKIDQNKLKPEMDEKGNLTTAGFACSQCGQPLFVYKLEQVSEKGKAYTNYFGRCNVAEHEKLILLAQLKPEKDSDEAVTYSLGKFGQRALDFYSIHVTKESTHPVKPLAQIAGNRYASYPVGKALSDACMGTIASFLSKYQDIIIEHQKVVKGNQKRLESLRELAGKENLEYPSVTLPPQPHTKEGVDAYNEVIARVRMWVNLNLWQKLKLSRDDAKPLLRLKGFPSFPLVERQANEVDWWDMVCNVKKLINEKKEDGKVFWQNLAIYKRQEALRPYLSSEEDRKKGKKFARYQLGDLLLHLEKKHGEDWGKVYDEAWERIDKKVEGLSKHIKLEEERRSEDAQSKAALTDWLRAKASFVIEGLKEADKDEFCRCELKLQKWYGDLRGKPFAIEAENSILDISGFSKQYNCAFIWQKDGVKKLNLYLIINYFKGGKLRFKKIKPEAFEANRFYTVINKKSGEIVPMEVNFNFDDPNLIILPLAFGKRQGREFIWNDLLSLETGSLKLANGRVIEKTLYNRRTRQDEPALFVALTFERREVLDSSNIKPMNLIGVDRGENIPAVIALTDPEGCPLSRFKDSLGNPTHILRIGESYKEKQRTIQAKKEVEQRRAGGYSRKYASKAKNLADDMVRNTARDLLYYAVTQDAMLIFENLSRGFGRQGKRTFMAERQYTRMEDWLTAKLAYEGLPSKTYLSKTLAQYTSKTCSNCGFTITSADYDRVLEKLKKTATGWMTTINGKELKVEGQITYYNRYKRQNVVKDLSVELDRLSEESVNNDISSWTKGRSGEALSLLKKRFSHRPVQEKFVCLNCGFETHADEQAALNIARSWLFLRSQEYKKYQTNKTTGNTDKRAFVETWQSFYRKKLKEVWKPAV

SEQ ID NO: 41771 - protein, 978 aa, synthetic construct
  REGION 1..978: note = engineered CasX variant
QEIKRANKIRRRLVKDSNTKKAGKTGPMKTLLVRVMTPDLRERLENLRKKPENIPQPISNTSRANLNKLLTDYTEMKKAILHVYWEEFQKDPVGLMSRVAQPASKKIDQNKLKPEMDEKGNLTTAGFACSQCGQPLFVYKLEQVSEKGKAYTNYFGRCNVAEHEKLILLAQLKPEKDSDEAVTYSLGKFGQRALDFYSIHVTKESTHPVKPLAQIAGNRYASHPVGKALSDACMGTIASFLSKYQDIIIEHQKVVKGNQKRLESLRELAGKENLEYPSVTLPPQPHTKEGVDAYNEVIARVRMWVNLNLWQKLKLSRDDAKPLLRLKGFPSFPLVERQANEVDWWDMVCNVKKLINEKKEDGKVFWQNLAIYKRQEALRPYLSSEEDRKKGKKFARYQLGDLLLHLEKKHGEDWGKVYDEAWERIDKKVEGLSKHIKLEEERRSEDAQSKAALTDWLRAKASFVIEGLKEADKDEFCRCELKLQKWYGDLRGKPFAIEAENSILDISGFSKQYNCAFIWQKDGVKKLNLYLIINYFKGGKLRFKKIKPEAFEANRFYTVINKKSGEIVPMEVNFNFDDPNLIILPLAFGKRQGREFIWNDLLSLETGSLKLANGRVIEKTLYNRRTRQDEPALFVALTFERREVLDSSNIKPMNLIGVDRGENIPAVIALTDPEGCPLSRFKDSLGNPTHILRIGESYKEKQRTIQAKKEVEQRRAGGYSRKYASKAKNLADDMVRNTARDLLYYAVTQDAMLIFENLSRGFGRQGKRTFMAERQYTRMEDWLTAKLAYEGLPSKTYLSKTLAQYTSKTCSNCGFTITSADYDRVLEKLKKTATGWMTTINGKELKVEGQITYYNRYKRQNVVKDLSVELDRLSEESVNNDISSWTKGRSGEALSLLKKRFSHRPVQEKFVCLNCGFETHADEQAALNIARSWLFLRSQEYKKYQTNKTTGNTDKRAFVETWQSFYRKKLKEVWKPAV

SEQ ID NO: 41772 - protein, 978 aa, synthetic construct
  REGION 1..978: note = engineered CasX variant
QEIKRANKIRRRLVKDSNTKKAGKTGPMKTLLVRVMTPDLRERLENLRKKPENIPQPISNTSRANLNKLLTDYTEMKKAILHVYWEEFQKDPVGLMSRVAQPASKKIDQNKLKPEMDEKGNLTTAGFACSQCGQPLFVYKLEQVSEKGKAYTNYFGRCNVAEHEKLILLAQLKPEKDSDEAVTYSLGKFGQRALDFYSIHVTKESTHPVKPLAQIAGNRYASSPVGKALSDACMGTIASFLSKYQDIIIEHQKVVKGNQKRLESLRELAGKENLEYPSVTLPPQPHTKEGVDAYNEVIARVRMWVNLNLWQKLKLSRDDAKPLLRLKGFPSFPLVERQANEVDWWDMVCNVKKLINEKKEDGKVFWQNLAIYKRQEALRPYLSSEEDRKKGKKFARYQLGDLLLHLEKKHGEDWGKVYDEAWERIDKKVEGLSKHIKLEEERRSEDAQSKAALTDWLRAKASFVIEGLKEADKDEFCRCELKLQKWYGDLRGKPFAIEAENSILDISGFSKQYNCAFIWQKDGVKKLNLYLIINYFKGGKLRFKKIKPEAFEANRFYTVINKKSGEIVPMEVNFNFDDPNLIILPLAFGKRQGREFIWNDLLSLETGSLKLANGRVIEKTLYNRRTRQDEPALFVALTFERREVLDSSNIKPMNLIGVDRGENIPAVIALTDPEGCPLSRFKDSLGNPTHILRIGESYKEKQRTIQAKKEVEQRRAGGYSRKYASKAKNLADDMVRNTARDLLYYAVTQDAMLIFENLSRGFGRQGKRTFMAERQYTRMEDWLTAKLAYEGLPSKTYLSKTLAQYTSKTCSNCGFTITSADYDRVLEKLKKTATGWMTTINGKELKVEGQITYYNRYKRQNVVKDLSVELDRLSEESVNNDISSWTKGRSGEALSLLKKRFSHRPVQEKFVCLNCGFETHADEQAALNIARSWLFLRSQEYKKYQTNKTTGNTDKRAFVETWQSFYRKKLKEVWKPAV

SEQ ID NO: 41773 - protein, 978 aa, synthetic construct
  REGION 1..978: note = engineered CasX variant
QEIKRANKIRRRLVKDSNTKKAGKTGPMKTLLVRVMTPDLRERLENLRKKPENIPQPISNTSRANLNKLLTDYTEMKKAILHVYWEEFQKDPVGLMSRVAQPASKKIDQNKLKPEMDEKGNLTTAGFACSQCGQPLFVYKLEQVSEKGKAYTNYFGRCNVAEHEKLILLAQLKPEKDSDEAVTYSLGKFGQRALDFYSIHVTKESTHPVKPLAQIAGNRYASTPVGKALSDACMGTIASFLSKYQDIIIEHQKVVKGNQKRLESLRELAGKENLEYPSVTLPPQPHTKEGVDAYNEVIARVRMWVNLNLWQKLKLSRDDAKPLLRLKGFPSFPLVERQANEVDWWDMVCNVKKLINEKKEDGKVFWQNLAIYKRQEALRPYLSSEEDRKKGKKFARYQLGDLLLHLEKKHGEDWGKVYDEAWERIDKKVEGLSKHIKLEEERRSEDAQSKAALTDWLRAKASFVIEGLKEADKDEFCRCELKLQKWYGDLRGKPFAIEAENSILDISGFSKQYNCAFIWQKDGVKKLNLYLIINYFKGGKLRFKKIKPEAFEANRFYTVINKKSGEIVPMEVNFNFDDPNLIILPLAFGKRQGREFIWNDLLSLETGSLKLANGRVIEKTLYNRRTRQDEPALFVALTFERREVLDSSNIKPMNLIGVDRGENIPAVIALTDPEGCPLSRFKDSLGNPTHILRIGESYKEKQRTIQAKKEVEQRRAGGYSRKYASKAKNLADDMVRNTARDLLYYAVTQDAMLIFENLSRGFGRQGKRTFMAERQYTRMEDWLTAKLAYEGLPSKTYLSKTLAQYTSKTCSNCGFTITSADYDRVLEKLKKTATGWMTTINGKELKVEGQITYYNRYKRQNVVKDLSVELDRLSEESVNNDISSWTKGRSGEALSLLKKRFSHRPVQEKFVCLNCGFETHADEQAALNIARSWLFLRSQEYKKYQTNKTTGNTDKRAFVETWQSFYRKKLKEVWKPAV

SEQ ID NO: 41774 - protein, 978 aa, synthetic construct
  REGION 1..978: note = engineered CasX variant
QEIKRANKIRRRLVKDSNTKKAGKTGPMKTLLVRVMTPDLRERLENLRKKPENIPQPISNTSRANLNKLLTDYTEMKKAILHVYWEEFQKDPVGLMSRVAQPASKKIDQNKLKPEMDEKGNLTTAGFACSQCGQPLFVYKLEQVSEKGKAYTNYFGRCNVAEHEKLILLAQLKPEKDSDEAVTYSLGKFGQRALDFYSIHVTKESTHPVKPLAQIAGNRYASAPVGKALSDACMGTIASFLSKYQDIIIEHQKVVKGNQKRLESLRELAGKENLEYPSVTLPPQPHTKEGVDAYNEVIARVRMWVNLNLWQKLKLSRDDAKPLLRLKGFPSFPLVERQANEVDWWDMVCNVKKLINEKKEDGKVFWQNLAIYKRQEALRPYLSSEEDRKKGKKFARYQLGDLLLHLEKKHGEDWGKVYDEAWERIDKKVEGLSKHIKLEEERRSEDAQSKAALTDWLRAKASFVIEGLKEADKDEFCRCELKLQKWYGDLRGKPFAIEAENSILDISGFSKQYNCAFIWQKDGVKKLNLYLIINYFKGGKLRFKKIKPEAFEANRFYTVINKKSGEIVPMEVNFNFDDPNLIILPLAFGKRQGREFIWNDLLSLETGSLKLANGRVIEKTLYNRRTRQDEPALFVALTFERREVLDSSNIKPMNLIGVDRGENIPAVIALTDPEGCPLSRFKDSLGNPTHILRIGESYKEKQRTIQAKKEVEQRRAGGYSRKYASKAKNLADDMVRNTARDLLYYAVTQDAMLIFENLSRGFGRQGKRTFMAERQYTRMEDWLTAKLAYEGLPSKTYLSKTLAQYTSKTCSNCGFTITSADYDRVLEKLKKTATGWMTTINGKELKVEGQITYYNRYKRQNVVKDLSVELDRLSEESVNNDISSWTKGRSGEALSLLKKRFSHRPVQEKFVCLNCGFETHADEQAALNIARSWLFLRSQEYKKYQTNKTTGNTDKRAFVETWQSFYRKKLKEVWKPAV

SEQ ID NO: 41775 - protein, 978 aa, synthetic construct
  REGION 1..978: note = engineered CasX variant
QEIKRANKIRRRLVKDSNTKKAGKTGPMKTLLVRVMTPDLRERLENLRKKPENIPQPISNTSRANLNKLLTDYTEMKKAILHVYWEEFQKDPVGLMSRVAQPASKKIDQNKLKPEMDEKGNLTTAGFACSQCGQPLFVYKLEQVSEKGKAYTNYFGRCNVAEHEKLILLAQLKPEKDSDEAVTYSLGKFGQRALDFYSIHVTKESTHPVKPLAQIAGNRYASVPVGKALSDACMGTIASFLSKYQDIIIEHQKVVKGNQKRLESLRELAGKENLEYPSVTLPPQPHTKEGVDAYNEVIARVRMWVNLNLWQKLKLSRDDAKPLLRLKGFPSFPLVERQANEVDWWDMVCNVKKLINEKKEDGKVFWQNLAIYKRQEALRPYLSSEEDRKKGKKFARYQLGDLLLHLEKKHGEDWGKVYDEAWERIDKKVEGLSKHIKLEEERRSEDAQSKAALTDWLRAKASFVIEGLKEADKDEFCRCELKLQKWYGDLRGKPFAIEAENSILDISGFSKQYNCAFIWQKDGVKKLNLYLIINYFKGGKLRFKKIKPEAFEANRFYTVINKKSGEIVPMEVNFNFDDPNLIILPLAFGKRQGREFIWNDLLSLETGSLKLANGRVIEKTLYNRRTRQDEPALFVALTFERREVLDSSNIKPMNLIGVDRGENIPAVIALTDPEGCPLSRFKDSLGNPTHILRIGESYKEKQRTIQAKKEVEQRRAGGYSRKYASKAKNLADDMVRNTARDLLYYAVTQDAMLIFENLSRGFGRQGKRTFMAERQYTRMEDWLTAKLAYEGLPSKTYLSKTLAQYTSKTCSNCGFTITSADYDRVLEKLKKTATGWMTTINGKELKVEGQITYYNRYKRQNVVKDLSVELDRLSEESVNNDISSWTKGRSGEALSLLKKRFSHRPVQEKFVCLNCGFETHADEQAALNIARSWLFLRSQEYKKYQTNKTTGNTDKRAFVETWQSFYRKKLKEVWKPAV

SEQ ID NO: 41776 - protein, 978 aa, synthetic construct
  REGION 1..978: note = engineered CasX variant
QEIKRANKIRRRLVKDSNTKKAGKTGPMKTLLVRVMTPDLRERLENLRKKPENIPQPISNTSRANLNKLLTDYTEMKKAILHVYWEEFQKDPVGLMSRVAQPASKKIDQNKLKPEMDEKGNLTTAGFACSQCGQPLFVYKLEQVSEKGKAYTNYFGRCNVAEHEKLIKLAQLKPEKDSDEAVTYSLGKFGQRALDFYSIHVTKESTHPVKPLAQIAGNRYASGPVGKALSDACMGTIASFLSKYQDIIIEHQKVVKGNQKRLESLRELAGKENLEYPSVTLPPQPHTKEGVDAYNEVIARVRMWVNLNLWQKLKLSRDDAKPLLRLKGFPSFPLVERQANEVDWWDMVCNVKKLINEKKEDGKVFWQNLAIYKRQEALRPYLSSEEDRKKGKKFARYQLGDLLLHLEKKHGEDWGKVYDEAWERIDKKVEGLSKHIKLEEERRSEDAQSKAALTDWLRAKASFVIEGLKEADKDEFCRCELKLQKWYGDLRGKPFAIEAENSILDISGFSKQYNCAFIWQKDGVKKLNLYLIINYFKGGKLRFKKIKPEAFEANRFYTVINKKSGEIVPMEVNFNFDDPNLIILPLAFGKRQGREFIWNDLLSLETGSLKLANGRVIEKTLYNRRTRQDEPALFVALTFERREVLDSSNIKPMNLIGVDRGENIPAVIALTDPEGCPLSRFKDSLGNPTHILRIGESYKEKQRTIQAKKEVEQRRAGGYSRKYASKAKNLADDMVRNTARDLLYYAVTQDAMLIFENLSRGFGRQGKRTFMAERQYTRMEDWLTAKLAYEGLPSKTYLSKTLAQYTSKTCSNCGFTITSADYDRVLEKLKKTATGWMTTINGKELKVEGQITYYNRYKRQNVVKDLSVELDRLSEESVNNDISSWTKGRSGEALSLLKKRFSHRPVQEKFVCLNCGFETHADEQAALNIARSWLFLRSQEYKKYQTNKTTGNTDKRAFVETWQSFYRKKLKEVWKPAV

SEQ ID NO: 41777 - protein, 977 aa, synthetic construct
  REGION 1..977: note = engineered CasX variant
QEIKRANKIRRRLVKDSNTKKAGKTGPMKTLLVRVMTPDLRERLENLRKKPENIPQPISNTSRANLNKLLTDYTEMKKAILHVYWEEFQKDPVGLMSRVAQPASKKIDQNKLKPEMDEKGNLTTAGFACSQCGQPLFVYKLEQVSEKGKAYTNYFGRCNVAEHEKLILLAQLKPEKDSDEAVTYSLGKFGQRALDFYSIHVTKESTHPVKPLAQIAGNRYASPVGKALSDACMGTIASFLSKYQDIIIEHQKVVKGNQKRLESLRELAGKENLEYPSVTLPPQPHTKEGVDAYNEVIARVRMWVNLNLWQKLKLSRDDAKPLLRLKGFPSFPLVERQANEVDWWDMVCNVKKLINEKKEDGKVFWQNLAIYKRQEALRPYLSSEEDRKKGKKFARYQLGDLLLHLEKKHGEDWGKVYDEAWERIDKKVEGLSKHIKLEEERRSEDAQSKAALTDWLRAKASFVIEGLKEADKDEFCRCELKLQKWYGDLRGKPFAIEAENSILDISGFSKQYNCAFIWQKDGVKKLNLYLIINYFKGGKLRFKKIKPEAFEANRFYTVINKKSGEIVPMEVNFNFDDPNLIILPLAFGKRQGREFIWNDLLSLETGSLKLANGRVIEKTLYNRRTRQDEPALFVALTFERREVLDSSNIKPMNLIGVDRGENIPAVIALTDPEGCPLSRFKDSLGNPTHILRIGESYKEKQRTIQAKKEVEQRRAGGYSRKYASKAKNLADDMVRNTARDLLYYAVTQDAMLIFENLSRGFGRQGKRTFMAERQYTRMEDWLTAKLAYEGLPSKTYLSKTLAQYTSKTCSNCGFTITSADYDRVLEKLKKTATGWMTTINGKELKVEGQITYYNRYKRQNVVKDLSVELDRLSEESVNNDISSWTKGRSGEALSLLKKRFSHRPVQEKFVCLNCGFETHADEQAALNIARSWLFLRSQEYKKYQTNKTTGNTDKRAFVETWQSFYRKKLKEVWKPAV

SEQ ID NO: 41778 - protein, 978 aa, synthetic construct
  REGION 1..978: note = engineered CasX variant
QEIKRANKIRRRLVKDSNTKKAGKTGPMKTLLVRVMTPDLRERLENLRKKPENIPQPISNTSRANLNKLLTDYTEMKKAILHVYWEEFQKDPVGLMSRVAQPASKKIDQNKLKPEMDEKGNLTTAGFACSQCGQPLFVYKLEQVSEKGKAYTNYFGRCNVAEHEKLILLAQLKPEKDSDEAVTYSLGKFGQRALDFYSIHVTKESTHPVKPLAQIAGNRYASYPVGKALSDACMGTIASFLSKYQDIIIEHQKVVKGNQKRLESLRELAGKENLEYPSVTLPPQPHTKEGVDAYNEVIARVRMWVNLNLWQKLKLSRDDAKPLLRLKGFPSFPLVERQANEVDWWDMVCNVKKLINEKKEDGKVFWQNLAGYKRQEALRPYLSSEEDREKGKKFARYQLGDLLLHLEKKHGEDWGKVYDEAWERIDKKVEGLSKHIKLEEERRSEDAQSKAALTDWLRAKASFVIEGLKEADKDEFCRCELKLQKWYGDLRGKPFAIEAENSILDISGFSKQYNCAFIWQKDGVKKLNLYLIINYFKGGKLRFKKIKPEAFEANRFYTVINKKSGEIVPMEVNFNFDDPNLIILPLAFGKRQGREFIWNDLLSLETGSLKLANGRVIEKTLYNRRTRQDEPALFVALTFERREVLDSSNIKPMNLIGVDRGENIPAVIALTDPEGCPLSRFKDSLGNPTHILRIGESYKEKQRTIQAKKEVEQRRAGGYSRKYASKAKNLADDMVRNTARDLLYYAVTQDAMLIFENLSRGFGRQGKRTFMAERQYTRMEDWLTAKLAYEGLPSKTYLSKTLAQYTSKTCSNCGFTITSADYDRVLEKLKKTATGWMTTINGKELKVEGQITYYNRYKRQNVVKDLSVELDRLSEESVNNDISSWTKGRSGEALSLLKKRFSHRPVQEKFVCLNCGFETHADEQAALNIARSWLFLRSQEYKKYQTNKTTGNTDKRAFVETWQSFYRKKLKEVWKPAV

SEQ ID NO: 41779 - protein, 978 aa, synthetic construct
  REGION 1..978: note = engineered CasX variant
QEIKRANKIRRRLVKDSNTKKAGKTGPMKTLLVRVMTPDLRERLENLRKKPENIPQPISNTSRANLNKLLTDYTEMKKAILHVYWEEFQKDPVGLMSRVAQPASKKIDQNKLKPEMDEKGNLTTAGFACSQCGQPLFVYKLEQVSEKGKAYTNYFGRCNVAEHEKLILLAQLKPEKDSDEAVTYSLGKFGQRALDFYSIHVTKESTHPVKPLAQIAGNRYASHPVGKALSDACMGTIASFLSKYQDIIIEHQKVVKGNQKRLESLRELAGKENLEYPSVTLPPQPHTKEGVDAYNEVIARVRMWVNLNLWQKLKLSRDDAKPLLRLKGFPSFPLVERQANEVDWWDMVCNVKKLINEKKEDGKVFWQNLAGYKRQEALRPYLSSEEDREKGKKFARYQLGDLLLHLEKKHGEDWGKVYDEAWERIDKKVEGLSKHIKLEEERRSEDAQSKAALTDWLRAKASFVIEGLKEADKDEFCRCELKLQKWYGDLRGKPFAIEAENSILDISGFSKQYNCAFIWQKDGVKKLNLYLIINYFKGGKLRFKKIKPEAFEANRFYTVINKKSGEIVPMEVNFNFDDPNLIILPLAFGKRQGREFIWNDLLSLETGSLKLANGRVIEKTLYNRRTRQDEPALFVALTFERREVLDSSNIKPMNLIGVDRGENIPAVIALTDPEGCPLSRFKDSLGNPTHILRIGESYKEKQRTIQAKKEVEQRRAGGYSRKYASKAKNLADDMVRNTARDLLYYAVTQDAMLIFENLSRGFGRQGKRTFMAERQYTRMEDWLTAKLAYEGLPSKTYLSKTLAQYTSKTCSNCGFTITSADYDRVLEKLKKTATGWMTTINGKELKVEGQITYYNRYKRQNVVKDLSVELDRLSEESVNNDISSWTKGRSGEALSLLKKRFSHRPVQEKFVCLNCGFETHADEQAALNIARSWLFLRSQEYKKYQTNKTTGNTDKRAFVETWQSFYRKKLKEVWKPAV

SEQ ID NO: 41780 - protein, 978 aa, synthetic construct
  REGION 1..978: note = engineered CasX variant
QEIKRANKIRRRLVKDSNTKKAGKTGPMKTLLVRVMTPDLRERLENLRKKPENIPQPISNTSRANLNKLLTDYTEMKKAILHVYWEEFQKDPVGLMSRVAQPASKKIDQNKLKPEMDEKGNLTTAGFACSQCGQPLFVYKLEQVSEKGKAYTNYFGRCNVAEHEKLILLAQLKPEKDSDEAVTYSLGKFGQRALDFYSIHVTKESTHPVKPLAQIAGNRYASSPVGKALSDACMGTIASFLSKYQDIIIEHQKVVKGNQKRLESLRELAGKENLEYPSVTLPPQPHTKEGVDAYNEVIARVRMWVNLNLWQKLKLSRDDAKPLLRLKGFPSFPLVERQANEVDWWDMVCNVKKLINEKKEDGKVFWQNLAGYKRQEALRPYLSSEEDREKGKKFARYQLGDLLLHLEKKHGEDWGKVYDEAWERIDKKVEGLSKHIKLEEERRSEDAQSKAALTDWLRAKASFVIEGLKEADKDEFCRCELKLQKWYGDLRGKPFAIEAENSILDISGFSKQYNCAFIWQKDGVKKLNLYLIINYFKGGKLRFKKIKPEAFEANRFYTVINKKSGEIVPMEVNFNFDDPNLIILPLAFGKRQGREFIWNDLLSLETGSLKLANGRVIEKTLYNRRTRQDEPALFVALTFERREVLDSSNIKPMNLIGVDRGENIPAVIALTDPEGCPLSRFKDSLGNPTHILRIGESYKEKQRTIQAKKEVEQRRAGGYSRKYASKAKNLADDMVRNTARDLLYYAVTQDAMLIFENLSRGFGRQGKRTFMAERQYTRMEDWLTAKLAYEGLPSKTYLSKTLAQYTSKTCSNCGFTITSADYDRVLEKLKKTATGWMTTINGKELKVEGQITYYNRYKRQNVVKDLSVELDRLSEESVNNDISSWTKGRSGEALSLLKKRFSHRPVQEKFVCLNCGFETHADEQAALNIARSWLFLRSQEYKKYQTNKTTGNTDKRAFVETWQSFYRKKLKEVWKPAV

SEQ ID NO: 41781 - protein, 978 aa, synthetic construct
  REGION 1..978: note = engineered CasX variant
QEIKRANKIRRRLVKDSNTKKAGKTGPMKTLLVRVMTPDLRERLENLRKKPENIPQPISNTSRANLNKLLTDYTEMKKAILHVYWEEFQKDPVGLMSRVAQPASKKIDQNKLKPEMDEKGNLTTAGFACSQCGQPLFVYKLEQVSEKGKAYTNYFGRCNVAEHEKLILLAQLKPEKDSDEAVTYSLGKFGQRALDFYSIHVTKESTHPVKPLAQIAGNRYASTPVGKALSDACMGTIASFLSKYQDIIIEHQKVVKGNQKRLESLRELAGKENLEYPSVTLPPQPHTKEGVDAYNEVIARVRMWVNLNLWQKLKLSRDDAKPLLRLKGFPSFPLVERQANEVDWWDMVCNVKKLINEKKEDGKVFWQNLAGYKRQEALRPYLSSEEDREKGKKFARYQLGDLLLHLEKKHGEDWGKVYDEAWERIDKKVEGLSKHIKLEEERRSEDAQSKAALTDWLRAKASFVIEGLKEADKDEFCRCELKLQKWYGDLRGKPFAIEAENSILDISGFSKQYNCAFIWQKDGVKKLNLYLIINYFKGGKLRFKKIKPEAFEANRFYTVINKKSGEIVPMEVNFNFDDPNLIILPLAFGKRQGREFIWNDLLSLETGSLKLANGRVIEKTLYNRRTRQDEPALFVALTFERREVLDSSNIKPMNLIGVDRGENIPAVIALTDPEGCPLSRFKDSLGNPTHILRIGESYKEKQRTIQAKKEVEQRRAGGYSRKYASKAKNLADDMVRNTARDLLYYAVTQDAMLIFENLSRGFGRQGKRTFMAERQYTRMEDWLTAKLAYEGLPSKTYLSKTLAQYTSKTCSNCGFTITSADYDRVLEKLKKTATGWMTTINGKELKVEGQITYYNRYKRQNVVKDLSVELDRLSEESVNNDISSWTKGRSGEALSLLKKRFSHRPVQEKFVCLNCGFETHADEQAALNIARSWLFLRSQEYKKYQTNKTTGNTDKRAFVETWQSFYRKKLKEVWKPAV

SEQ ID NO: 41782 - protein, 978 aa, synthetic construct
  REGION 1..978: note = engineered CasX variant
QEIKRANKIRRRLVKDSNTKKAGKTGPMKTLLVRVMTPDLRERLENLRKKPENIPQPISNTSRANLNKLLTDYTEMKKAILHVYWEEFQKDPVGLMSRVAQPASKKIDQNKLKPEMDEKGNLTTAGFACSQCGQPLFVYKLEQVSEKGKAYTNYFGRCNVAEHEKLILLAQLKPEKDSDEAVTYSLGKFGQRALDFYSIHVTKESTHPVKPLAQIAGNRYASAPVGKALSDACMGTIASFLSKYQDIIIEHQKVVKGNQKRLESLRELAGKENLEYPSVTLPPQPHTKEGVDAYNEVIARVRMWVNLNLWQKLKLSRDDAKPLLRLKGFPSFPLVERQANEVDWWDMVCNVKKLINEKKEDGKVFWQNLAGYKRQEALRPYLSSEEDREKGKKFARYQLGDLLLHLEKKHGEDWGKVYDEAWERIDKKVEGLSKHIKLEEERRSEDAQSKAALTDWLRAKASFVIEGLKEADKDEFCRCELKLQKWYGDLRGKPFAIEAENSILDISGFSKQYNCAFIWQKDGVKKLNLYLIINYFKGGKLRFKKIKPEAFEANRFYTVINKKSGEIVPMEVNFNFDDPNLIILPLAFGKRQGREFIWNDLLSLETGSLKLANGRVIEKTLYNRRTRQDEPALFVALTFERREVLDSSNIKPMNLIGVDRGENIPAVIALTDPEGCPLSRFKDSLGNPTHILRIGESYKEKQRTIQAKKEVEQRRAGGYSRKYASKAKNLADDMVRNTARDLLYYAVTQDAMLIFENLSRGFGRQGKRTFMAERQYTRMEDWLTAKLAYEGLPSKTYLSKTLAQYTSKTCSNCGFTITSADYDRVLEKLKKTATGWMTTINGKELKVEGQITYYNRYKRQNVVKDLSVELDRLSEESVNNDISSWTKGRSGEALSLLKKRFSHRPVQEKFVCLNCGFETHADEQAALNIARSWLFLRSQEYKKYQTNKTTGNTDKRAFVETWQSFYRKKLKEVWKPAV

SEQ ID NO: 41783 - protein, 978 aa, synthetic construct
  REGION 1..978: note = engineered CasX variant
QEIKRANKIRRRLVKDSNTKKAGKTGPMKTLLVRVMTPDLRERLENLRKKPENIPQPISNTSRANLNKLLTDYTEMKKAILHVYWEEFQKDPVGLMSRVAQPASKKIDQNKLKPEMDEKGNLTTAGFACSQCGQPLFVYKLEQVSEKGKAYTNYFGRCNVAEHEKLILLAQLKPEKDSDEAVTYSLGKFGQRALDFYSIHVTKESTHPVKPLAQIAGNRYASVPVGKALSDACMGTIASFLSKYQDIIIEHQKVVKGNQKRLESLRELAGKENLEYPSVTLPPQPHTKEGVDAYNEVIARVRMWVNLNLWQKLKLSRDDAKPLLRLKGFPSFPLVERQANEVDWWDMVCNVKKLINEKKEDGKVFWQNLAGYKRQEALRPYLSSEEDREKGKKFARYQLGDLLLHLEKKHGEDWGKVYDEAWERIDKKVEGLSKHIKLEEERRSEDAQSKAALTDWLRAKASFVIEGLKEADKDEFCRCELKLQKWYGDLRGKPFAIEAENSILDISGFSKQYNCAFIWQKDGVKKLNLYLIINYFKGGKLRFKKIKPEAFEANRFYTVINKKSGEIVPMEVNFNFDDPNLIILPLAFGKRQGREFIWNDLLSLETGSLKLANGRVIEKTLYNRRTRQDEPALFVALTFERREVLDSSNIKPMNLIGVDRGENIPAVIALTDPEGCPLSRFKDSLGNPTHILRIGESYKEKQRTIQAKKEVEQRRAGGYSRKYASKAKNLADDMVRNTARDLLYYAVTQDAMLIFENLSRGFGRQGKRTFMAERQYTRMEDWLTAKLAYEGLPSKTYLSKTLAQYTSKTCSNCGFTITSADYDRVLEKLKKTATGWMTTINGKELKVEGQITYYNRYKRQNVVKDLSVELDRLSEESVNNDISSWTKGRSGEALSLLKKRFSHRPVQEKFVCLNCGFETHADEQAALNIARSWLFLRSQEYKKYQTNKTTGNTDKRAFVETWQSFYRKKLKEVWKPAV

SEQ ID NO: 41784 - protein, 978 aa, synthetic construct
  REGION 1..978: note = engineered CasX variant
QEIKRANKIRRRLVKDSNTKKAGKTGPMKTLLVRVMTPDLRERLENLRKKPENIPQPISNTSRANLNKLLTDYTEMKKAILHVYWEEFQKDPVGLMSRVAQPASKKIDQNKLKPEMDEKGNLTTAGFACSQCGQPLFVYKLEQVSEKGKAYTNYFGRCNVAEHEKLIKLAQLKPEKDSDEAVTYSLGKFGQRALDFYSIHVTKESTHPVKPLAQIAGNRYASGPVGKALSDACMGTIASFLSKYQDIIIEHQKVVKGNQKRLESLRELAGKENLEYPSVTLPPQPHTKEGVDAYNEVIARVRMWVNLNLWQKLKLSRDDAKPLLRLKGFPSFPLVERQANEVDWWDMVCNVKKLINEKKEDGKVFWQNLAGYKRQEALRPYLSSEEDREKGKKFARYQLGDLLLHLEKKHGEDWGKVYDEAWERIDKKVEGLSKHIKLEEERRSEDAQSKAALTDWLRAKASFVIEGLKEADKDEFCRCELKLQKWYGDLRGKPFAIEAENSILDISGFSKQYNCAFIWQKDGVKKLNLYLIINYFKGGKLRFKKIKPEAFEANRFYTVINKKSGEIVPMEVNFNFDDPNLIILPLAFGKRQGREFIWNDLLSLETGSLKLANGRVIEKTLYNRRTRQDEPALFVALTFERREVLDSSNIKPMNLIGVDRGENIPAVIALTDPEGCPLSRFKDSLGNPTHILRIGESYKEKQRTIQAKKEVEQRRAGGYSRKYASKAKNLADDMVRNTARDLLYYAVTQDAMLIFENLSRGFGRQGKRTFMAERQYTRMEDWLTAKLAYEGLPSKTYLSKTLAQYTSKTCSNCGFTITSADYDRVLEKLKKTATGWMTTINGKELKVEGQITYYNRYKRQNVVKDLSVELDRLSEESVNNDISSWTKGRSGEALSLLKKRFSHRPVQEKFVCLNCGFETHADEQAALNIARSWLFLRSQEYKKYQTNKTTGNTDKRAFVETWQSFYRKKLKEVWKPAV

SEQ ID NO: 41785 - protein, 977 aa, synthetic construct
  REGION 1..977: note = engineered CasX variant
QEIKRANKIRRRLVKDSNTKKAGKTGPMKTLLVRVMTPDLRERLENLRKKPENIPQPISNTSRANLNKLLTDYTEMKKAILHVYWEEFQKDPVGLMSRVAQPASKKIDQNKLKPEMDEKGNLTTAGFACSQCGQPLFVYKLEQVSEKGKAYTNYFGRCNVAEHEKLILLAQLKPEKDSDEAVTYSLGKFGQRALDFYSIHVTKESTHPVKPLAQIAGNRYASPVGKALSDACMGTIASFLSKYQDIIIEHQKVVKGNQKRLESLRELAGKENLEYPSVTLPPQPHTKEGVDAYNEVIARVRMWVNLNLWQKLKLSRDDAKPLLRLKGFPSFPLVERQANEVDWWDMVCNVKKLINEKKEDGKVFWQNLAGYKRQEALRPYLSSEEDREKGKKFARYQLGDLLLHLEKKHGEDWGKVYDEAWERIDKKVEGLSKHIKLEEERRSEDAQSKAALTDWLRAKASFVIEGLKEADKDEFCRCELKLQKWYGDLRGKPFAIEAENSILDISGFSKQYNCAFIWQKDGVKKLNLYLIINYFKGGKLRFKKIKPEAFEANRFYTVINKKSGEIVPMEVNFNFDDPNLIILPLAFGKRQGREFIWNDLLSLETGSLKLANGRVIEKTLYNRRTRQDEPALFVALTFERREVLDSSNIKPMNLIGVDRGENIPAVIALTDPEGCPLSRFKDSLGNPTHILRIGESYKEKQRTIQAKKEVEQRRAGGYSRKYASKAKNLADDMVRNTARDLLYYAVTQDAMLIFENLSRGFGRQGKRTFMAERQYTRMEDWLTAKLAYEGLPSKTYLSKTLAQYTSKTCSNCGFTITSADYDRVLEKLKKTATGWMTTINGKELKVEGQITYYNRYKRQNVVKDLSVELDRLSEESVNNDISSWTKGRSGEALSLLKKRFSHRPVQEKFVCLNCGFETHADEQAALNIARSWLFLRSQEYKKYQTNKTTGNTDKRAFVETWQSFYRKKLKEVWKPAV

SEQ ID NO: 41786 - protein, 978 aa, synthetic construct
  REGION 1..978: note = engineered CasX variant
QEIKRANKIRRRLVKDSNTKKAGKTGPMKTLLVRVMTPDLRERLENLRKKPENIPQPISNTSRANLNKLLTDYTEMKKAILHVYWEEFQKDPVGLMSRVAQPASKKIDQNKLKPEMDEKGNLTTAGFACSQCGQPLFVYKLEQVSEKGKAYTNYFGRCNVAEHEKLILLAQLKPEKDSDEAVTYSLGKFGQRALDFYSIHVTKESTHPVKPLAQIAGNRYASYPVGKALSDACMGTIASFLSKYQDIIIEHQKVVKGNQKRLESLRELAGKENLEYPSVTLPPQPHTKEGVDAYNEVIARVRMWVNLNLWQKLKLSRDDAKPLLRLKGFPSFPLVERQANEVDWWDMVCNVKKLINEKKEDGKVFWQNLAGYKRQEALRPYLSSEEDRKKGKKFARYQLGDLLLHLEKKHGEDWGKVYDEAWERIDKKVEGLSKHIKLEEERRSEDAQSKAALTDWLRAKASFVIEGLKEADKDEFCRCELKLQKWYGDLRGKPFAIEAENSILDISGFSKQYNCAFIWQKDGVKKLNLYLIINYFKGGKLRFKKIKPEAFEANRFYTVINKKSGEIVIMEVNFNFDDPNLIILPLAFGKRQGREFIWNDLLSLETGSLKLANGRVIEKTLYNRRTRQDEPALFVALTFERREVLDSSNIKPMNLIGVDRGENIPAVIALTDPEGCPLSRFKDSLGNPTHILRIGESYKEKQRTIQAKKEVEQRRAGGYSRKYASKAKNLADDMVRNTARDLLYYAVTQDAMLIFENLSRGFGRQGKRTFMAERQYTRMEDWLTAKLAYEGLPSKTYLSKTLAQYTSKTCSNCGFTITSADYDRVLEKLKKTATGWMTTINGKELKVEGQITYYNRYKRQNVVKDLSVELDRLSEESVNNDISSWTKGRSGEALSLLKKRFSHRPVQEKFVCLNCGFETHADEQAALNIARSWLFLRSQEYKKYQTNKTTGNTDKRAFVETWQSFYRKKLKEVWKPAV

SEQ ID NO: 41787 - protein, 978 aa, synthetic construct
  REGION 1..978: note = engineered CasX variant
QEIKRANKIRRRLVKDSNTKKAGKTGPMKTLLVRVMTPDLRERLENLRKKPENIPQPISNTSRANLNKLLTDYTEMKKAILHVYWEEFQKDPVGLMSRVAQPASKKIDQNKLKPEMDEKGNLTTAGFACSQCGQPLFVYKLEQVSEKGKAYTNYFGRCNVAEHEKLILLAQLKPEKDSDEAVTYSLGKFGQRALDFYSIHVTKESTHPVKPLAQIAGNRYASHPVGKALSDACMGTIASFLSKYQDIIIEHQKVVKGNQKRLESLRELAGKENLEYPSVTLPPQPHTKEGVDAYNEVIARVRMWVNLNLWQKLKLSRDDAKPLLRLKGFPSFPLVERQANEVDWWDMVCNVKKLINEKKEDGKVFWQNLAGYKRQEALRPYLSSEEDRKKGKKFARYQLGDLLLHLEKKHGEDWGKVYDEAWERIDKKVEGLSKHIKLEEERRSEDAQSKAALTDWLRAKASFVIEGLKEADKDEFCRCELKLQKWYGDLRGKPFAIEAENSILDISGFSKQYNCAFIWQKDGVKKLNLYLIINYFKGGKLRFKKIKPEAFEANRFYTVINKKSGEIVIMEVNFNFDDPNLIILPLAFGKRQGREFIWNDLLSLETGSLKLANGRVIEKTLYNRRTRQDEPALFVALTFERREVLDSSNIKPMNLIGVDRGENIPAVIALTDPEGCPLSRFKDSLGNPTHILRIGESYKEKQRTIQAKKEVEQRRAGGYSRKYASKAKNLADDMVRNTARDLLYYAVTQDAMLIFENLSRGFGRQGKRTFMAERQYTRMEDWLTAKLAYEGLPSKTYLSKTLAQYTSKTCSNCGFTITSADYDRVLEKLKKTATGWMTTINGKELKVEGQITYYNRYKRQNVVKDLSVELDRLSEESVNNDISSWTKGRSGEALSLLKKRFSHRPVQEKFVCLNCGFETHADEQAALNIARSWLFLRSQEYKKYQTNKTTGNTDKRAFVETWQSFYRKKLKEVWKPAV

SEQ ID NO: 41788 - protein, 978 aa, synthetic construct
  REGION 1..978: note = engineered CasX variant
QEIKRANKIRRRLVKDSNTKKAGKTGPMKTLLVRVMTPDLRERLENLRKKPENIPQPISNTSRANLNKLLTDYTEMKKAILHVYWEEFQKDPVGLMSRVAQPASKKIDQNKLKPEMDEKGNLTTAGFACSQCGQPLFVYKLEQVSEKGKAYTNYFGRCNVAEHEKLILLAQLKPEKDSDEAVTYSLGKFGQRALDFYSIHVTKESTHPVKPLAQIAGNRYASSPVGKALSDACMGTIASFLSKYQDIIIEHQKVVKGNQKRLESLRELAGKENLEYPSVTLPPQPHTKEGVDAYNEVIARVRMWVNLNLWQKLKLSRDDAKPLLRLKGFPSFPLVERQANEVDWWDMVCNVKKLINEKKEDGKVFWQNLAGYKRQEALRPYLSSEEDRKKGKKFARYQLGDLLLHLEKKHGEDWGKVYDEAWERIDKKVEGLSKHIKLEEERRSEDAQSKAALTDWLRAKASFVIEGLKEADKDEFCRCELKLQKWYGDLRGKPFAIEAENSILDISGFSKQYNCAFIWQKDGVKKLNLYLIINYFKGGKLRFKKIKPEAFEANRFYTVINKKSGEIVIMEVNFNFDDPNLIILPLAFGKRQGREFIWNDLLSLETGSLKLANGRVIEKTLYNRRTRQDEPALFVALTFERREVLDSSNIKPMNLIGVDRGENIPAVIALTDPEGCPLSRFKDSLGNPTHILRIGESYKEKQRTIQAKKEVEQRRAGGYSRKYASKAKNLADDMVRNTARDLLYYAVTQDAMLIFENLSRGFGRQGKRTFMAERQYTRMEDWLTAKLAYEGLPSKTYLSKTLAQYTSKTCSNCGFTITSADYDRVLEKLKKTATGWMTTINGKELKVEGQITYYNRYKRQNVVKDLSVELDRLSEESVNNDISSWTKGRSGEALSLLKKRFSHRPVQEKFVCLNCGFETHADEQAALNIARSWLFLRSQEYKKYQTNKTTGNTDKRAFVETWQSFYRKKLKEVWKPAV

SEQ ID NO: 41789 - protein, 978 aa, synthetic construct
  REGION 1..978: note = engineered CasX variant
QEIKRANKIRRRLVKDSNTKKAGKTGPMKTLLVRVMTPDLRERLENLRKKPENIPQPISNTSRANLNKLLTDYTEMKKAILHVYWEEFQKDPVGLMSRVAQPASKKIDQNKLKPEMDEKGNLTTAGFACSQCGQPLFVYKLEQVSEKGKAYTNYFGRCNVAEHEKLILLAQLKPEKDSDEAVTYSLGKFGQRALDFYSIHVTKESTHPVKPLAQIAGNRYASTPVGKALSDACMGTIASFLSKYQDIIIEHQKVVKGNQKRLESLRELAGKENLEYPSVTLPPQPHTKEGVDAYNEVIARVRMWVNLNLWQKLKLSRDDAKPLLRLKGFPSFPLVERQANEVDWWDMVCNVKKLINEKKEDGKVFWQNLAGYKRQEALRPYLSSEEDRKKGKKFARYQLGDLLLHLEKKHGEDWGKVYDEAWERIDKKVEGLSKHIKLEEERRSEDAQSKAALTDWLRAKASFVIEGLKEADKDEFCRCELKLQKWYGDLRGKPFAIEAENSILDISGFSKQYNCAFIWQKDGVKKLNLYLIINYFKGGKLRFKKIKPEAFEANRFYTVINKKSGEIVIMEVNFNFDDPNLIILPLAFGKRQGREFIWNDLLSLETGSLKLANGRVIEKTLYNRRTRQDEPALFVALTFERREVLDSSNIKPMNLIGVDRGENIPAVIALTDPEGCPLSRFKDSLGNPTHILRIGESYKEKQRTIQAKKEVEQRRAGGYSRKYASKAKNLADDMVRNTARDLLYYAVTQDAMLIFENLSRGFGRQGKRTFMAERQYTRMEDWLTAKLAYEGLPSKTYLSKTLAQYTSKTCSNCGFTITSADYDRVLEKLKKTATGWMTTINGKELKVEGQITYYNRYKRQNVVKDLSVELDRLSEESVNNDISSWTKGRSGEALSLLKKRFSHRPVQEKFVCLNCGFETHADEQAALNIARSWLFLRSQEYKKYQTNKTTGNTDKRAFVETWQSFYRKKLKEVWKPAV

SEQ ID NO: 41790 - protein, 978 aa, synthetic construct
  REGION 1..978: note = engineered CasX variant
QEIKRANKIRRRLVKDSNTKKAGKTGPMKTLLVRVMTPDLRERLENLRKKPENIPQPISNTSRANLNKLLTDYTEMKKAILHVYWEEFQKDPVGLMSRVAQPASKKIDQNKLKPEMDEKGNLTTAGFACSQCGQPLFVYKLEQVSEKGKAYTNYFGRCNVAEHEKLILLAQLKPEKDSDEAVTYSLGKFGQRALDFYSIHVTKESTHPVKPLAQIAGNRYASAPVGKALSDACMGTIASFLSKYQDIIIEHQKVVKGNQKRLESLRELAGKENLEYPSVTLPPQPHTKEGVDAYNEVIARVRMWVNLNLWQKLKLSRDDAKPLLRLKGFPSFPLVERQANEVDWWDMVCNVKKLINEKKEDGKVFWQNLAGYKRQEALRPYLSSEEDRKKGKKFARYQLGDLLLHLEKKHGEDWGKVYDEAWERIDKKVEGLSKHIKLEEERRSEDAQSKAALTDWLRAKASFVIEGLKEADKDEFCRCELKLQKWYGDLRGKPFAIEAENSILDISGFSKQYNCAFIWQKDGVKKLNLYLIINYFKGGKLRFKKIKPEAFEANRFYTVINKKSGEIVIMEVNFNFDDPNLIILPLAFGKRQGREFIWNDLLSLETGSLKLANGRVIEKTLYNRRTRQDEPALFVALTFERREVLDSSNIKPMNLIGVDRGENIPAVIALTDPEGCPLSRFKDSLGNPTHILRIGESYKEKQRTIQAKKEVEQRRAGGYSRKYASKAKNLADDMVRNTARDLLYYAVTQDAMLIFENLSRGFGRQGKRTFMAERQYTRMEDWLTAKLAYEGLPSKTYLSKTLAQYTSKTCSNCGFTITSADYDRVLEKLKKTATGWMTTINGKELKVEGQITYYNRYKRQNVVKDLSVELDRLSEESVNNDISSWTKGRSGEALSLLKKRFSHRPVQEKFVCLNCGFETHADEQAALNIARSWLFLRSQEYKKYQTNKTTGNTDKRAFVETWQSFYRKKLKEVWKPAV

SEQ ID NO: 41791 - protein, 978 aa, synthetic construct
  REGION 1..978: note = engineered CasX variant
QEIKRANKIRRRLVKDSNTKKAGKTGPMKTLLVRVMTPDLRERLENLRKKPENIPQPISNTSRANLNKLLTDYTEMKKAILHVYWEEFQKDPVGLMSRVAQPASKKIDQNKLKPEMDEKGNLTTAGFACSQCGQPLFVYKLEQVSEKGKAYTNYFGRCNVAEHEKLILLAQLKPEKDSDEAVTYSLGKFGQRALDFYSIHVTKESTHPVKPLAQIAGNRYASVPVGKALSDACMGTIASFLSKYQDIIIEHQKVVKGNQKRLESLRELAGKENLEYPSVTLPPQPHTKEGVDAYNEVIARVRMWVNLNLWQKLKLSRDDAKPLLRLKGFPSFPLVERQANEVDWWDMVCNVKKLINEKKEDGKVFWQNLAGYKRQEALRPYLSSEEDRKKGKKFARYQLGDLLLHLEKKHGEDWGKVYDEAWERIDKKVEGLSKHIKLEEERRSEDAQSKAALTDWLRAKASFVIEGLKEADKDEFCRCELKLQKWYGDLRGKPFAIEAENSILDISGFSKQYNCAFIWQKDGVKKLNLYLIINYFKGGKLRFKKIKPEAFEANRFYTVINKKSGEIVIMEVNFNFDDPNLIILPLAFGKRQGREFIWNDLLSLETGSLKLANGRVIEKTLYNRRTRQDEPALFVALTFERREVLDSSNIKPMNLIGVDRGENIPAVIALTDPEGCPLSRFKDSLGNPTHILRIGESYKEKQRTIQAKKEVEQRRAGGYSRKYASKAKNLADDMVRNTARDLLYYAVTQDAMLIFENLSRGFGRQGKRTFMAERQYTRMEDWLTAKLAYEGLPSKTYLSKTLAQYTSKTCSNCGFTITSADYDRVLEKLKKTATGWMTTINGKELKVEGQITYYNRYKRQNVVKDLSVELDRLSEESVNNDISSWTKGRSGEALSLLKKRFSHRPVQEKFVCLNCGFETHADEQAALNIARSWLFLRSQEYKKYQTNKTTGNTDKRAFVETWQSFYRKKLKEVWKPAV

SEQ ID NO: 41792 - protein, 978 aa, synthetic construct
  REGION 1..978: note = engineered CasX variant
QEIKRANKIRRRLVKDSNTKKAGKTGPMKTLLVRVMTPDLRERLENLRKKPENIPQPISNTSRANLNKLLTDYTEMKKAILHVYWEEFQKDPVGLMSRVAQPASKKIDQNKLKPEMDEKGNLTTAGFACSQCGQPLFVYKLEQVSEKGKAYTNYFGRCNVAEHEKLIKLAQLKPEKDSDEAVTYSLGKFGQRALDFYSIHVTKESTHPVKPLAQIAGNRYASGPVGKALSDACMGTIASFLSKYQDIIIEHQKVVKGNQKRLESLRELAGKENLEYPSVTLPPQPHTKEGVDAYNEVIARVRMWVNLNLWQKLKLSRDDAKPLLRLKGFPSFPLVERQANEVDWWDMVCNVKKLINEKKEDGKVFWQNLAGYKRQEALRPYLSSEEDRKKGKKFARYQLGDLLLHLEKKHGEDWGKVYDEAWERIDKKVEGLSKHIKLEEERRSEDAQSKAALTDWLRAKASFVIEGLKEADKDEFCRCELKLQKWYGDLRGKPFAIEAENSILDISGFSKQYNCAFIWQKDGVKKLNLYLIINYFKGGKLRFKKIKPEAFEANRFYTVINKKSGEIVIMEVNFNFDDPNLIILPLAFGKRQGREFIWNDLLSLETGSLKLANGRVIEKTLYNRRTRQDEPALFVALTFERREVLDSSNIKPMNLIGVDRGENIPAVIALTDPEGCPLSRFKDSLGNPTHILRIGESYKEKQRTIQAKKEVEQRRAGGYSRKYASKAKNLADDMVRNTARDLLYYAVTQDAMLIFENLSRGFGRQGKRTFMAERQYTRMEDWLTAKLAYEGLPSKTYLSKTLAQYTSKTCSNCGFTITSADYDRVLEKLKKTATGWMTTINGKELKVEGQITYYNRYKRQNVVKDLSVELDRLSEESVNNDISSWTKGRSGEALSLLKKRFSHRPVQEKFVCLNCGFETHADEQAALNIARSWLFLRSQEYKKYQTNKTTGNTDKRAFVETWQSFYRKKLKEVWKPAV

SEQ ID NO: 41793 - protein, 977 aa, synthetic construct
  REGION 1..977: note = engineered CasX variant
QEIKRANKIRRRLVKDSNTKKAGKTGPMKTLLVRVMTPDLRERLENLRKKPENIPQPISNTSRANLNKLLTDYTEMKKAILHVYWEEFQKDPVGLMSRVAQPASKKIDQNKLKPEMDEKGNLTTAGFACSQCGQPLFVYKLEQVSEKGKAYTNYFGRCNVAEHEKLILLAQLKPEKDSDEAVTYSLGKFGQRALDFYSIHVTKESTHPVKPLAQIAGNRYASPVGKALSDACMGTIASFLSKYQDIIIEHQKVVKGNQKRLESLRELAGKENLEYPSVTLPPQPHTKEGVDAYNEVIARVRMWVNLNLWQKLKLSRDDAKPLLRLKGFPSFPLVERQANEVDWWDMVCNVKKLINEKKEDGKVFWQNLAGYKRQEALRPYLSSEEDRKKGKKFARYQLGDLLLHLEKKHGEDWGKVYDEAWERIDKKVEGLSKHIKLEEERRSEDAQSKAALTDWLRAKASFVIEGLKEADKDEFCRCELKLQKWYGDLRGKPFAIEAENSILDISGFSKQYNCAFIWQKDGVKKLNLYLIINYFKGGKLRFKKIKPEAFEANRFYTVINKKSGEIVIMEVNFNFDDPNLIILPLAFGKRQGREFIWNDLLSLETGSLKLANGRVIEKTLYNRRTRQDEPALFVALTFERREVLDSSNIKPMNLIGVDRGENIPAVIALTDPEGCPLSRFKDSLGNPTHILRIGESYKEKQRTIQAKKEVEQRRAGGYSRKYASKAKNLADDMVRNTARDLLYYAVTQDAMLIFENLSRGFGRQGKRTFMAERQYTRMEDWLTAKLAYEGLPSKTYLSKTLAQYTSKTCSNCGFTITSADYDRVLEKLKKTATGWMTTINGKELKVEGQITYYNRYKRQNVVKDLSVELDRLSEESVNNDISSWTKGRSGEALSLLKKRFSHRPVQEKFVCLNCGFETHADEQAALNIARSWLFLRSQEYKKYQTNKTTGNTDKRAFVETWQSFYRKKLKEVWKPAV

SEQ ID NO: 41794 - protein, 978 aa, synthetic construct
  REGION 1..978: note = engineered CasX variant
QEIKRISKIRRRLVKDSNTKKAGKTGPMKTLLVRVMTPDLRERLENLRKKPENIPQPISNTSRANLNKLLTDYTEMKKAILHVYWEEFQKDPVGLMSRVAQPASKKIDQNKLKPEMDEKGNLTTAGFACSQCGQPLFVYKLEQVSEKGKAYTNYFGRCNVAEHEKLILLAQLKPEKDSDEAVTYSLGKFGQRALDFYSIHVTKESTHPVKPLAQIAGNRYASYPVGKALSGACMGTIASFLSKYQDIIIEHQKVVKGNQKRLESLRELAGKENLEYPSVTLPPQPHTKEGVDAYNEVIARVRMWVNLNLWQKLKLSRDDAKPLLRLKGFPSFPLVERQANEVDWWDMVCNVKKLINEKKEDGKVFWQNLAGYKRQEALRPYLSSEEDRKKGKKFARYQLGDLLLHLEKKHGEDWGKVYDEAWERIDKKVEGLSKHIKLEEERRSEDAQSKAALTDWLRAKASFVIEGLKEADKDEFCRCELKLQKWYGDLRGKPFAIEAENSILDISGFSKQYNCAFIWQKDGVKKLNLYLIINYFKGGKLRFKKIKPEAFEANRFYTVINKKSGEIVPMEVNFNFDDPNLIILPLAFGKRQGREFIWNDLLSLETGSLKLANGRVIEKTLYNRRTRQDEPALFVALTFERREVLDSSNIKPMNLIGVDRGENIPAVIALTDPEGCPLSRFKDSLGNPTHILRIGESYKEKQRTIQAKKEVEQRRAGGYSRKYASKAKNLADDMVRNTARDLLYYAVTQDAMLIFENLSRGFGRQGKRTFMAERQYTRMEDWLTAKLAYEGLPSKTYLSKTLAQYTSKTCSNCGFTITSADYDRVLEKLKKTATGWMTTINGKELKVEGQITYYNRYKRQNVVKDLSVELDRLSEESVNNDISSWTKGRSGEALSLLKKRFSHRPVQEKFVCLNCGFETHADEQAALNIARSWLFLRSQEYKKYQTNKTTGNTDKRAFVETWQSFYRKKLKEVWKPAV

SEQ ID NO: 41795 - protein, 978 aa, synthetic construct
  REGION 1..978: note = engineered CasX variant
QEIKRISKIRRRLVKDSNTKKAGKTGPMKTLLVRVMTPDLRERLENLRKKPENIPQPISNTSRANLNKLLTDYTEMKKAILHVYWEEFQKDPVGLMSRVAQPASKKIDQNKLKPEMDEKGNLTTAGFACSQCGQPLFVYKLEQVSEKGKAYTNYFGRCNVAEHEKLILLAQLKPEKDSDEAVTYSLGKFGQRALDFYSIHVTKESTHPVKPLAQIAGNRYASHPVGKALSGACMGTIASFLSKYQDIIIEHQKVVKGNQKRLESLRELAGKENLEYPSVTLPPQPHTKEGVDAYNEVIARVRMWVNLNLWQKLKLSRDDAKPLLRLKGFPSFPLVERQANEVDWWDMVCNVKKLINEKKEDGKVFWQNLAGYKRQEALRPYLSSEEDRKKGKKFARYQLGDLLLHLEKKHGEDWGKVYDEAWERIDKKVEGLSKHIKLEEERRSEDAQSKAALTDWLRAKASFVIEGLKEADKDEFCRCELKLQKWYGDLRGKPFAIEAENSILDISGFSKQYNCAFIWQKDGVKKLNLYLIINYFKGGKLRFKKIKPEAFEANRFYTVINKKSGEIVPMEVNFNFDDPNLIILPLAFGKRQGREFIWNDLLSLETGSLKLANGRVIEKTLYNRRTRQDEPALFVALTFERREVLDSSNIKPMNLIGVDRGENIPAVIALTDPEGCPLSRFKDSLGNPTHILRIGESYKEKQRTIQAKKEVEQRRAGGYSRKYASKAKNLADDMVRNTARDLLYYAVTQDAMLIFENLSRGFGRQGKRTFMAERQYTRMEDWLTAKLAYEGLPSKTYLSKTLAQYTSKTCSNCGFTITSADYDRVLEKLKKTATGWMTTINGKELKVEGQITYYNRYKRQNVVKDLSVELDRLSEESVNNDISSWTKGRSGEALSLLKKRFSHRPVQEKFVCLNCGFETHADEQAALNIARSWLFLRSQEYKKYQTNKTTGNTDKRAFVETWQSFYRKKLKEVWKPAV

SEQ ID NO: 41796 - protein, 978 aa, synthetic construct
  REGION 1..978: note = engineered CasX variant
QEIKRISKIRRRLVKDSNTKKAGKTGPMKTLLVRVMTPDLRERLENLRKKPENIPQPISNTSRANLNKLLTDYTEMKKAILHVYWEEFQKDPVGLMSRVAQPASKKIDQNKLKPEMDEKGNLTTAGFACSQCGQPLFVYKLEQVSEKGKAYTNYFGRCNVAEHEKLILLAQLKPEKDSDEAVTYSLGKFGQRALDFYSIHVTKESTHPVKPLAQIAGNRYASSPVGKALSGACMGTIASFLSKYQDIIIEHQKVVKGNQKRLESLRELAGKENLEYPSVTLPPQPHTKEGVDAYNEVIARVRMWVNLNLWQKLKLSRDDAKPLLRLKGFPSFPLVERQANEVDWWDMVCNVKKLINEKKEDGKVFWQNLAGYKRQEALRPYLSSEEDRKKGKKFARYQLGDLLLHLEKKHGEDWGKVYDEAWERIDKKVEGLSKHIKLEEERRSEDAQSKAALTDWLRAKASFVIEGLKEADKDEFCRCELKLQKWYGDLRGKPFAIEAENSILDISGFSKQYNCAFIWQKDGVKKLNLYLIINYFKGGKLRFKKIKPEAFEANRFYTVINKKSGEIVPMEVNFNFDDPNLIILPLAFGKRQGREFIWNDLLSLETGSLKLANGRVIEKTLYNRRTRQDEPALFVALTFERREVLDSSNIKPMNLIGVDRGENIPAVIALTDPEGCPLSRFKDSLGNPTHILRIGESYKEKQRTIQAKKEVEQRRAGGYSRKYASKAKNLADDMVRNTARDLLYYAVTQDAMLIFENLSRGFGRQGKRTFMAERQYTRMEDWLTAKLAYEGLPSKTYLSKTLAQYTSKTCSNCGFTITSADYDRVLEKLKKTATGWMTTINGKELKVEGQITYYNRYKRQNVVKDLSVELDRLSEESVNNDISSWTKGRSGEALSLLKKRFSHRPVQEKFVCLNCGFETHADEQAALNIARSWLFLRSQEYKKYQTNKTTGNTDKRAFVETWQSFYRKKLKEVWKPAV

SEQ ID NO: 41797 - protein, 978 aa, synthetic construct
  REGION 1..978: note = engineered CasX variant
QEIKRISKIRRRLVKDSNTKKAGKTGPMKTLLVRVMTPDLRERLENLRKKPENIPQPISNTSRANLNKLLTDYTEMKKAILHVYWEEFQKDPVGLMSRVAQPASKKIDQNKLKPEMDEKGNLTTAGFACSQCGQPLFVYKLEQVSEKGKAYTNYFGRCNVAEHEKLILLAQLKPEKDSDEAVTYSLGKFGQRALDFYSIHVTKESTHPVKPLAQIAGNRYASTPVGKALSGACMGTIASFLSKYQDIIIEHQKVVKGNQKRLESLRELAGKENLEYPSVTLPPQPHTKEGVDAYNEVIARVRMWVNLNLWQKLKLSRDDAKPLLRLKGFPSFPLVERQANEVDWWDMVCNVKKLINEKKEDGKVFWQNLAGYKRQEALRPYLSSEEDRKKGKKFARYQLGDLLLHLEKKHGEDWGKVYDEAWERIDKKVEGLSKHIKLEEERRSEDAQSKAALTDWLRAKASFVIEGLKEADKDEFCRCELKLQKWYGDLRGKPFAIEAENSILDISGFSKQYNCAFIWQKDGVKKLNLYLIINYFKGGKLRFKKIKPEAFEANRFYTVINKKSGEIVPMEVNFNFDDPNLIILPLAFGKRQGREFIWNDLLSLETGSLKLANGRVIEKTLYNRRTRQDEPALFVALTFERREVLDSSNIKPMNLIGVDRGENIPAVIALTDPEGCPLSRFKDSLGNPTHILRIGESYKEKQRTIQAKKEVEQRRAGGYSRKYASKAKNLADDMVRNTARDLLYYAVTQDAMLIFENLSRGFGRQGKRTFMAERQYTRMEDWLTAKLAYEGLPSKTYLSKTLAQYTSKTCSNCGFTITSADYDRVLEKLKKTATGWMTTINGKELKVEGQITYYNRYKRQNVVKDLSVELDRLSEESVNNDISSWTKGRSGEALSLLKKRFSHRPVQEKFVCLNCGFETHADEQAALNIARSWLFLRSQEYKKYQTNKTTGNTDKRAFVETWQSFYRKKLKEVWKPAV

SEQ ID NO: 41798 - protein, 978 aa, synthetic construct
  REGION 1..978: note = engineered CasX variant
QEIKRISKIRRRLVKDSNTKKAGKTGPMKTLLVRVMTPDLRERLENLRKKPENIPQPISNTSRANLNKLLTDYTEMKKAILHVYWEEFQKDPVGLMSRVAQPASKKIDQNKLKPEMDEKGNLTTAGFACSQCGQPLFVYKLEQVSEKGKAYTNYFGRCNVAEHEKLILLAQLKPEKDSDEAVTYSLGKFGQRALDFYSIHVTKESTHPVKPLAQIAGNRYASAPVGKALSGACMGTIASFLSKYQDIIIEHQKVVKGNQKRLESLRELAGKENLEYPSVTLPPQPHTKEGVDAYNEVIARVRMWVNLNLWQKLKLSRDDAKPLLRLKGFPSFPLVERQANEVDWWDMVCNVKKLINEKKEDGKVFWQNLAGYKRQEALRPYLSSEEDRKKGKKFARYQLGDLLLHLEKKHGEDWGKVYDEAWERIDKKVEGLSKHIKLEEERRSEDAQSKAALTDWLRAKASFVIEGLKEADKDEFCRCELKLQKWYGDLRGKPFAIEAENSILDISGFSKQYNCAFIWQKDGVKKLNLYLIINYFKGGKLRFKKIKPEAFEANRFYTVINKKSGEIVPMEVNFNFDDPNLIILPLAFGKRQGREFIWNDLLSLETGSLKLANGRVIEKTLYNRRTRQDEPALFVALTFERREVLDSSNIKPMNLIGVDRGENIPAVIALTDPEGCPLSRFKDSLGNPTHILRIGESYKEKQRTIQAKKEVEQRRAGGYSRKYASKAKNLADDMVRNTARDLLYYAVTQDAMLIFENLSRGFGRQGKRTFMAERQYTRMEDWLTAKLAYEGLPSKTYLSKTLAQYTSKTCSNCGFTITSADYDRVLEKLKKTATGWMTTINGKELKVEGQITYYNRYKRQNVVKDLSVELDRLSEESVNNDISSWTKGRSGEALSLLKKRFSHRPVQEKFVCLNCGFETHADEQAALNIARSWLFLRSQEYKKYQTNKTTGNTDKRAFVETWQSFYRKKLKEVWKPAV

SEQ ID NO: 41799 - protein, 978 aa, synthetic construct
  REGION 1..978: note = engineered CasX variant
QEIKRISKIRRRLVKDSNTKKAGKTGPMKTLLVRVMTPDLRERLENLRKKPENIPQPISNTSRANLNKLLTDYTEMKKAILHVYWEEFQKDPVGLMSRVAQPASKKIDQNKLKPEMDEKGNLTTAGFACSQCGQPLFVYKLEQVSEKGKAYTNYFGRCNVAEHEKLILLAQLKPEKDSDEAVTYSLGKFGQRALDFYSIHVTKESTHPVKPLAQIAGNRYASVPVGKALSGACMGTIASFLSKYQDIIIEHQKVVKGNQKRLESLRELAGKENLEYPSVTLPPQPHTKEGVDAYNEVIARVRMWVNLNLWQKLKLSRDDAKPLLRLKGFPSFPLVERQANEVDWWDMVCNVKKLINEKKEDGKVFWQNLAGYKRQEALRPYLSSEEDRKKGKKFARYQLGDLLLHLEKKHGEDWGKVYDEAWERIDKKVEGLSKHIKLEEERRSEDAQSKAALTDWLRAKASFVIEGLKEADKDEFCRCELKLQKWYGDLRGKPFAIEAENSILDISGFSKQYNCAFIWQKDGVKKLNLYLIINYFKGGKLRFKKIKPEAFEANRFYTVINKKSGEIVPMEVNFNFDDPNLIILPLAFGKRQGREFIWNDLLSLETGSLKLANGRVIEKTLYNRRTRQDEPALFVALTFERREVLDSSNIKPMNLIGVDRGENIPAVIALTDPEGCPLSRFKDSLGNPTHILRIGESYKEKQRTIQAKKEVEQRRAGGYSRKYASKAKNLADDMVRNTARDLLYYAVTQDAMLIFENLSRGFGRQGKRTFMAERQYTRMEDWLTAKLAYEGLPSKTYLSKTLAQYTSKTCSNCGFTITSADYDRVLEKLKKTATGWMTTINGKELKVEGQITYYNRYKRQNVVKDLSVELDRLSEESVNNDISSWTKGRSGEALSLLKKRFSHRPVQEKFVCLNCGFETHADEQAALNIARSWLFLRSQEYKKYQTNKTTGNTDKRAFVETWQSFYRKKLKEVWKPAV

SEQ ID NO: 41800 - protein, 978 aa, synthetic construct
  REGION 1..978: note = engineered CasX variant
QEIKRISKIRRRLVKDSNTKKAGKTGPMKTLLVRVMTPDLRERLENLRKKPENIPQPISNTSRANLNKLLTDYTEMKKAILHVYWEEFQKDPVGLMSRVAQPASKKIDQNKLKPEMDEKGNLTTAGFACSQCGQPLFVYKLEQVSEKGKAYTNYFGRCNVAEHEKLIKLAQLKPEKDSDEAVTYSLGKFGQRALDFYSIHVTKESTHPVKPLAQIAGNRYASGPVGKALSGACMGTIASFLSKYQDIIIEHQKVVKGNQKRLESLRELAGKENLEYPSVTLPPQPHTKEGVDAYNEVIARVRMWVNLNLWQKLKLSRDDAKPLLRLKGFPSFPLVERQANEVDWWDMVCNVKKLINEKKEDGKVFWQNLAGYKRQEALRPYLSSEEDRKKGKKFARYQLGDLLLHLEKKHGEDWGKVYDEAWERIDKKVEGLSKHIKLEEERRSEDAQSKAALTDWLRAKASFVIEGLKEADKDEFCRCELKLQKWYGDLRGKPFAIEAENSILDISGFSKQYNCAFIWQKDGVKKLNLYLIINYFKGGKLRFKKIKPEAFEANRFYTVINKKSGEIVPMEVNFNFDDPNLIILPLAFGKRQGREFIWNDLLSLETGSLKLANGRVIEKTLYNRRTRQDEPALFVALTFERREVLDSSNIKPMNLIGVDRGENIPAVIALTDPEGCPLSRFKDSLGNPTHILRIGESYKEKQRTIQAKKEVEQRRAGGYSRKYASKAKNLADDMVRNTARDLLYYAVTQDAMLIFENLSRGFGRQGKRTFMAERQYTRMEDWLTAKLAYEGLPSKTYLSKTLAQYTSKTCSNCGFTITSADYDRVLEKLKKTATGWMTTINGKELKVEGQITYYNRYKRQNVVKDLSVELDRLSEESVNNDISSWTKGRSGEALSLLKKRFSHRPVQEKFVCLNCGFETHADEQAALNIARSWLFLRSQEYKKYQTNKTTGNTDKRAFVETWQSFYRKKLKEVWKPAV

SEQ ID NO: 41801 - protein, 977 aa, synthetic construct
  REGION 1..977: note = engineered CasX variant
QEIKRISKIRRRLVKDSNTKKAGKTGPMKTLLVRVMTPDLRERLENLRKKPENIPQPISNTSRANLNKLLTDYTEMKKAILHVYWEEFQKDPVGLMSRVAQPASKKIDQNKLKPEMDEKGNLTTAGFACSQCGQPLFVYKLEQVSEKGKAYTNYFGRCNVAEHEKLILLAQLKPEKDSDEAVTYSLGKFGQRALDFYSIHVTKESTHPVKPLAQIAGNRYASPVGKALSGACMGTIASFLSKYQDIIIEHQKVVKGNQKRLESLRELAGKENLEYPSVTLPPQPHTKEGVDAYNEVIARVRMWVNLNLWQKLKLSRDDAKPLLRLKGFPSFPLVERQANEVDWWDMVCNVKKLINEKKEDGKVFWQNLAGYKRQEALRPYLSSEEDRKKGKKFARYQLGDLLLHLEKKHGEDWGKVYDEAWERIDKKVEGLSKHIKLEEERRSEDAQSKAALTDWLRAKASFVIEGLKEADKDEFCRCELKLQKWYGDLRGKPFAIEAENSILDISGFSKQYNCAFIWQKDGVKKLNLYLIINYFKGGKLRFKKIKPEAFEANRFYTVINKKSGEIVPMEVNFNFDDPNLIILPLAFGKRQGREFIWNDLLSLETGSLKLANGRVIEKTLYNRRTRQDEPALFVALTFERREVLDSSNIKPMNLIGVDRGENIPAVIALTDPEGCPLSRFKDSLGNPTHILRIGESYKEKQRTIQAKKEVEQRRAGGYSRKYASKAKNLADDMVRNTARDLLYYAVTQDAMLIFENLSRGFGRQGKRTFMAERQYTRMEDWLTAKLAYEGLPSKTYLSKTLAQYTSKTCSNCGFTITSADYDRVLEKLKKTATGWMTTINGKELKVEGQITYYNRYKRQNVVKDLSVELDRLSEESVNNDISSWTKGRSGEALSLLKKRFSHRPVQEKFVCLNCGFETHADEQAALNIARSWLFLRSQEYKKYQTNKTTGNTDKRAFVETWQSFYRKKLKEVWKPAV

SEQ ID NO: 41802 - protein, 978 aa, synthetic construct
  REGION 1..978: note = engineered CasX variant
QEIKRISKIRRRLVKDSNTKKAGKTGPMKTLLVRVMTPDLRERLENLRKKPENIPQPISNTSRANLNKLLTDYTEMKKAILHVYWEEFQKDPVGLMSRVAQPASKKIDQNKLKPEMDEKGNLTTAGFACSQCGQPLFVYKLEQVSEKGKAYTNYFGRCNVAEHEKLILLAQLKPEKDSDEAVTYSLGKFGQRALDFYSIHVTKESTHPVKPLAQIAGNRYASYPVGKALSDACMGTIASFLSKYQDIIIEHQKVVKGNQKRLESLRELAGKENLEYPSVTLPPQPHTKEGVDAYNEVIARVRMWVNLNLWQKLKLSRDDAKPLLRLKNFPSFPLVERQANEVDWWDMVCNVKKLINEKKEDGKVFWQNLAGYKRQEALRPYLSSEEDRKKGKKFARYQLGDLLLHLEKKHGEDWGKVYDEAWERIDKKVEGLSKHIKLEEERRSEDAQSKAALTDWLRAKASFVIEGLKEADKDEFCRCELKLQKWYGDLRGKPFAIEAENSILDISGFSKQYNCAFIWQKDGVKKLNLYLIINYFKGGKLRFKKIKPEAFEANRFYTVINKKSGEIVPMEVNFNFDDPNLIILPLAFGKRQGREFIWNDLLSLETGSLKLANGRVIEKTLYNRRTRQDEPALFVALTFERREVLDSSNIKPMNLIGVDRGENIPAVIALTDPEGCPLSRFKDSLGNPTHILRIGESYKEKQRTIQAKKEVEQRRAGGYSRKYASKAKNLADDMVRNTARDLLYYAVTQDAMLIFENLSRGFGRQGKRTFMAERQYTRMEDWLTAKLAYEGLPSKTYLSKTLAQYTSKTCSNCGFTITSADYDRVLEKLKKTATGWMTTINGKELKVEGQITYYNRYKRQNVVKDLSVELDRLSEESVNNDISSWTKGRSGEALSLLKKRFSHRPVQEKFVCLNCGFETHADEQAALNIARSWLFLRSQEYKKYQTNKTTGNTDKRAFVETWQSFYRKKLKEVWKPAV

SEQ ID NO: 41803 - protein, 978 aa, synthetic construct
  REGION 1..978: note = engineered CasX variant
QEIKRISKIRRRLVKDSNTKKAGKTGPMKTLLVRVMTPDLRERLENLRKKPENIPQPISNTSRANLNKLLTDYTEMKKAILHVYWEEFQKDPVGLMSRVAQPASKKIDQNKLKPEMDEKGNLTTAGFACSQCGQPLFVYKLEQVSEKGKAYTNYFGRCNVAEHEKLILLAQLKPEKDSDEAVTYSLGKFGQRALDFYSIHVTKESTHPVKPLAQIAGNRYASHPVGKALSDACMGTIASFLSKYQDIIIEHQKVVKGNQKRLESLRELAGKENLEYPSVTLPPQPHTKEGVDAYNEVIARVRMWVNLNLWQKLKLSRDDAKPLLRLKNFPSFPLVERQANEVDWWDMVCNVKKLINEKKEDGKVFWQNLAGYKRQEALRPYLSSEEDRKKGKKFARYQLGDLLLHLEKKHGEDWGKVYDEAWERIDKKVEGLSKHIKLEEERRSEDAQSKAALTDWLRAKASFVIEGLKEADKDEFCRCELKLQKWYGDLRGKPFAIEAENSILDISGFSKQYNCAFIWQKDGVKKLNLYLIINYFKGGKLRFKKIKPEAFEANRFYTVINKKSGEIVPMEVNFNFDDPNLIILPLAFGKRQGREFIWNDLLSLETGSLKLANGRVIEKTLYNRRTRQDEPALFVALTFERREVLDSSNIKPMNLIGVDRGENIPAVIALTDPEGCPLSRFKDSLGNPTHILRIGESYKEKQRTIQAKKEVEQRRAGGYSRKYASKAKNLADDMVRNTARDLLYYAVTQDAMLIFENLSRGFGRQGKRTFMAERQYTRMEDWLTAKLAYEGLPSKTYLSKTLAQYTSKTCSNCGFTITSADYDRVLEKLKKTATGWMTTINGKELKVEGQITYYNRYKRQNVVKDLSVELDRLSEESVNNDISSWTKGRSGEALSLLKKRFSHRPVQEKFVCLNCGFETHADEQAALNIARSWLFLRSQEYKKYQTNKTTGNTDKRAFVETWQSFYRKKLKEVWKPAV

SEQ ID NO: 41804 - protein, 978 aa, synthetic construct
  REGION 1..978: note = engineered CasX variant
QEIKRISKIRRRLVKDSNTKKAGKTGPMKTLLVRVMTPDLRERLENLRKKPENIPQPISNTSRANLNKLLTDYTEMKKAILHVYWEEFQKDPVGLMSRVAQPASKKIDQNKLKPEMDEKGNLTTAGFACSQCGQPLFVYKLEQVSEKGKAYTNYFGRCNVAEHEKLILLAQLKPEKDSDEAVTYSLGKFGQRALDFYSIHVTKESTHPVKPLAQIAGNRYASSPVGKALSDACMGTIASFLSKYQDIIIEHQKVVKGNQKRLESLRELAGKENLEYPSVTLPPQPHTKEGVDAYNEVIARVRMWVNLNLWQKLKLSRDDAKPLLRLKNFPSFPLVERQANEVDWWDMVCNVKKLINEKKEDGKVFWQNLAGYKRQEALRPYLSSEEDRKKGKKFARYQLGDLLLHLEKKHGEDWGKVYDEAWERIDKKVEGLSKHIKLEEERRSEDAQSKAALTDWLRAKASFVIEGLKEADKDEFCRCELKLQKWYGDLRGKPFAIEAENSILDISGFSKQYNCAFIWQKDGVKKLNLYLIINYFKGGKLRFKKIKPEAFEANRFYTVINKKSGEIVPMEVNFNFDDPNLIILPLAFGKRQGREFIWNDLLSLETGSLKLANGRVIEKTLYNRRTRQDEPALFVALTFERREVLDSSNIKPMNLIGVDRGENIPAVIALTDPEGCPLSRFKDSLGNPTHILRIGESYKEKQRTIQAKKEVEQRRAGGYSRKYASKAKNLADDMVRNTARDLLYYAVTQDAMLIFENLSRGFGRQGKRTFMAERQYTRMEDWLTAKLAYEGLPSKTYLSKTLAQYTSKTCSNCGFTITSADYDRVLEKLKKTATGWMTTINGKELKVEGQITYYNRYKRQNVVKDLSVELDRLSEESVNNDISSWTKGRSGEALSLLKKRFSHRPVQEKFVCLNCGFETHADEQAALNIARSWLFLRSQEYKKYQTNKTTGNTDKRAFVETWQSFYRKKLKEVWKPAV

SEQ ID NO: 41805 - protein, 978 aa, synthetic construct
  REGION 1..978: note = engineered CasX variant
QEIKRISKIRRRLVKDSNTKKAGKTGPMKTLLVRVMTPDLRERLENLRKKPENIPQPISNTSRANLNKLLTDYTEMKKAILHVYWEEFQKDPVGLMSRVAQPASKKIDQNKLKPEMDEKGNLTTAGFACSQCGQPLFVYKLEQVSEKGKAYTNYFGRCNVAEHEKLILLAQLKPEKDSDEAVTYSLGKFGQRALDFYSIHVTKESTHPVKPLAQIAGNRYASTPVGKALSDACMGTIASFLSKYQDIIIEHQKVVKGNQKRLESLRELAGKENLEYPSVTLPPQPHTKEGVDAYNEVIARVRMWVNLNLWQKLKLSRDDAKPLLRLKNFPSFPLVERQANEVDWWDMVCNVKKLINEKKEDGKVFWQNLAGYKRQEALRPYLSSEEDRKKGKKFARYQLGDLLLHLEKKHGEDWGKVYDEAWERIDKKVEGLSKHIKLEEERRSEDAQSKAALTDWLRAKASFVIEGLKEADKDEFCRCELKLQKWYGDLRGKPFAIEAENSILDISGFSKQYNCAFIWQKDGVKKLNLYLIINYFKGGKLRFKKIKPEAFEANRFYTVINKKSGEIVPMEVNFNFDDPNLIILPLAFGKRQGREFIWNDLLSLETGSLKLANGRVIEKTLYNRRTRQDEPALFVALTFERREVLDSSNIKPMNLIGVDRGENIPAVIALTDPEGCPLSRFKDSLGNPTHILRIGESYKEKQRTIQAKKEVEQRRAGGYSRKYASKAKNLADDMVRNTARDLLYYAVTQDAMLIFENLSRGFGRQGKRTFMAERQYTRMEDWLTAKLAYEGLPSKTYLSKTLAQYTSKTCSNCGFTITSADYDRVLEKLKKTATGWMTTINGKELKVEGQITYYNRYKRQNVVKDLSVELDRLSEESVNNDISSWTKGRSGEALSLLKKRFSHRPVQEKFVCLNCGFETHADEQAALNIARSWLFLRSQEYKKYQTNKTTGNTDKRAFVETWQSFYRKKLKEVWKPAV

SEQ ID NO: 41806 - protein, 978 aa, synthetic construct
  REGION 1..978: note = engineered CasX variant
QEIKRISKIRRRLVKDSNTKKAGKTGPMKTLLVRVMTPDLRERLENLRKKPENIPQPISNTSRANLNKLLTDYTEMKKAILHVYWEEFQKDPVGLMSRVAQPASKKIDQNKLKPEMDEKGNLTTAGFACSQCGQPLFVYKLEQVSEKGKAYTNYFGRCNVAEHEKLILLAQLKPEKDSDEAVTYSLGKFGQRALDFYSIHVTKESTHPVKPLAQIAGNRYASAPVGKALSDACMGTIASFLSKYQDIIIEHQKVVKGNQKRLESLRELAGKENLEYPSVTLPPQPHTKEGVDAYNEVIARVRMWVNLNLWQKLKLSRDDAKPLLRLKNFPSFPLVERQANEVDWWDMVCNVKKLINEKKEDGKVFWQNLAGYKRQEALRPYLSSEEDRKKGKKFARYQLGDLLLHLEKKHGEDWGKVYDEAWERIDKKVEGLSKHIKLEEERRSEDAQSKAALTDWLRAKASFVIEGLKEADKDEFCRCELKLQKWYGDLRGKPFAIEAENSILDISGFSKQYNCAFIWQKDGVKKLNLYLIINYFKGGKLRFKKIKPEAFEANRFYTVINKKSGEIVPMEVNFNFDDPNLIILPLAFGKRQGREFIWNDLLSLETGSLKLANGRVIEKTLYNRRTRQDEPALFVALTFERREVLDSSNIKPMNLIGVDRGENIPAVIALTDPEGCPLSRFKDSLGNPTHILRIGESYKEKQRTIQAKKEVEQRRAGGYSRKYASKAKNLADDMVRNTARDLLYYAVTQDAMLIFENLSRGFGRQGKRTFMAERQYTRMEDWLTAKLAYEGLPSKTYLSKTLAQYTSKTCSNCGFTITSADYDRVLEKLKKTATGWMTTINGKELKVEGQITYYNRYKRQNVVKDLSVELDRLSEESVNNDISSWTKGRSGEALSLLKKRFSHRPVQEKFVCLNCGFETHADEQAALNIARSWLFLRSQEYKKYQTNKTTGNTDKRAFVETWQSFYRKKLKEVWKPAV

SEQ ID NO: 41807 - protein, 978 aa, synthetic construct
  REGION 1..978: note = engineered CasX variant
QEIKRISKIRRRLVKDSNTKKAGKTGPMKTLLVRVMTPDLRERLENLRKKPENIPQPISNTSRANLNKLLTDYTEMKKAILHVYWEEFQKDPVGLMSRVAQPASKKIDQNKLKPEMDEKGNLTTAGFACSQCGQPLFVYKLEQVSEKGKAYTNYFGRCNVAEHEKLILLAQLKPEKDSDEAVTYSLGKFGQRALDFYSIHVTKESTHPVKPLAQIAGNRYASVPVGKALSDACMGTIASFLSKYQDIIIEHQKVVKGNQKRLESLRELAGKENLEYPSVTLPPQPHTKEGVDAYNEVIARVRMWVNLNLWQKLKLSRDDAKPLLRLKNFPSFPLVERQANEVDWWDMVCNVKKLINEKKEDGKVFWQNLAGYKRQEALRPYLSSEEDRKKGKKFARYQLGDLLLHLEKKHGEDWGKVYDEAWERIDKKVEGLSKHIKLEEERRSEDAQSKAALTDWLRAKASFVIEGLKEADKDEFCRCELKLQKWYGDLRGKPFAIEAENSILDISGFSKQYNCAFIWQKDGVKKLNLYLIINYFKGGKLRFKKIKPEAFEANRFYTVINKKSGEIVPMEVNFNFDDPNLIILPLAFGKRQGREFIWNDLLSLETGSLKLANGRVIEKTLYNRRTRQDEPALFVALTFERREVLDSSNIKPMNLIGVDRGENIPAVIALTDPEGCPLSRFKDSLGNPTHILRIGESYKEKQRTIQAKKEVEQRRAGGYSRKYASKAKNLADDMVRNTARDLLYYAVTQDAMLIFENLSRGFGRQGKRTFMAERQYTRMEDWLTAKLAYEGLPSKTYLSKTLAQYTSKTCSNCGFTITSADYDRVLEKLKKTATGWMTTINGKELKVEGQITYYNRYKRQNVVKDLSVELDRLSEESVNNDISSWTKGRSGEALSLLKKRFSHRPVQEKFVCLNCGFETHADEQAALNIARSWLFLRSQEYKKYQTNKTTGNTDKRAFVETWQSFYRKKLKEVWKPAV

SEQ ID NO: 41808 - protein, 978 aa, synthetic construct
  REGION 1..978: note = engineered CasX variant
QEIKRISKIRRRLVKDSNTKKAGKTGPMKTLLVRVMTPDLRERLENLRKKPENIPQPISNTSRANLNKLLTDYTEMKKAILHVYWEEFQKDPVGLMSRVAQPASKKIDQNKLKPEMDEKGNLTTAGFACSQCGQPLFVYKLEQVSEKGKAYTNYFGRCNVAEHEKLIKLAQLKPEKDSDEAVTYSLGKFGQRALDFYSIHVTKESTHPVKPLAQIAGNRYASGPVGKALSDACMGTIASFLSKYQDIIIEHQKVVKGNQKRLESLRELAGKENLEYPSVTLPPQPHTKEGVDAYNEVIARVRMWVNLNLWQKLKLSRDDAKPLLRLKNFPSFPLVERQANEVDWWDMVCNVKKLINEKKEDGKVFWQNLAGYKRQEALRPYLSSEEDRKKGKKFARYQLGDLLLHLEKKHGEDWGKVYDEAWERIDKKVEGLSKHIKLEEERRSEDAQSKAALTDWLRAKASFVIEGLKEADKDEFCRCELKLQKWYGDLRGKPFAIEAENSILDISGFSKQYNCAFIWQKDGVKKLNLYLIINYFKGGKLRFKKIKPEAFEANRFYTVINKKSGEIVPMEVNFNFDDPNLIILPLAFGKRQGREFIWNDLLSLETGSLKLANGRVIEKTLYNRRTRQDEPALFVALTFERREVLDSSNIKPMNLIGVDRGENIPAVIALTDPEGCPLSRFKDSLGNPTHILRIGESYKEKQRTIQAKKEVEQRRAGGYSRKYASKAKNLADDMVRNTARDLLYYAVTQDAMLIFENLSRGFGRQGKRTFMAERQYTRMEDWLTAKLAYEGLPSKTYLSKTLAQYTSKTCSNCGFTITSADYDRVLEKLKKTATGWMTTINGKELKVEGQITYYNRYKRQNVVKDLSVELDRLSEESVNNDISSWTKGRSGEALSLLKKRFSHRPVQEKFVCLNCGFETHADEQAALNIARSWLFLRSQEYKKYQTNKTTGNTDKRAFVETWQSFYRKKLKEVWKPAV

SEQ ID NO: 41809 - protein, 977 aa, synthetic construct
  REGION 1..977: note = engineered CasX variant
QEIKRISKIRRRLVKDSNTKKAGKTGPMKTLLVRVMTPDLRERLENLRKKPENIPQPISNTSRANLNKLLTDYTEMKKAILHVYWEEFQKDPVGLMSRVAQPASKKIDQNKLKPEMDEKGNLTTAGFACSQCGQPLFVYKLEQVSEKGKAYTNYFGRCNVAEHEKLILLAQLKPEKDSDEAVTYSLGKFGQRALDFYSIHVTKESTHPVKPLAQIAGNRYASPVGKALSDACMGTIASFLSKYQDIIIEHQKVVKGNQKRLESLRELAGKENLEYPSVTLPPQPHTKEGVDAYNEVIARVRMWVNLNLWQKLKLSRDDAKPLLRLKNFPSFPLVERQANEVDWWDMVCNVKKLINEKKEDGKVFWQNLAGYKRQEALRPYLSSEEDRKKGKKFARYQLGDLLLHLEKKHGEDWGKVYDEAWERIDKKVEGLSKHIKLEEERRSEDAQSKAALTDWLRAKASFVIEGLKEADKDEFCRCELKLQKWYGDLRGKPFAIEAENSILDISGFSKQYNCAFIWQKDGVKKLNLYLIINYFKGGKLRFKKIKPEAFEANRFYTVINKKSGEIVPMEVNFNFDDPNLIILPLAFGKRQGREFIWNDLLSLETGSLKLANGRVIEKTLYNRRTRQDEPALFVALTFERREVLDSSNIKPMNLIGVDRGENIPAVIALTDPEGCPLSRFKDSLGNPTHILRIGESYKEKQRTIQAKKEVEQRRAGGYSRKYASKAKNLADDMVRNTARDLLYYAVTQDAMLIFENLSRGFGRQGKRTFMAERQYTRMEDWLTAKLAYEGLPSKTYLSKTLAQYTSKTCSNCGFTITSADYDRVLEKLKKTATGWMTTINGKELKVEGQITYYNRYKRQNVVKDLSVELDRLSEESVNNDISSWTKGRSGEALSLLKKRFSHRPVQEKFVCLNCGFETHADEQAALNIARSWLFLRSQEYKKYQTNKTTGNTDKRAFVETWQSFYRKKLKEVWKPAV

SEQ ID NO: 41810 - protein, 978 aa, synthetic construct
  REGION 1..978: note = engineered CasX variant
QEIKRISKIRRRLVKDSNTKKAGKTGPMKTLLVRVMTPDLRERLENLRKKPENIPQPISNTSRANLNKLLTDYTEMKKAILHVYWEEFQKDPVGLMSRVAQPASKKIDQNKLKPEMDEKGNLTTAGFACSQCGQPLFVYKLEQVSEKGKAYTNYFGRCNVAEHEKLILLAQLKPEKDSDEAVTYSLGKFGQRALDFYSIHVTKESTHPVKPLAQIAGNRYASYPVGKALSDACMGTIASFLSKYQDIIIEHQKVVKGNQKRLESLRELAGKENLEYPSVTLPPQPHTKEGVDAYNEVIARVRMWVNLNLWQKLKLSRDDAKPLLRLKGFPSFPLVERQANEVDWWDMVCNVKKLINEKKEDGKVFWQNLAGYKRQEALRPYLSSEEDRKKGKKFARYQLGDLLNHLEKKHGEDWGKVYDEAWERIDKKVEGLSKHIKLEEERRSEDAQSKAALTDWLRAKASFVIEGLKEADKDEFCRCELKLQKWYGDLRGKPFAIEAENSILDISGFSKQYNCAFIWQKDGVKKLNLYLIINYFKGGKLRFKKIKPEAFEANRFYTVINKKSGEIVPMEVNFNFDDPNLIILPLAFGKRQGREFIWNDLLSLETGSLKLANGRVIEKTLYNRRTRQDEPALFVALTFERREVLDSSNIKPMNLIGVDRGENIPAVIALTDPEGCPLSRFKDSLGNPTHILRIGESYKEKQRTIQAKKEVEQRRAGGYSRKYASKAKNLADDMVRNTARDLLYYAVTQDAMLIFENLSRGFGRQGKRTFMAERQYTRMEDWLTAKLAYEGLPSKTYLSKTLAQYTSKTCSNCGFTITSADYDRVLEKLKKTATGWMTTINGKELKVEGQITYYNRYKRQNVVKDLSVELDRLSEESVNNDISSWTKGRSGEALSLLKKRFSHRPVQEKFVCLNCGFETHADEQAALNIARSWLFLRSQEYKKYQTNKTTGNTDKRAFVETWQSFYRKKLKEVWKPAV

SEQ ID NO: 41811 - protein, 978 aa, synthetic construct
  REGION 1..978: note = engineered CasX variant
QEIKRISKIRRRLVKDSNTKKAGKTGPMKTLLVRVMTPDLRERLENLRKKPENIPQPISNTSRANLNKLLTDYTEMKKAILHVYWEEFQKDPVGLMSRVAQPASKKIDQNKLKPEMDEKGNLTTAGFACSQCGQPLFVYKLEQVSEKGKAYTNYFGRCNVAEHEKLILLAQLKPEKDSDEAVTYSLGKFGQRALDFYSIHVTKESTHPVKPLAQIAGNRYASHPVGKALSDACMGTIASFLSKYQDIIIEHQKVVKGNQKRLESLRELAGKENLEYPSVTLPPQPHTKEGVDAYNEVIARVRMWVNLNLWQKLKLSRDDAKPLLRLKGFPSFPLVERQANEVDWWDMVCNVKKLINEKKEDGKVFWQNLAGYKRQEALRPYLSSEEDRKKGKKFARYQLGDLLNHLEKKHGEDWGKVYDEAWERIDKKVEGLSKHIKLEEERRSEDAQSKAALTDWLRAKASFVIEGLKEADKDEFCRCELKLQKWYGDLRGKPFAIEAENSILDISGFSKQYNCAFIWQKDGVKKLNLYLIINYFKGGKLRFKKIKPEAFEANRFYTVINKKSGEIVPMEVNFNFDDPNLIILPLAFGKRQGREFIWNDLLSLETGSLKLANGRVIEKTLYNRRTRQDEPALFVALTFERREVLDSSNIKPMNLIGVDRGENIPAVIALTDPEGCPLSRFKDSLGNPTHILRIGESYKEKQRTIQAKKEVEQRRAGGYSRKYASKAKNLADDMVRNTARDLLYYAVTQDAMLIFENLSRGFGRQGKRTFMAERQYTRMEDWLTAKLAYEGLPSKTYLSKTLAQYTSKTCSNCGFTITSADYDRVLEKLKKTATGWMTTINGKELKVEGQITYYNRYKRQNVVKDLSVELDRLSEESVNNDISSWTKGRSGEALSLLKKRFSHRPVQEKFVCLNCGFETHADEQAALNIARSWLFLRSQEYKKYQTNKTTGNTDKRAFVETWQSFYRKKLKEVWKPAV

SEQ ID NO: 41812 - protein, 978 aa, synthetic construct
  REGION 1..978: note = engineered CasX variant
QEIKRISKIRRRLVKDSNTKKAGKTGPMKTLLVRVMTPDLRERLENLRKKPENIPQPISNTSRANLNKLLTDYTEMKKAILHVYWEEFQKDPVGLMSRVAQPASKKIDQNKLKPEMDEKGNLTTAGFACSQCGQPLFVYKLEQVSEKGKAYTNYFGRCNVAEHEKLILLAQLKPEKDSDEAVTYSLGKFGQRALDFYSIHVTKESTHPVKPLAQIAGNRYASSPVGKALSDACMGTIASFLSKYQDIIIEHQKVVKGNQKRLESLRELAGKENLEYPSVTLPPQPHTKEGVDAYNEVIARVRMWVNLNLWQKLKLSRDDAKPLLRLKGFPSFPLVERQANEVDWWDMVCNVKKLINEKKEDGKVFWQNLAGYKRQEALRPYLSSEEDRKKGKKFARYQLGDLLNHLEKKHGEDWGKVYDEAWERIDKKVEGLSKHIKLEEERRSEDAQSKAALTDWLRAKASFVIEGLKEADKDEFCRCELKLQKWYGDLRGKPFAIEAENSILDISGFSKQYNCAFIWQKDGVKKLNLYLIINYFKGGKLRFKKIKPEAFEANRFYTVINKKSGEIVPMEVNFNFDDPNLIILPLAFGKRQGREFIWNDLLSLETGSLKLANGRVIEKTLYNRRTRQDEPALFVALTFERREVLDSSNIKPMNLIGVDRGENIPAVIALTDPEGCPLSRFKDSLGNPTHILRIGESYKEKQRTIQAKKEVEQRRAGGYSRKYASKAKNLADDMVRNTARDLLYYAVTQDAMLIFENLSRGFGRQGKRTFMAERQYTRMEDWLTAKLAYEGLPSKTYLSKTLAQYTSKTCSNCGFTITSADYDRVLEKLKKTATGWMTTINGKELKVEGQITYYNRYKRQNVVKDLSVELDRLSEESVNNDISSWTKGRSGEALSLLKKRFSHRPVQEKFVCLNCGFETHADEQAALNIARSWLFLRSQEYKKYQTNKTTGNTDKRAFVETWQSFYRKKLKEVWKPAV

SEQ ID NO: 41813 - protein, 978 aa, synthetic construct
  REGION 1..978: note = engineered CasX variant
QEIKRISKIRRRLVKDSNTKKAGKTGPMKTLLVRVMTPDLRERLENLRKKPENIPQPISNTSRANLNKLLTDYTEMKKAILHVYWEEFQKDPVGLMSRVAQPASKKIDQNKLKPEMDEKGNLTTAGFACSQCGQPLFVYKLEQVSEKGKAYTNYFGRCNVAEHEKLILLAQLKPEKDSDEAVTYSLGKFGQRALDFYSIHVTKESTHPVKPLAQIAGNRYASTPVGKALSDACMGTIASFLSKYQDIIIEHQKVVKGNQKRLESLRELAGKENLEYPSVTLPPQPHTKEGVDAYNEVIARVRMWVNLNLWQKLKLSRDDAKPLLRLKGFPSFPLVERQANEVDWWDMVCNVKKLINEKKEDGKVFWQNLAGYKRQEALRPYLSSEEDRKKGKKFARYQLGDLLNHLEKKHGEDWGKVYDEAWERIDKKVEGLSKHIKLEEERRSEDAQSKAALTDWLRAKASFVIEGLKEADKDEFCRCELKLQKWYGDLRGKPFAIEAENSILDISGFSKQYNCAFIWQKDGVKKLNLYLIINYFKGGKLRFKKIKPEAFEANRFYTVINKKSGEIVPMEVNFNFDDPNLIILPLAFGKRQGREFIWNDLLSLETGSLKLANGRVIEKTLYNRRTRQDEPALFVALTFERREVLDSSNIKPMNLIGVDRGENIPAVIALTDPEGCPLSRFKDSLGNPTHILRIGESYKEKQRTIQAKKEVEQRRAGGYSRKYASKAKNLADDMVRNTARDLLYYAVTQDAMLIFENLSRGFGRQGKRTFMAERQYTRMEDWLTAKLAYEGLPSKTYLSKTLAQYTSKTCSNCGFTITSADYDRVLEKLKKTATGWMTTINGKELKVEGQITYYNRYKRQNVVKDLSVELDRLSEESVNNDISSWTKGRSGEALSLLKKRFSHRPVQEKFVCLNCGFETHADEQAALNIARSWLFLRSQEYKKYQTNKTTGNTDKRAFVETWQSFYRKKLKEVWKPAV

SEQ ID NO: 41814 - protein, 978 aa, synthetic construct
  REGION 1..978: note = engineered CasX variant
QEIKRISKIRRRLVKDSNTKKAGKTGPMKTLLVRVMTPDLRERLENLRKKPENIPQPISNTSRANLNKLLTDYTEMKKAILHVYWEEFQKDPVGLMSRVAQPASKKIDQNKLKPEMDEKGNLTTAGFACSQCGQPLFVYKLEQVSEKGKAYTNYFGRCNVAEHEKLILLAQLKPEKDSDEAVTYSLGKFGQRALDFYSIHVTKESTHPVKPLAQIAGNRYASAPVGKALSDACMGTIASFLSKYQDIIIEHQKVVKGNQKRLESLRELAGKENLEYPSVTLPPQPHTKEGVDAYNEVIARVRMWVNLNLWQKLKLSRDDAKPLLRLKGFPSFPLVERQANEVDWWDMVCNVKKLINEKKEDGKVFWQNLAGYKRQEALRPYLSSEEDRKKGKKFARYQLGDLLNHLEKKHGEDWGKVYDEAWERIDKKVEGLSKHIKLEEERRSEDAQSKAALTDWLRAKASFVIEGLKEADKDEFCRCELKLQKWYGDLRGKPFAIEAENSILDISGFSKQYNCAFIWQKDGVKKLNLYLIINYFKGGKLRFKKIKPEAFEANRFYTVINKKSGEIVPMEVNFNFDDPNLIILPLAFGKRQGREFIWNDLLSLETGSLKLANGRVIEKTLYNRRTRQDEPALFVALTFERREVLDSSNIKPMNLIGVDRGENIPAVIALTDPEGCPLSRFKDSLGNPTHILRIGESYKEKQRTIQAKKEVEQRRAGGYSRKYASKAKNLADDMVRNTARDLLYYAVTQDAMLIFENLSRGFGRQGKRTFMAERQYTRMEDWLTAKLAYEGLPSKTYLSKTLAQYTSKTCSNCGFTITSADYDRVLEKLKKTATGWMTTINGKELKVEGQITYYNRYKRQNVVKDLSVELDRLSEESVNNDISSWTKGRSGEALSLLKKRFSHRPVQEKFVCLNCGFETHADEQAALNIARSWLFLRSQEYKKYQTNKTTGNTDKRAFVETWQSFYRKKLKEVWKPAV

SEQ ID NO: 41815 - protein, 978 aa, synthetic construct
  REGION 1..978: note = engineered CasX variant
QEIKRISKIRRRLVKDSNTKKAGKTGPMKTLLVRVMTPDLRERLENLRKKPENIPQPISNTSRANLNKLLTDYTEMKKAILHVYWEEFQKDPVGLMSRVAQPASKKIDQNKLKPEMDEKGNLTTAGFACSQCGQPLFVYKLEQVSEKGKAYTNYFGRCNVAEHEKLILLAQLKPEKDSDEAVTYSLGKFGQRALDFYSIHVTKESTHPVKPLAQIAGNRYASVPVGKALSDACMGTIASFLSKYQDIIIEHQKVVKGNQKRLESLRELAGKENLEYPSVTLPPQPHTKEGVDAYNEVIARVRMWVNLNLWQKLKLSRDDAKPLLRLKGFPSFPLVERQANEVDWWDMVCNVKKLINEKKEDGKVFWQNLAGYKRQEALRPYLSSEEDRKKGKKFARYQLGDLLNHLEKKHGEDWGKVYDEAWERIDKKVEGLSKHIKLEEERRSEDAQSKAALTDWLRAKASFVIEGLKEADKDEFCRCELKLQKWYGDLRGKPFAIEAENSILDISGFSKQYNCAFIWQKDGVKKLNLYLIINYFKGGKLRFKKIKPEAFEANRFYTVINKKSGEIVPMEVNFNFDDPNLIILPLAFGKRQGREFIWNDLLSLETGSLKLANGRVIEKTLYNRRTRQDEPALFVALTFERREVLDSSNIKPMNLIGVDRGENIPAVIALTDPEGCPLSRFKDSLGNPTHILRIGESYKEKQRTIQAKKEVEQRRAGGYSRKYASKAKNLADDMVRNTARDLLYYAVTQDAMLIFENLSRGFGRQGKRTFMAERQYTRMEDWLTAKLAYEGLPSKTYLSKTLAQYTSKTCSNCGFTITSADYDRVLEKLKKTATGWMTTINGKELKVEGQITYYNRYKRQNVVKDLSVELDRLSEESVNNDISSWTKGRSGEALSLLKKRFSHRPVQEKFVCLNCGFETHADEQAALNIARSWLFLRSQEYKKYQTNKTTGNTDKRAFVETWQSFYRKKLKEVWKPAV

SEQ ID NO: 41816 - protein, 978 aa, synthetic construct
  REGION 1..978: note = engineered CasX variant
QEIKRISKIRRRLVKDSNTKKAGKTGPMKTLLVRVMTPDLRERLENLRKKPENIPQPISNTSRANLNKLLTDYTEMKKAILHVYWEEFQKDPVGLMSRVAQPASKKIDQNKLKPEMDEKGNLTTAGFACSQCGQPLFVYKLEQVSEKGKAYTNYFGRCNVAEHEKLIKLAQLKPEKDSDEAVTYSLGKFGQRALDFYSIHVTKESTHPVKPLAQIAGNRYASGPVGKALSDACMGTIASFLSKYQDIIIEHQKVVKGNQKRLESLRELAGKENLEYPSVTLPPQPHTKEGVDAYNEVIARVRMWVNLNLWQKLKLSRDDAKPLLRLKGFPSFPLVERQANEVDWWDMVCNVKKLINEKKEDGKVFWQNLAGYKRQEALRPYLSSEEDRKKGKKFARYQLGDLLNHLEKKHGEDWGKVYDEAWERIDKKVEGLSKHIKLEEERRSEDAQSKAALTDWLRAKASFVIEGLKEADKDEFCRCELKLQKWYGDLRGKPFAIEAENSILDISGFSKQYNCAFIWQKDGVKKLNLYLIINYFKGGKLRFKKIKPEAFEANRFYTVINKKSGEIVPMEVNFNFDDPNLIILPLAFGKRQGREFIWNDLLSLETGSLKLANGRVIEKTLYNRRTRQDEPALFVALTFERREVLDSSNIKPMNLIGVDRGENIPAVIALTDPEGCPLSRFKDSLGNPTHILRIGESYKEKQRTIQAKKEVEQRRAGGYSRKYASKAKNLADDMVRNTARDLLYYAVTQDAMLIFENLSRGFGRQGKRTFMAERQYTRMEDWLTAKLAYEGLPSKTYLSKTLAQYTSKTCSNCGFTITSADYDRVLEKLKKTATGWMTTINGKELKVEGQITYYNRYKRQNVVKDLSVELDRLSEESVNNDISSWTKGRSGEALSLLKKRFSHRPVQEKFVCLNCGFETHADEQAALNIARSWLFLRSQEYKKYQTNKTTGNTDKRAFVETWQSFYRKKLKEVWKPAV

SEQ ID NO: 41817 - protein, 977 aa, synthetic construct
  REGION 1..977: note = engineered CasX variant
QEIKRISKIRRRLVKDSNTKKAGKTGPMKTLLVRVMTPDLRERLENLRKKPENIPQPISNTSRANLNKLLTDYTEMKKAILHVYWEEFQKDPVGLMSRVAQPASKKIDQNKLKPEMDEKGNLTTAGFACSQCGQPLFVYKLEQVSEKGKAYTNYFGRCNVAEHEKLILLAQLKPEKDSDEAVTYSLGKFGQRALDFYSIHVTKESTHPVKPLAQIAGNRYASPVGKALSDACMGTIASFLSKYQDIIIEHQKVVKGNQKRLESLRELAGKENLEYPSVTLPPQPHTKEGVDAYNEVIARVRMWVNLNLWQKLKLSRDDAKPLLRLKGFPSFPLVERQANEVDWWDMVCNVKKLINEKKEDGKVFWQNLAGYKRQEALRPYLSSEEDRKKGKKFARYQLGDLLNHLEKKHGEDWGKVYDEAWERIDKKVEGLSKHIKLEEERRSEDAQSKAALTDWLRAKASFVIEGLKEADKDEFCRCELKLQKWYGDLRGKPFAIEAENSILDISGFSKQYNCAFIWQKDGVKKLNLYLIINYFKGGKLRFKKIKPEAFEANRFYTVINKKSGEIVPMEVNFNFDDPNLIILPLAFGKRQGREFIWNDLLSLETGSLKLANGRVIEKTLYNRRTRQDEPALFVALTFERREVLDSSNIKPMNLIGVDRGENIPAVIALTDPEGCPLSRFKDSLGNPTHILRIGESYKEKQRTIQAKKEVEQRRAGGYSRKYASKAKNLADDMVRNTARDLLYYAVTQDAMLIFENLSRGFGRQGKRTFMAERQYTRMEDWLTAKLAYEGLPSKTYLSKTLAQYTSKTCSNCGFTITSADYDRVLEKLKKTATGWMTTINGKELKVEGQITYYNRYKRQNVVKDLSVELDRLSEESVNNDISSWTKGRSGEALSLLKKRFSHRPVQEKFVCLNCGFETHADEQAALNIARSWLFLRSQEYKKYQTNKTTGNTDKRAFVETWQSFYRKKLKEVWKPAV

SEQ ID NO: 41818 - protein, 978 aa, synthetic construct
  REGION 1..978: note = engineered CasX variant
QEIKRISKIRRRLVKDSNTKKAGKTGPMKTLLVRVMTPDLRERLENLRKKPENIPQPISNTSRANLNKLLTDYTEMKKAILHVYWEEFQKDPVGLMSRVAQPASKKIDQNKLKPEMDEKGNLTTAGFACSQCGQPLFVYKLEQVSEKGKAYTNYFGRCNVAEHEKLILLAQLKPEKDSDEAVTYSLGKFGQRALDFYSIHVTKESTHPVKPLAQIAGNRYASYPVGKALSDACMGTIASFLSKYQDIIIEHQKVVKGNQKRLESLRELAGKENLEYPSVTLPPQPHTKEGVDAYNEVIARVRMWVNLNLWQKLKLSRDDAKPLLRLKGFPSFPLVERQANEVDWWDMVCNVKKLINEKKEDGKVFWQNLAGYKRQEALRPYLSSEEDRKKGKKFARYQLGDLLWHLEKKHGEDWGKVYDEAWERIDKKVEGLSKHIKLEEERRSEDAQSKAALTDWLRAKASFVIEGLKEADKDEFCRCELKLQKWYGDLRGKPFAIEAENSILDISGFSKQYNCAFIWQKDGVKKLNLYLIINYFKGGKLRFKKIKPEAFEANRFYTVINKKSGEIVPMEVNFNFDDPNLIILPLAFGKRQGREFIWNDLLSLETGSLKLANGRVIEKTLYNRRTRQDEPALFVALTFERREVLDSSNIKPMNLIGVDRGENIPAVIALTDPEGCPLSRFKDSLGNPTHILRIGESYKEKQRTIQAKKEVEQRRAGGYSRKYASKAKNLADDMVRNTARDLLYYAVTQDAMLIFENLSRGFGRQGKRTFMAERQYTRMEDWLTAKLAYEGLPSKTYLSKTLAQYTSKTCSNCGFTITSADYDRVLEKLKKTATGWMTTINGKELKVEGQITYYNRYKRQNVVKDLSVELDRLSEESVNNDISSWTKGRSGEALSLLKKRFSHRPVQEKFVCLNCGFETHADEQAALNIARSWLFLRSQEYKKYQTNKTTGNTDKRAFVETWQSFYRKKLKEVWKPAV

SEQ ID NO: 41819 - protein, 978 aa, synthetic construct
  REGION 1..978: note = engineered CasX variant
QEIKRISKIRRRLVKDSNTKKAGKTGPMKTLLVRVMTPDLRERLENLRKKPENIPQPISNTSRANLNKLLTDYTEMKKAILHVYWEEFQKDPVGLMSRVAQPASKKIDQNKLKPEMDEKGNLTTAGFACSQCGQPLFVYKLEQVSEKGKAYTNYFGRCNVAEHEKLILLAQLKPEKDSDEAVTYSLGKFGQRALDFYSIHVTKESTHPVKPLAQIAGNRYASHPVGKALSDACMGTIASFLSKYQDIIIEHQKVVKGNQKRLESLRELAGKENLEYPSVTLPPQPHTKEGVDAYNEVIARVRMWVNLNLWQKLKLSRDDAKPLLRLKGFPSFPLVERQANEVDWWDMVCNVKKLINEKKEDGKVFWQNLAGYKRQEALRPYLSSEEDRKKGKKFARYQLGDLLWHLEKKHGEDWGKVYDEAWERIDKKVEGLSKHIKLEEERRSEDAQSKAALTDWLRAKASFVIEGLKEADKDEFCRCELKLQKWYGDLRGKPFAIEAENSILDISGFSKQYNCAFIWQKDGVKKLNLYLIINYFKGGKLRFKKIKPEAFEANRFYTVINKKSGEIVPMEVNFNFDDPNLIILPLAFGKRQGREFIWNDLLSLETGSLKLANGRVIEKTLYNRRTRQDEPALFVALTFERREVLDSSNIKPMNLIGVDRGENIPAVIALTDPEGCPLSRFKDSLGNPTHILRIGESYKEKQRTIQAKKEVEQRRAGGYSRKYASKAKNLADDMVRNTARDLLYYAVTQDAMLIFENLSRGFGRQGKRTFMAERQYTRMEDWLTAKLAYEGLPSKTYLSKTLAQYTSKTCSNCGFTITSADYDRVLEKLKKTATGWMTTINGKELKVEGQITYYNRYKRQNVVKDLSVELDRLSEESVNNDISSWTKGRSGEALSLLKKRFSHRPVQEKFVCLNCGFETHADEQAALNIARSWLFLRSQEYKKYQTNKTTGNTDKRAFVETWQSFYRKKLKEVWKPAV

SEQ ID NO: 41820 - protein, 978 aa, synthetic construct
  REGION 1..978: note = engineered CasX variant
QEIKRISKIRRRLVKDSNTKKAGKTGPMKTLLVRVMTPDLRERLENLRKKPENIPQPISNTSRANLNKLLTDYTEMKKAILHVYWEEFQKDPVGLMSRVAQPASKKIDQNKLKPEMDEKGNLTTAGFACSQCGQPLFVYKLEQVSEKGKAYTNYFGRCNVAEHEKLILLAQLKPEKDSDEAVTYSLGKFGQRALDFYSIHVTKESTHPVKPLAQIAGNRYASSPVGKALSDACMGTIASFLSKYQDIIIEHQKVVKGNQKRLESLRELAGKENLEYPSVTLPPQPHTKEGVDAYNEVIARVRMWVNLNLWQKLKLSRDDAKPLLRLKGFPSFPLVERQANEVDWWDMVCNVKKLINEKKEDGKVFWQNLAGYKRQEALRPYLSSEEDRKKGKKFARYQLGDLLWHLEKKHGEDWGKVYDEAWERIDKKVEGLSKHIKLEEERRSEDAQSKAALTDWLRAKASFVIEGLKEADKDEFCRCELKLQKWYGDLRGKPFAIEAENSILDISGFSKQYNCAFIWQKDGVKKLNLYLIINYFKGGKLRFKKIKPEAFEANRFYTVINKKSGEIVPMEVNFNFDDPNLIILPLAFGKRQGREFIWNDLLSLETGSLKLANGRVIEKTLYNRRTRQDEPALFVALTFERREVLDSSNIKPMNLIGVDRGENIPAVIALTDPEGCPLSRFKDSLGNPTHILRIGESYKEKQRTIQAKKEVEQRRAGGYSRKYASKAKNLADDMVRNTARDLLYYAVTQDAMLIFENLSRGFGRQGKRTFMAERQYTRMEDWLTAKLAYEGLPSKTYLSKTLAQYTSKTCSNCGFTITSADYDRVLEKLKKTATGWMTTINGKELKVEGQITYYNRYKRQNVVKDLSVELDRLSEESVNNDISSWTKGRSGEALSLLKKRFSHRPVQEKFVCLNCGFETHADEQAALNIARSWLFLRSQEYKKYQTNKTTGNTDKRAFVETWQSFYRKKLKEVWKPAV

SEQ ID NO: 41821 - protein, 978 aa, synthetic construct
  REGION 1..978: note = engineered CasX variant
QEIKRISKIRRRLVKDSNTKKAGKTGPMKTLLVRVMTPDLRERLENLRKKPENIPQPISNTSRANLNKLLTDYTEMKKAILHVYWEEFQKDPVGLMSRVAQPASKKIDQNKLKPEMDEKGNLTTAGFACSQCGQPLFVYKLEQVSEKGKAYTNYFGRCNVAEHEKLILLAQLKPEKDSDEAVTYSLGKFGQRALDFYSIHVTKESTHPVKPLAQIAGNRYASTPVGKALSDACMGTIASFLSKYQDIIIEHQKVVKGNQKRLESLRELAGKENLEYPSVTLPPQPHTKEGVDAYNEVIARVRMWVNLNLWQKLKLSRDDAKPLLRLKGFPSFPLVERQANEVDWWDMVCNVKKLINEKKEDGKVFWQNLAGYKRQEALRPYLSSEEDRKKGKKFARYQLGDLLWHLEKKHGEDWGKVYDEAWERIDKKVEGLSKHIKLEEERRSEDAQSKAALTDWLRAKASFVIEGLKEADKDEFCRCELKLQKWYGDLRGKPFAIEAENSILDISGFSKQYNCAFIWQKDGVKKLNLYLIINYFKGGKLRFKKIKPEAFEANRFYTVINKKSGEIVPMEVNFNFDDPNLIILPLAFGKRQGREFIWNDLLSLETGSLKLANGRVIEKTLYNRRTRQDEPALFVALTFERREVLDSSNIKPMNLIGVDRGENIPAVIALTDPEGCPLSRFKDSLGNPTHILRIGESYKEKQRTIQAKKEVEQRRAGGYSRKYASKAKNLADDMVRNTARDLLYYAVTQDAMLIFENLSRGFGRQGKRTFMAERQYTRMEDWLTAKLAYEGLPSKTYLSKTLAQYTSKTCSNCGFTITSADYDRVLEKLKKTATGWMTTINGKELKVEGQITYYNRYKRQNVVKDLSVELDRLSEESVNNDISSWTKGRSGEALSLLKKRFSHRPVQEKFVCLNCGFETHADEQAALNIARSWLFLRSQEYKKYQTNKTTGNTDKRAFVETWQSFYRKKLKEVWKPAV

SEQ ID NO: 41822 - protein, 978 aa, synthetic construct
  REGION 1..978: note = engineered CasX variant
QEIKRISKIRRRLVKDSNTKKAGKTGPMKTLLVRVMTPDLRERLENLRKKPENIPQPISNTSRANLNKLLTDYTEMKKAILHVYWEEFQKDPVGLMSRVAQPASKKIDQNKLKPEMDEKGNLTTAGFACSQCGQPLFVYKLEQVSEKGKAYTNYFGRCNVAEHEKLILLAQLKPEKDSDEAVTYSLGKFGQRALDFYSIHVTKESTHPVKPLAQIAGNRYASAPVGKALSDACMGTIASFLSKYQDIIIEHQKVVKGNQKRLESLRELAGKENLEYPSVTLPPQPHTKEGVDAYNEVIARVRMWVNLNLWQKLKLSRDDAKPLLRLKGFPSFPLVERQANEVDWWDMVCNVKKLINEKKEDGKVFWQNLAGYKRQEALRPYLSSEEDRKKGKKFARYQLGDLLWHLEKKHGEDWGKVYDEAWERIDKKVEGLSKHIKLEEERRSEDAQSKAALTDWLRAKASFVIEGLKEADKDEFCRCELKLQKWYGDLRGKPFAIEAENSILDISGFSKQYNCAFIWQKDGVKKLNLYLIINYFKGGKLRFKKIKPEAFEANRFYTVINKKSGEIVPMEVNFNFDDPNLIILPLAFGKRQGREFIWNDLLSLETGSLKLANGRVIEKTLYNRRTRQDEPALFVALTFERREVLDSSNIKPMNLIGVDRGENIPAVIALTDPEGCPLSRFKDSLGNPTHILRIGESYKEKQRTIQAKKEVEQRRAGGYSRKYASKAKNLADDMVRNTARDLLYYAVTQDAMLIFENLSRGFGRQGKRTFMAERQYTRMEDWLTAKLAYEGLPSKTYLSKTLAQYTSKTCSNCGFTITSADYDRVLEKLKKTATGWMTTINGKELKVEGQITYYNRYKRQNVVKDLSVELDRLSEESVNNDISSWTKGRSGEALSLLKKRFSHRPVQEKFVCLNCGFETHADEQAALNIARSWLFLRSQEYKKYQTNKTTGNTDKRAFVETWQSFYRKKLKEVWKPAV

SEQ ID NO: 41823 - protein, 978 aa, synthetic construct
  REGION 1..978: note = engineered CasX variant
QEIKRISKIRRRLVKDSNTKKAGKTGPMKTLLVRVMTPDLRERLENLRKKPENIPQPISNTSRANLNKLLTDYTEMKKAILHVYWEEFQKDPVGLMSRVAQPASKKIDQNKLKPEMDEKGNLTTAGFACSQCGQPLFVYKLEQVSEKGKAYTNYFGRCNVAEHEKLILLAQLKPEKDSDEAVTYSLGKFGQRALDFYSIHVTKESTHPVKPLAQIAGNRYASVPVGKALSDACMGTIASFLSKYQDIIIEHQKVVKGNQKRLESLRELAGKENLEYPSVTLPPQPHTKEGVDAYNEVIARVRMWVNLNLWQKLKLSRDDAKPLLRLKGFPSFPLVERQANEVDWWDMVCNVKKLINEKKEDGKVFWQNLAGYKRQEALRPYLSSEEDRKKGKKFARYQLGDLLWHLEKKHGEDWGKVYDEAWERIDKKVEGLSKHIKLEEERRSEDAQSKAALTDWLRAKASFVIEGLKEADKDEFCRCELKLQKWYGDLRGKPFAIEAENSILDISGFSKQYNCAFIWQKDGVKKLNLYLIINYFKGGKLRFKKIKPEAFEANRFYTVINKKSGEIVPMEVNFNFDDPNLIILPLAFGKRQGREFIWNDLLSLETGSLKLANGRVIEKTLYNRRTRQDEPALFVALTFERREVLDSSNIKPMNLIGVDRGENIPAVIALTDPEGCPLSRFKDSLGNPTHILRIGESYKEKQRTIQAKKEVEQRRAGGYSRKYASKAKNLADDMVRNTARDLLYYAVTQDAMLIFENLSRGFGRQGKRTFMAERQYTRMEDWLTAKLAYEGLPSKTYLSKTLAQYTSKTCSNCGFTITSADYDRVLEKLKKTATGWMTTINGKELKVEGQITYYNRYKRQNVVKDLSVELDRLSEESVNNDISSWTKGRSGEALSLLKKRFSHRPVQEKFVCLNCGFETHADEQAALNIARSWLFLRSQEYKKYQTNKTTGNTDKRAFVETWQSFYRKKLKEVWKPAV

SEQ ID NO: 41824 - protein, 978 aa, synthetic construct
  REGION 1..978: note = engineered CasX variant
QEIKRISKIRRRLVKDSNTKKAGKTGPMKTLLVRVMTPDLRERLENLRKKPENIPQPISNTSRANLNKLLTDYTEMKKAILHVYWEEFQKDPVGLMSRVAQPASKKIDQNKLKPEMDEKGNLTTAGFACSQCGQPLFVYKLEQVSEKGKAYTNYFGRCNVAEHEKLIKLAQLKPEKDSDEAVTYSLGKFGQRALDFYSIHVTKESTHPVKPLAQIAGNRYASGPVGKALSDACMGTIASFLSKYQDIIIEHQKVVKGNQKRLESLRELAGKENLEYPSVTLPPQPHTKEGVDAYNEVIARVRMWVNLNLWQKLKLSRDDAKPLLRLKGFPSFPLVERQANEVDWWDMVCNVKKLINEKKEDGKVFWQNLAGYKRQEALRPYLSSEEDRKKGKKFARYQLGDLLWHLEKKHGEDWGKVYDEAWERIDKKVEGLSKHIKLEEERRSEDAQSKAALTDWLRAKASFVIEGLKEADKDEFCRCELKLQKWYGDLRGKPFAIEAENSILDISGFSKQYNCAFIWQKDGVKKLNLYLIINYFKGGKLRFKKIKPEAFEANRFYTVINKKSGEIVPMEVNFNFDDPNLIILPLAFGKRQGREFIWNDLLSLETGSLKLANGRVIEKTLYNRRTRQDEPALFVALTFERREVLDSSNIKPMNLIGVDRGENIPAVIALTDPEGCPLSRFKDSLGNPTHILRIGESYKEKQRTIQAKKEVEQRRAGGYSRKYASKAKNLADDMVRNTARDLLYYAVTQDAMLIFENLSRGFGRQGKRTFMAERQYTRMEDWLTAKLAYEGLPSKTYLSKTLAQYTSKTCSNCGFTITSADYDRVLEKLKKTATGWMTTINGKELKVEGQITYYNRYKRQNVVKDLSVELDRLSEESVNNDISSWTKGRSGEALSLLKKRFSHRPVQEKFVCLNCGFETHADEQAALNIARSWLFLRSQEYKKYQTNKTTGNTDKRAFVETWQSFYRKKLKEVWKPAV

SEQ ID NO: 41825 - protein, 977 aa, synthetic construct
  REGION 1..977: note = engineered CasX variant
QEIKRISKIRRRLVKDSNTKKAGKTGPMKTLLVRVMTPDLRERLENLRKKPENIPQPISNTSRANLNKLLTDYTEMKKAILHVYWEEFQKDPVGLMSRVAQPASKKIDQNKLKPEMDEKGNLTTAGFACSQCGQPLFVYKLEQVSEKGKAYTNYFGRCNVAEHEKLILLAQLKPEKDSDEAVTYSLGKFGQRALDFYSIHVTKESTHPVKPLAQIAGNRYASPVGKALSDACMGTIASFLSKYQDIIIEHQKVVKGNQKRLESLRELAGKENLEYPSVTLPPQPHTKEGVDAYNEVIARVRMWVNLNLWQKLKLSRDDAKPLLRLKGFPSFPLVERQANEVDWWDMVCNVKKLINEKKEDGKVFWQNLAGYKRQEALRPYLSSEEDRKKGKKFARYQLGDLLWHLEKKHGEDWGKVYDEAWERIDKKVEGLSKHIKLEEERRSEDAQSKAALTDWLRAKASFVIEGLKEADKDEFCRCELKLQKWYGDLRGKPFAIEAENSILDISGFSKQYNCAFIWQKDGVKKLNLYLIINYFKGGKLRFKKIKPEAFEANRFYTVINKKSGEIVPMEVNFNFDDPNLIILPLAFGKRQGREFIWNDLLSLETGSLKLANGRVIEKTLYNRRTRQDEPALFVALTFERREVLDSSNIKPMNLIGVDRGENIPAVIALTDPEGCPLSRFKDSLGNPTHILRIGESYKEKQRTIQAKKEVEQRRAGGYSRKYASKAKNLADDMVRNTARDLLYYAVTQDAMLIFENLSRGFGRQGKRTFMAERQYTRMEDWLTAKLAYEGLPSKTYLSKTLAQYTSKTCSNCGFTITSADYDRVLEKLKKTATGWMTTINGKELKVEGQITYYNRYKRQNVVKDLSVELDRLSEESVNNDISSWTKGRSGEALSLLKKRFSHRPVQEKFVCLNCGFETHADEQAALNIARSWLFLRSQEYKKYQTNKTTGNTDKRAFVETWQSFYRKKLKEVWKPAV

SEQ ID NO: 41826 - protein, 978 aa, synthetic construct
  REGION 1..978: note = engineered CasX variant
QEIKRISKIRRRLVKDSNTKKAGKTGPMKTLLVRVMTPDLRERLENLRKKPENIPQPISNTSRANLNKLLTDYTEMKKAILHVYWEEFQKDPVGLMSRVAQPASKKIDQNKLKPEMDEKGNLTTAGFACSQCGQPLFVYKLEQVSEKGKAYTNYFGRCNVAEHEKLILLAQLKPEKDSDEAVTYSLGKFGQRALDFYSIHVTKESTHPVKPLAQIAGNRYASYPVGKALSDACMGTIASFLSKYQDIIIEHQKVVKGNQKRLESLRELAGKENLEYPSVTLPPQPHTKEGVDAYNEVIARVRMWVNLNLWQKLKLSRDDAKPLLRLKGFPSFPLVERQANEVDWWDMVCNVKKLINEKKEDGKVFWQNLAGYKRQEALRPYLSSEEDRKKGKKFARYQLGDLLLHLYKKHGEDWGKVYDEAWERIDKKVEGLSKHIKLEEERRSEDAQSKAALTDWLRAKASFVIEGLKEADKDEFCRCELKLQKWYGDLRGKPFAIEAENSILDISGFSKQYNCAFIWQKDGVKKLNLYLIINYFKGGKLRFKKIKPEAFEANRFYTVINKKSGEIVPMEVNFNFDDPNLIILPLAFGKRQGREFIWNDLLSLETGSLKLANGRVIEKTLYNRRTRQDEPALFVALTFERREVLDSSNIKPMNLIGVDRGENIPAVIALTDPEGCPLSRFKDSLGNPTHILRIGESYKEKQRTIQAKKEVEQRRAGGYSRKYASKAKNLADDMVRNTARDLLYYAVTQDAMLIFENLSRGFGRQGKRTFMAERQYTRMEDWLTAKLAYEGLPSKTYLSKTLAQYTSKTCSNCGFTITSADYDRVLEKLKKTATGWMTTINGKELKVEGQITYYNRYKRQNVVKDLSVELDRLSEESVNNDISSWTKGRSGEALSLLKKRFSHRPVQEKFVCLNCGFETHADEQAALNIARSWLFLRSQEYKKYQTNKTTGNTDKRAFVETWQSFYRKKLKEVWKPAV

SEQ ID NO: 41827 - protein, 978 aa, synthetic construct
  REGION 1..978: note = engineered CasX variant
QEIKRISKIRRRLVKDSNTKKAGKTGPMKTLLVRVMTPDLRERLENLRKKPENIPQPISNTSRANLNKLLTDYTEMKKAILHVYWEEFQKDPVGLMSRVAQPASKKIDQNKLKPEMDEKGNLTTAGFACSQCGQPLFVYKLEQVSEKGKAYTNYFGRCNVAEHEKLILLAQLKPEKDSDEAVTYSLGKFGQRALDFYSIHVTKESTHPVKPLAQIAGNRYASHPVGKALSDACMGTIASFLSKYQDIIIEHQKVVKGNQKRLESLRELAGKENLEYPSVTLPPQPHTKEGVDAYNEVIARVRMWVNLNLWQKLKLSRDDAKPLLRLKGFPSFPLVERQANEVDWWDMVCNVKKLINEKKEDGKVFWQNLAGYKRQEALRPYLSSEEDRKKGKKFARYQLGDLLLHLYKKHGEDWGKVYDEAWERIDKKVEGLSKHIKLEEERRSEDAQSKAALTDWLRAKASFVIEGLKEADKDEFCRCELKLQKWYGDLRGKPFAIEAENSILDISGFSKQYNCAFIWQKDGVKKLNLYLIINYFKGGKLRFKKIKPEAFEANRFYTVINKKSGEIVPMEVNFNFDDPNLIILPLAFGKRQGREFIWNDLLSLETGSLKLANGRVIEKTLYNRRTRQDEPALFVALTFERREVLDSSNIKPMNLIGVDRGENIPAVIALTDPEGCPLSRFKDSLGNPTHILRIGESYKEKQRTIQAKKEVEQRRAGGYSRKYASKAKNLADDMVRNTARDLLYYAVTQDAMLIFENLSRGFGRQGKRTFMAERQYTRMEDWLTAKLAYEGLPSKTYLSKTLAQYTSKTCSNCGFTITSADYDRVLEKLKKTATGWMTTINGKELKVEGQITYYNRYKRQNVVKDLSVELDRLSEESVNNDISSWTKGRSGEALSLLKKRFSHRPVQEKFVCLNCGFETHADEQAALNIARSWLFLRSQEYKKYQTNKTTGNTDKRAFVETWQSFYRKKLKEVWKPAV

SEQ ID NO: 41828 - protein, 978 aa, synthetic construct
  REGION 1..978: note = engineered CasX variant
QEIKRISKIRRRLVKDSNTKKAGKTGPMKTLLVRVMTPDLRERLENLRKKPENIPQPISNTSRANLNKLLTDYTEMKKAILHVYWEEFQKDPVGLMSRVAQPASKKIDQNKLKPEMDEKGNLTTAGFACSQCGQPLFVYKLEQVSEKGKAYTNYFGRCNVAEHEKLILLAQLKPEKDSDEAVTYSLGKFGQRALDFYSIHVTKESTHPVKPLAQIAGNRYASSPVGKALSDACMGTIASFLSKYQDIIIEHQKVVKGNQKRLESLRELAGKENLEYPSVTLPPQPHTKEGVDAYNEVIARVRMWVNLNLWQKLKLSRDDAKPLLRLKGFPSFPLVERQANEVDWWDMVCNVKKLINEKKEDGKVFWQNLAGYKRQEALRPYLSSEEDRKKGKKFARYQLGDLLLHLYKKHGEDWGKVYDEAWERIDKKVEGLSKHIKLEEERRSEDAQSKAALTDWLRAKASFVIEGLKEADKDEFCRCELKLQKWYGDLRGKPFAIEAENSILDISGFSKQYNCAFIWQKDGVKKLNLYLIINYFKGGKLRFKKIKPEAFEANRFYTVINKKSGEIVPMEVNFNFDDPNLIILPLAFGKRQGREFIWNDLLSLETGSLKLANGRVIEKTLYNRRTRQDEPALFVALTFERREVLDSSNIKPMNLIGVDRGENIPAVIALTDPEGCPLSRFKDSLGNPTHILRIGESYKEKQRTIQAKKEVEQRRAGGYSRKYASKAKNLADDMVRNTARDLLYYAVTQDAMLIFENLSRGFGRQGKRTFMAERQYTRMEDWLTAKLAYEGLPSKTYLSKTLAQYTSKTCSNCGFTITSADYDRVLEKLKKTATGWMTTINGKELKVEGQITYYNRYKRQNVVKDLSVELDRLSEESVNNDISSWTKGRSGEALSLLKKRFSHRPVQEKFVCLNCGFETHADEQAALNIARSWLFLRSQEYKKYQTNKTTGNTDKRAFVETWQSFYRKKLKEVWKPAV

SEQ ID NO: 41829 - protein, 978 aa, synthetic construct
  REGION 1..978: note = engineered CasX variant
QEIKRISKIRRRLVKDSNTKKAGKTGPMKTLLVRVMTPDLRERLENLRKKPENIPQPISNTSRANLNKLLTDYTEMKKAILHVYWEEFQKDPVGLMSRVAQPASKKIDQNKLKPEMDEKGNLTTAGFACSQCGQPLFVYKLEQVSEKGKAYTNYFGRCNVAEHEKLILLAQLKPEKDSDEAVTYSLGKFGQRALDFYSIHVTKESTHPVKPLAQIAGNRYASTPVGKALSDACMGTIASFLSKYQDIIIEHQKVVKGNQKRLESLRELAGKENLEYPSVTLPPQPHTKEGVDAYNEVIARVRMWVNLNLWQKLKLSRDDAKPLLRLKGFPSFPLVERQANEVDWWDMVCNVKKLINEKKEDGKVFWQNLAGYKRQEALRPYLSSEEDRKKGKKFARYQLGDLLLHLYKKHGEDWGKVYDEAWERIDKKVEGLSKHIKLEEERRSEDAQSKAALTDWLRAKASFVIEGLKEADKDEFCRCELKLQKWYGDLRGKPFAIEAENSILDISGFSKQYNCAFIWQKDGVKKLNLYLIINYFKGGKLRFKKIKPEAFEANRFYTVINKKSGEIVPMEVNFNFDDPNLIILPLAFGKRQGREFIWNDLLSLETGSLKLANGRVIEKTLYNRRTRQDEPALFVALTFERREVLDSSNIKPMNLIGVDRGENIPAVIALTDPEGCPLSRFKDSLGNPTHILRIGESYKEKQRTIQAKKEVEQRRAGGYSRKYASKAKNLADDMVRNTARDLLYYAVTQDAMLIFENLSRGFGRQGKRTFMAERQYTRMEDWLTAKLAYEGLPSKTYLSKTLAQYTSKTCSNCGFTITSADYDRVLEKLKKTATGWMTTINGKELKVEGQITYYNRYKRQNVVKDLSVELDRLSEESVNNDISSWTKGRSGEALSLLKKRFSHRPVQEKFVCLNCGFETHADEQAALNIARSWLFLRSQEYKKYQTNKTTGNTDKRAFVETWQSFYRKKLKEVWKPAV

SEQ ID NO: 41830 - protein, 978 aa, synthetic construct
  REGION 1..978: note = engineered CasX variant
QEIKRISKIRRRLVKDSNTKKAGKTGPMKTLLVRVMTPDLRERLENLRKKPENIPQPISNTSRANLNKLLTDYTEMKKAILHVYWEEFQKDPVGLMSRVAQPASKKIDQNKLKPEMDEKGNLTTAGFACSQCGQPLFVYKLEQVSEKGKAYTNYFGRCNVAEHEKLILLAQLKPEKDSDEAVTYSLGKFGQRALDFYSIHVTKESTHPVKPLAQIAGNRYASAPVGKALSDACMGTIASFLSKYQDIIIEHQKVVKGNQKRLESLRELAGKENLEYPSVTLPPQPHTKEGVDAYNEVIARVRMWVNLNLWQKLKLSRDDAKPLLRLKGFPSFPLVERQANEVDWWDMVCNVKKLINEKKEDGKVFWQNLAGYKRQEALRPYLSSEEDRKKGKKFARYQLGDLLLHLYKKHGEDWGKVYDEAWERIDKKVEGLSKHIKLEEERRSEDAQSKAALTDWLRAKASFVIEGLKEADKDEFCRCELKLQKWYGDLRGKPFAIEAENSILDISGFSKQYNCAFIWQKDGVKKLNLYLIINYFKGGKLRFKKIKPEAFEANRFYTVINKKSGEIVPMEVNFNFDDPNLIILPLAFGKRQGREFIWNDLLSLETGSLKLANGRVIEKTLYNRRTRQDEPALFVALTFERREVLDSSNIKPMNLIGVDRGENIPAVIALTDPEGCPLSRFKDSLGNPTHILRIGESYKEKQRTIQAKKEVEQRRAGGYSRKYASKAKNLADDMVRNTARDLLYYAVTQDAMLIFENLSRGFGRQGKRTFMAERQYTRMEDWLTAKLAYEGLPSKTYLSKTLAQYTSKTCSNCGFTITSADYDRVLEKLKKTATGWMTTINGKELKVEGQITYYNRYKRQNVVKDLSVELDRLSEESVNNDISSWTKGRSGEALSLLKKRFSHRPVQEKFVCLNCGFETHADEQAALNIARSWLFLRSQEYKKYQTNKTTGNTDKRAFVETWQSFYRKKLKEVWKPAV

SEQ ID NO: 41831 - protein, 978 aa, synthetic construct
  REGION 1..978: note = engineered CasX variant
QEIKRISKIRRRLVKDSNTKKAGKTGPMKTLLVRVMTPDLRERLENLRKKPENIPQPISNTSRANLNKLLTDYTEMKKAILHVYWEEFQKDPVGLMSRVAQPASKKIDQNKLKPEMDEKGNLTTAGFACSQCGQPLFVYKLEQVSEKGKAYTNYFGRCNVAEHEKLILLAQLKPEKDSDEAVTYSLGKFGQRALDFYSIHVTKESTHPVKPLAQIAGNRYASVPVGKALSDACMGTIASFLSKYQDIIIEHQKVVKGNQKRLESLRELAGKENLEYPSVTLPPQPHTKEGVDAYNEVIARVRMWVNLNLWQKLKLSRDDAKPLLRLKGFPSFPLVERQANEVDWWDMVCNVKKLINEKKEDGKVFWQNLAGYKRQEALRPYLSSEEDRKKGKKFARYQLGDLLLHLYKKHGEDWGKVYDEAWERIDKKVEGLSKHIKLEEERRSEDAQSKAALTDWLRAKASFVIEGLKEADKDEFCRCELKLQKWYGDLRGKPFAIEAENSILDISGFSKQYNCAFIWQKDGVKKLNLYLIINYFKGGKLRFKKIKPEAFEANRFYTVINKKSGEIVPMEVNFNFDDPNLIILPLAFGKRQGREFIWNDLLSLETGSLKLANGRVIEKTLYNRRTRQDEPALFVALTFERREVLDSSNIKPMNLIGVDRGENIPAVIALTDPEGCPLSRFKDSLGNPTHILRIGESYKEKQRTIQAKKEVEQRRAGGYSRKYASKAKNLADDMVRNTARDLLYYAVTQDAMLIFENLSRGFGRQGKRTFMAERQYTRMEDWLTAKLAYEGLPSKTYLSKTLAQYTSKTCSNCGFTITSADYDRVLEKLKKTATGWMTTINGKELKVEGQITYYNRYKRQNVVKDLSVELDRLSEESVNNDISSWTKGRSGEALSLLKKRFSHRPVQEKFVCLNCGFETHADEQAALNIARSWLFLRSQEYKKYQTNKTTGNTDKRAFVETWQSFYRKKLKEVWKPAV

SEQ ID NO: 41832 - protein, 978 aa, synthetic construct
  REGION 1..978: note = engineered CasX variant
QEIKRISKIRRRLVKDSNTKKAGKTGPMKTLLVRVMTPDLRERLENLRKKPENIPQPISNTSRANLNKLLTDYTEMKKAILHVYWEEFQKDPVGLMSRVAQPASKKIDQNKLKPEMDEKGNLTTAGFACSQCGQPLFVYKLEQVSEKGKAYTNYFGRCNVAEHEKLIKLAQLKPEKDSDEAVTYSLGKFGQRALDFYSIHVTKESTHPVKPLAQIAGNRYASGPVGKALSDACMGTIASFLSKYQDIIIEHQKVVKGNQKRLESLRELAGKENLEYPSVTLPPQPHTKEGVDAYNEVIARVRMWVNLNLWQKLKLSRDDAKPLLRLKGFPSFPLVERQANEVDWWDMVCNVKKLINEKKEDGKVFWQNLAGYKRQEALRPYLSSEEDRKKGKKFARYQLGDLLLHLYKKHGEDWGKVYDEAWERIDKKVEGLSKHIKLEEERRSEDAQSKAALTDWLRAKASFVIEGLKEADKDEFCRCELKLQKWYGDLRGKPFAIEAENSILDISGFSKQYNCAFIWQKDGVKKLNLYLIINYFKGGKLRFKKIKPEAFEANRFYTVINKKSGEIVPMEVNFNFDDPNLIILPLAFGKRQGREFIWNDLLSLETGSLKLANGRVIEKTLYNRRTRQDEPALFVALTFERREVLDSSNIKPMNLIGVDRGENIPAVIALTDPEGCPLSRFKDSLGNPTHILRIGESYKEKQRTIQAKKEVEQRRAGGYSRKYASKAKNLADDMVRNTARDLLYYAVTQDAMLIFENLSRGFGRQGKRTFMAERQYTRMEDWLTAKLAYEGLPSKTYLSKTLAQYTSKTCSNCGFTITSADYDRVLEKLKKTATGWMTTINGKELKVEGQITYYNRYKRQNVVKDLSVELDRLSEESVNNDISSWTKGRSGEALSLLKKRFSHRPVQEKFVCLNCGFETHADEQAALNIARSWLFLRSQEYKKYQTNKTTGNTDKRAFVETWQSFYRKKLKEVWKPAV

SEQ ID NO: 41833 - protein, 977 aa, synthetic construct
  REGION 1..977: note = engineered CasX variant
QEIKRISKIRRRLVKDSNTKKAGKTGPMKTLLVRVMTPDLRERLENLRKKPENIPQPISNTSRANLNKLLTDYTEMKKAILHVYWEEFQKDPVGLMSRVAQPASKKIDQNKLKPEMDEKGNLTTAGFACSQCGQPLFVYKLEQVSEKGKAYTNYFGRCNVAEHEKLILLAQLKPEKDSDEAVTYSLGKFGQRALDFYSIHVTKESTHPVKPLAQIAGNRYASPVGKALSDACMGTIASFLSKYQDIIIEHQKVVKGNQKRLESLRELAGKENLEYPSVTLPPQPHTKEGVDAYNEVIARVRMWVNLNLWQKLKLSRDDAKPLLRLKGFPSFPLVERQANEVDWWDMVCNVKKLINEKKEDGKVFWQNLAGYKRQEALRPYLSSEEDRKKGKKFARYQLGDLLLHLYKKHGEDWGKVYDEAWERIDKKVEGLSKHIKLEEERRSEDAQSKAALTDWLRAKASFVIEGLKEADKDEFCRCELKLQKWYGDLRGKPFAIEAENSILDISGFSKQYNCAFIWQKDGVKKLNLYLIINYFKGGKLRFKKIKPEAFEANRFYTVINKKSGEIVPMEVNFNFDDPNLIILPLAFGKRQGREFIWNDLLSLETGSLKLANGRVIEKTLYNRRTRQDEPALFVALTFERREVLDSSNIKPMNLIGVDRGENIPAVIALTDPEGCPLSRFKDSLGNPTHILRIGESYKEKQRTIQAKKEVEQRRAGGYSRKYASKAKNLADDMVRNTARDLLYYAVTQDAMLIFENLSRGFGRQGKRTFMAERQYTRMEDWLTAKLAYEGLPSKTYLSKTLAQYTSKTCSNCGFTITSADYDRVLEKLKKTATGWMTTINGKELKVEGQITYYNRYKRQNVVKDLSVELDRLSEESVNNDISSWTKGRSGEALSLLKKRFSHRPVQEKFVCLNCGFETHADEQAALNIARSWLFLRSQEYKKYQTNKTTGNTDKRAFVETWQSFYRKKLKEVWKPAV

SEQ ID NO: 41834 - protein, 978 aa, synthetic construct
  REGION 1..978: note = engineered CasX variant
QEIKRISKIRRRLVKDSNTKKAGKTGPMKTLLVRVMTPDLRERLENLRKKPENIPQPISNTSRANLNKLLTDYTEMKKAILHVYWEEFQKDPVGLMSRVAQPASKKIDQNKLKPEMDEKGNLTTAGFACSQCGQPLFVYKLEQVSEKGKAYTNYFGRCNVAEHEKLILLAQLKPEKDSDEAVTYSLGKFGQRALDFYSIHVTKESTHPVKPLAQIAGNRYASYPVGKALSDACMGTIASFLSKYQDIIIEHQKVVKGNQKRLESLRELAGKENLEYPSVTLPPQPHTKEGVDAYNEVIARVRMWVNLNLWQKLKLSRDDAKPLLRLKGFPSFPLVERQANEVDWWDMVCNVKKLINEKKEDGKVFWQNLAGYKRQEALRPYLSSEEDRKKGKKFARYQLGDLLLHLEKKHPEDWGKVYDEAWERIDKKVEGLSKHIKLEEERRSEDAQSKAALTDWLRAKASFVIEGLKEADKDEFCRCELKLQKWYGDLRGKPFAIEAENSILDISGFSKQYNCAFIWQKDGVKKLNLYLIINYFKGGKLRFKKIKPEAFEANRFYTVINKKSGEIVPMEVNFNFDDPNLIILPLAFGKRQGREFIWNDLLSLETGSLKLANGRVIEKTLYNRRTRQDEPALFVALTFERREVLDSSNIKPMNLIGVDRGENIPAVIALTDPEGCPLSRFKDSLGNPTHILRIGESYKEKQRTIQAKKEVEQRRAGGYSRKYASKAKNLADDMVRNTARDLLYYAVTQDAMLIFENLSRGFGRQGKRTFMAERQYTRMEDWLTAKLAYEGLPSKTYLSKTLAQYTSKTCSNCGFTITSADYDRVLEKLKKTATGWMTTINGKELKVEGQITYYNRYKRQNVVKDLSVELDRLSEESVNNDISSWTKGRSGEALSLLKKRFSHRPVQEKFVCLNCGFETHADEQAALNIARSWLFLRSQEYKKYQTNKTTGNTDKRAFVETWQSFYRKKLKEVWKPAV

SEQ ID NO: 41835 - protein, 978 aa, synthetic construct
  REGION 1..978: note = engineered CasX variant
QEIKRISKIRRRLVKDSNTKKAGKTGPMKTLLVRVMTPDLRERLENLRKKPENIPQPISNTSRANLNKLLTDYTEMKKAILHVYWEEFQKDPVGLMSRVAQPASKKIDQNKLKPEMDEKGNLTTAGFACSQCGQPLFVYKLEQVSEKGKAYTNYFGRCNVAEHEKLILLAQLKPEKDSDEAVTYSLGKFGQRALDFYSIHVTKESTHPVKPLAQIAGNRYASHPVGKALSDACMGTIASFLSKYQDIIIEHQKVVKGNQKRLESLRELAGKENLEYPSVTLPPQPHTKEGVDAYNEVIARVRMWVNLNLWQKLKLSRDDAKPLLRLKGFPSFPLVERQANEVDWWDMVCNVKKLINEKKEDGKVFWQNLAGYKRQEALRPYLSSEEDRKKGKKFARYQLGDLLLHLEKKHPEDWGKVYDEAWERIDKKVEGLSKHIKLEEERRSEDAQSKAALTDWLRAKASFVIEGLKEADKDEFCRCELKLQKWYGDLRGKPFAIEAENSILDISGFSKQYNCAFIWQKDGVKKLNLYLIINYFKGGKLRFKKIKPEAFEANRFYTVINKKSGEIVPMEVNFNFDDPNLIILPLAFGKRQGREFIWNDLLSLETGSLKLANGRVIEKTLYNRRTRQDEPALFVALTFERREVLDSSNIKPMNLIGVDRGENIPAVIALTDPEGCPLSRFKDSLGNPTHILRIGESYKEKQRTIQAKKEVEQRRAGGYSRKYASKAKNLADDMVRNTARDLLYYAVTQDAMLIFENLSRGFGRQGKRTFMAERQYTRMEDWLTAKLAYEGLPSKTYLSKTLAQYTSKTCSNCGFTITSADYDRVLEKLKKTATGWMTTINGKELKVEGQITYYNRYKRQNVVKDLSVELDRLSEESVNNDISSWTKGRSGEALSLLKKRFSHRPVQEKFVCLNCGFETHADEQAALNIARSWLFLRSQEYKKYQTNKTTGNTDKRAFVETWQSFYRKKLKEVWKPAV

SEQ ID NO: 41836 - protein, 978 aa, synthetic construct
  REGION 1..978: note = engineered CasX variant
QEIKRISKIRRRLVKDSNTKKAGKTGPMKTLLVRVMTPDLRERLENLRKKPENIPQPISNTSRANLNKLLTDYTEMKKAILHVYWEEFQKDPVGLMSRVAQPASKKIDQNKLKPEMDEKGNLTTAGFACSQCGQPLFVYKLEQVSEKGKAYTNYFGRCNVAEHEKLILLAQLKPEKDSDEAVTYSLGKFGQRALDFYSIHVTKESTHPVKPLAQIAGNRYASSPVGKALSDACMGTIASFLSKYQDIIIEHQKVVKGNQKRLESLRELAGKENLEYPSVTLPPQPHTKEGVDAYNEVIARVRMWVNLNLWQKLKLSRDDAKPLLRLKGFPSFPLVERQANEVDWWDMVCNVKKLINEKKEDGKVFWQNLAGYKRQEALRPYLSSEEDRKKGKKFARYQLGDLLLHLEKKHPEDWGKVYDEAWERIDKKVEGLSKHIKLEEERRSEDAQSKAALTDWLRAKASFVIEGLKEADKDEFCRCELKLQKWYGDLRGKPFAIEAENSILDISGFSKQYNCAFIWQKDGVKKLNLYLIINYFKGGKLRFKKIKPEAFEANRFYTVINKKSGEIVPMEVNFNFDDPNLIILPLAFGKRQGREFIWNDLLSLETGSLKLANGRVIEKTLYNRRTRQDEPALFVALTFERREVLDSSNIKPMNLIGVDRGENIPAVIALTDPEGCPLSRFKDSLGNPTHILRIGESYKEKQRTIQAKKEVEQRRAGGYSRKYASKAKNLADDMVRNTARDLLYYAVTQDAMLIFENLSRGFGRQGKRTFMAERQYTRMEDWLTAKLAYEGLPSKTYLSKTLAQYTSKTCSNCGFTITSADYDRVLEKLKKTATGWMTTINGKELKVEGQITYYNRYKRQNVVKDLSVELDRLSEESVNNDISSWTKGRSGEALSLLKKRFSHRPVQEKFVCLNCGFETHADEQAALNIARSWLFLRSQEYKKYQTNKTTGNTDKRAFVETWQSFYRKKLKEVWKPAV

SEQ ID NO: 41837 - protein, 978 aa, synthetic construct
  REGION 1..978: note = engineered CasX variant
QEIKRISKIRRRLVKDSNTKKAGKTGPMKTLLVRVMTPDLRERLENLRKKPENIPQPISNTSRANLNKLLTDYTEMKKAILHVYWEEFQKDPVGLMSRVAQPASKKIDQNKLKPEMDEKGNLTTAGFACSQCGQPLFVYKLEQVSEKGKAYTNYFGRCNVAEHEKLILLAQLKPEKDSDEAVTYSLGKFGQRALDFYSIHVTKESTHPVKPLAQIAGNRYASTPVGKALSDACMGTIASFLSKYQDIIIEHQKVVKGNQKRLESLRELAGKENLEYPSVTLPPQPHTKEGVDAYNEVIARVRMWVNLNLWQKLKLSRDDAKPLLRLKGFPSFPLVERQANEVDWWDMVCNVKKLINEKKEDGKVFWQNLAGYKRQEALRPYLSSEEDRKKGKKFARYQLGDLLLHLEKKHPEDWGKVYDEAWERIDKKVEGLSKHIKLEEERRSEDAQSKAALTDWLRAKASFVIEGLKEADKDEFCRCELKLQKWYGDLRGKPFAIEAENSILDISGFSKQYNCAFIWQKDGVKKLNLYLIINYFKGGKLRFKKIKPEAFEANRFYTVINKKSGEIVPMEVNFNFDDPNLIILPLAFGKRQGREFIWNDLLSLETGSLKLANGRVIEKTLYNRRTRQDEPALFVALTFERREVLDSSNIKPMNLIGVDRGENIPAVIALTDPEGCPLSRFKDSLGNPTHILRIGESYKEKQRTIQAKKEVEQRRAGGYSRKYASKAKNLADDMVRNTARDLLYYAVTQDAMLIFENLSRGFGRQGKRTFMAERQYTRMEDWLTAKLAYEGLPSKTYLSKTLAQYTSKTCSNCGFTITSADYDRVLEKLKKTATGWMTTINGKELKVEGQITYYNRYKRQNVVKDLSVELDRLSEESVNNDISSWTKGRSGEALSLLKKRFSHRPVQEKFVCLNCGFETHADEQAALNIARSWLFLRSQEYKKYQTNKTTGNTDKRAFVETWQSFYRKKLKEVWKPAV

SEQ ID NO: 41838 - protein, 978 aa, synthetic construct
  REGION 1..978: note = engineered CasX variant
QEIKRISKIRRRLVKDSNTKKAGKTGPMKTLLVRVMTPDLRERLENLRKKPENIPQPISNTSRANLNKLLTDYTEMKKAILHVYWEEFQKDPVGLMSRVAQPASKKIDQNKLKPEMDEKGNLTTAGFACSQCGQPLFVYKLEQVSEKGKAYTNYFGRCNVAEHEKLILLAQLKPEKDSDEAVTYSLGKFGQRALDFYSIHVTKESTHPVKPLAQIAGNRYASAPVGKALSDACMGTIASFLSKYQDIIIEHQKVVKGNQKRLESLRELAGKENLEYPSVTLPPQPHTKEGVDAYNEVIARVRMWVNLNLWQKLKLSRDDAKPLLRLKGFPSFPLVERQANEVDWWDMVCNVKKLINEKKEDGKVFWQNLAGYKRQEALRPYLSSEEDRKKGKKFARYQLGDLLLHLEKKHPEDWGKVYDEAWERIDKKVEGLSKHIKLEEERRSEDAQSKAALTDWLRAKASFVIEGLKEADKDEFCRCELKLQKWYGDLRGKPFAIEAENSILDISGFSKQYNCAFIWQKDGVKKLNLYLIINYFKGGKLRFKKIKPEAFEANRFYTVINKKSGEIVPMEVNFNFDDPNLIILPLAFGKRQGREFIWNDLLSLETGSLKLANGRVIEKTLYNRRTRQDEPALFVALTFERREVLDSSNIKPMNLIGVDRGENIPAVIALTDPEGCPLSRFKDSLGNPTHILRIGESYKEKQRTIQAKKEVEQRRAGGYSRKYASKAKNLADDMVRNTARDLLYYAVTQDAMLIFENLSRGFGRQGKRTFMAERQYTRMEDWLTAKLAYEGLPSKTYLSKTLAQYTSKTCSNCGFTITSADYDRVLEKLKKTATGWMTTINGKELKVEGQITYYNRYKRQNVVKDLSVELDRLSEESVNNDISSWTKGRSGEALSLLKKRFSHRPVQEKFVCLNCGFETHADEQAALNIARSWLFLRSQEYKKYQTNKTTGNTDKRAFVETWQSFYRKKLKEVWKPAV

SEQ ID NO: 41839 - protein, 978 aa, synthetic construct
  REGION 1..978: note = engineered CasX variant
QEIKRISKIRRRLVKDSNTKKAGKTGPMKTLLVRVMTPDLRERLENLRKKPENIPQPISNTSRANLNKLLTDYTEMKKAILHVYWEEFQKDPVGLMSRVAQPASKKIDQNKLKPEMDEKGNLTTAGFACSQCGQPLFVYKLEQVSEKGKAYTNYFGRCNVAEHEKLILLAQLKPEKDSDEAVTYSLGKFGQRALDFYSIHVTKESTHPVKPLAQIAGNRYASVPVGKALSDACMGTIASFLSKYQDIIIEHQKVVKGNQKRLESLRELAGKENLEYPSVTLPPQPHTKEGVDAYNEVIARVRMWVNLNLWQKLKLSRDDAKPLLRLKGFPSFPLVERQANEVDWWDMVCNVKKLINEKKEDGKVFWQNLAGYKRQEALRPYLSSEEDRKKGKKFARYQLGDLLLHLEKKHPEDWGKVYDEAWERIDKKVEGLSKHIKLEEERRSEDAQSKAALTDWLRAKASFVIEGLKEADKDEFCRCELKLQKWYGDLRGKPFAIEAENSILDISGFSKQYNCAFIWQKDGVKKLNLYLIINYFKGGKLRFKKIKPEAFEANRFYTVINKKSGEIVPMEVNFNFDDPNLIILPLAFGKRQGREFIWNDLLSLETGSLKLANGRVIEKTLYNRRTRQDEPALFVALTFERREVLDSSNIKPMNLIGVDRGENIPAVIALTDPEGCPLSRFKDSLGNPTHILRIGESYKEKQRTIQAKKEVEQRRAGGYSRKYASKAKNLADDMVRNTARDLLYYAVTQDAMLIFENLSRGFGRQGKRTFMAERQYTRMEDWLTAKLAYEGLPSKTYLSKTLAQYTSKTCSNCGFTITSADYDRVLEKLKKTATGWMTTINGKELKVEGQITYYNRYKRQNVVKDLSVELDRLSEESVNNDISSWTKGRSGEALSLLKKRFSHRPVQEKFVCLNCGFETHADEQAALNIARSWLFLRSQEYKKYQTNKTTGNTDKRAFVETWQSFYRKKLKEVWKPAV

SEQ ID NO: 41840 - protein, 978 aa, synthetic construct
  REGION 1..978: note = engineered CasX variant
QEIKRISKIRRRLVKDSNTKKAGKTGPMKTLLVRVMTPDLRERLENLRKKPENIPQPISNTSRANLNKLLTDYTEMKKAILHVYWEEFQKDPVGLMSRVAQPASKKIDQNKLKPEMDEKGNLTTAGFACSQCGQPLFVYKLEQVSEKGKAYTNYFGRCNVAEHEKLIKLAQLKPEKDSDEAVTYSLGKFGQRALDFYSIHVTKESTHPVKPLAQIAGNRYASGPVGKALSDACMGTIASFLSKYQDIIIEHQKVVKGNQKRLESLRELAGKENLEYPSVTLPPQPHTKEGVDAYNEVIARVRMWVNLNLWQKLKLSRDDAKPLLRLKGFPSFPLVERQANEVDWWDMVCNVKKLINEKKEDGKVFWQNLAGYKRQEALRPYLSSEEDRKKGKKFARYQLGDLLLHLEKKHPEDWGKVYDEAWERIDKKVEGLSKHIKLEEERRSEDAQSKAALTDWLRAKASFVIEGLKEADKDEFCRCELKLQKWYGDLRGKPFAIEAENSILDISGFSKQYNCAFIWQKDGVKKLNLYLIINYFKGGKLRFKKIKPEAFEANRFYTVINKKSGEIVPMEVNFNFDDPNLIILPLAFGKRQGREFIWNDLLSLETGSLKLANGRVIEKTLYNRRTRQDEPALFVALTFERREVLDSSNIKPMNLIGVDRGENIPAVIALTDPEGCPLSRFKDSLGNPTHILRIGESYKEKQRTIQAKKEVEQRRAGGYSRKYASKAKNLADDMVRNTARDLLYYAVTQDAMLIFENLSRGFGRQGKRTFMAERQYTRMEDWLTAKLAYEGLPSKTYLSKTLAQYTSKTCSNCGFTITSADYDRVLEKLKKTATGWMTTINGKELKVEGQITYYNRYKRQNVVKDLSVELDRLSEESVNNDISSWTKGRSGEALSLLKKRFSHRPVQEKFVCLNCGFETHADEQAALNIARSWLFLRSQEYKKYQTNKTTGNTDKRAFVETWQSFYRKKLKEVWKPAV

SEQ ID NO: 41841 - protein, 977 aa, synthetic construct
  REGION 1..977: note = engineered CasX variant
QEIKRISKIRRRLVKDSNTKKAGKTGPMKTLLVRVMTPDLRERLENLRKKPENIPQPISNTSRANLNKLLTDYTEMKKAILHVYWEEFQKDPVGLMSRVAQPASKKIDQNKLKPEMDEKGNLTTAGFACSQCGQPLFVYKLEQVSEKGKAYTNYFGRCNVAEHEKLILLAQLKPEKDSDEAVTYSLGKFGQRALDFYSIHVTKESTHPVKPLAQIAGNRYASPVGKALSDACMGTIASFLSKYQDIIIEHQKVVKGNQKRLESLRELAGKENLEYPSVTLPPQPHTKEGVDAYNEVIARVRMWVNLNLWQKLKLSRDDAKPLLRLKGFPSFPLVERQANEVDWWDMVCNVKKLINEKKEDGKVFWQNLAGYKRQEALRPYLSSEEDRKKGKKFARYQLGDLLLHLEKKHPEDWGKVYDEAWERIDKKVEGLSKHIKLEEERRSEDAQSKAALTDWLRAKASFVIEGLKEADKDEFCRCELKLQKWYGDLRGKPFAIEAENSILDISGFSKQYNCAFIWQKDGVKKLNLYLIINYFKGGKLRFKKIKPEAFEANRFYTVINKKSGEIVPMEVNFNFDDPNLIILPLAFGKRQGREFIWNDLLSLETGSLKLANGRVIEKTLYNRRTRQDEPALFVALTFERREVLDSSNIKPMNLIGVDRGENIPAVIALTDPEGCPLSRFKDSLGNPTHILRIGESYKEKQRTIQAKKEVEQRRAGGYSRKYASKAKNLADDMVRNTARDLLYYAVTQDAMLIFENLSRGFGRQGKRTFMAERQYTRMEDWLTAKLAYEGLPSKTYLSKTLAQYTSKTCSNCGFTITSADYDRVLEKLKKTATGWMTTINGKELKVEGQITYYNRYKRQNVVKDLSVELDRLSEESVNNDISSWTKGRSGEALSLLKKRFSHRPVQEKFVCLNCGFETHADEQAALNIARSWLFLRSQEYKKYQTNKTTGNTDKRAFVETWQSFYRKKLKEVWKPAV

SEQ ID NO: 41842 - protein, 979 aa, synthetic construct
  REGION 1..979: note = engineered CasX variant
QEIKRISKIRRRLVKDSNTKKAGKTGPMKTLLVRVMTPDLRERLENLRKKPENIPQPISNTSRANLNKLLTDYTEMKKAILHVYWEEFQKDPVGLMSRVAQPASKKIDQNKLKPEMDEKGNLTTAGFACSQCGQPLFVYKLEQVSEKGKAYTNYFGRCNVAEHEKLILLAQLKPEKDSDEAVTYSLGKFGQRALDFYSIHVTKESTHPVKPLAQIAGNRYASYPVGKALSDACMGTIASFLSKYQDIIIEHQKVVKGNQKRLESLRELAGKENLEYPSVTLPPQPHTKEGVDAYNEVIARVRMWVNLNLWQKLKLSRDDAKPLLRLKGFPSFPLVERQANEVDWWDMVCNVKKLINEKKEDGKVFWQNLAGYKRQEALRPYLSSEEDRKKGKKFARYQLGDLLLHLEKKHGERDWGKVYDEAWERIDKKVEGLSKHIKLEEERRSEDAQSKAALTDWLRAKASFVIEGLKEADKDEFCRCELKLQKWYGDLRGKPFAIEAENSILDISGFSKQYNCAFIWQKDGVKKLNLYLIINYFKGGKLRFKKIKPEAFEANRFYTVINKKSGEIVPMEVNFNFDDPNLIILPLAFGKRQGREFIWNDLLSLETGSLKLANGRVIEKTLYNRRTRQDEPALFVALTFERREVLDSSNIKPMNLIGVDRGENIPAVIALTDPEGCPLSRFKDSLGNPTHILRIGESYKEKQRTIQAKKEVEQRRAGGYSRKYASKAKNLADDMVRNTARDLLYYAVTQDAMLIFENLSRGFGRQGKRTFMAERQYTRMEDWLTAKLAYEGLPSKTYLSKTLAQYTSKTCSNCGFTITSADYDRVLEKLKKTATGWMTTINGKELKVEGQITYYNRYKRQNVVKDLSVELDRLSEESVNNDISSWTKGRSGEALSLLKKRFSHRPVQEKFVCLNCGFETHADEQAALNIARSWLFLRSQEYKKYQTNKTTGNTDKRAFVETWQSFYRKKLKEVWKPAV

SEQ ID NO: 41843 - protein, 979 aa, synthetic construct
  REGION 1..979: note = engineered CasX variant
QEIKRISKIRRRLVKDSNTKKAGKTGPMKTLLVRVMTPDLRERLENLRKKPENIPQPISNTSRANLNKLLTDYTEMKKAILHVYWEEFQKDPVGLMSRVAQPASKKIDQNKLKPEMDEKGNLTTAGFACSQCGQPLFVYKLEQVSEKGKAYTNYFGRCNVAEHEKLILLAQLKPEKDSDEAVTYSLGKFGQRALDFYSIHVTKESTHPVKPLAQIAGNRYASHPVGKALSDACMGTIASFLSKYQDIIIEHQKVVKGNQKRLESLRELAGKENLEYPSVTLPPQPHTKEGVDAYNEVIARVRMWVNLNLWQKLKLSRDDAKPLLRLKGFPSFPLVERQANEVDWWDMVCNVKKLINEKKEDGKVFWQNLAGYKRQEALRPYLSSEEDRKKGKKFARYQLGDLLLHLEKKHGERDWGKVYDEAWERIDKKVEGLSKHIKLEEERRSEDAQSKAALTDWLRAKASFVIEGLKEADKDEFCRCELKLQKWYGDLRGKPFAIEAENSILDISGFSKQYNCAFIWQKDGVKKLNLYLIINYFKGGKLRFKKIKPEAFEANRFYTVINKKSGEIVPMEVNFNFDDPNLIILPLAFGKRQGREFIWNDLLSLETGSLKLANGRVIEKTLYNRRTRQDEPALFVALTFERREVLDSSNIKPMNLIGVDRGENIPAVIALTDPEGCPLSRFKDSLGNPTHILRIGESYKEKQRTIQAKKEVEQRRAGGYSRKYASKAKNLADDMVRNTARDLLYYAVTQDAMLIFENLSRGFGRQGKRTFMAERQYTRMEDWLTAKLAYEGLPSKTYLSKTLAQYTSKTCSNCGFTITSADYDRVLEKLKKTATGWMTTINGKELKVEGQITYYNRYKRQNVVKDLSVELDRLSEESVNNDISSWTKGRSGEALSLLKKRFSHRPVQEKFVCLNCGFETHADEQAALNIARSWLFLRSQEYKKYQTNKTTGNTDKRAFVETWQSFYRKKLKEVWKPAV

SEQ ID NO: 41844 - protein, 979 aa, synthetic construct
  REGION 1..979: note = engineered CasX variant
QEIKRISKIRRRLVKDSNTKKAGKTGPMKTLLVRVMTPDLRERLENLRKKPENIPQPISNTSRANLNKLLTDYTEMKKAILHVYWEEFQKDPVGLMSRVAQPASKKIDQNKLKPEMDEKGNLTTAGFACSQCGQPLFVYKLEQVSEKGKAYTNYFGRCNVAEHEKLILLAQLKPEKDSDEAVTYSLGKFGQRALDFYSIHVTKESTHPVKPLAQIAGNRYASSPVGKALSDACMGTIASFLSKYQDIIIEHQKVVKGNQKRLESLRELAGKENLEYPSVTLPPQPHTKEGVDAYNEVIARVRMWVNLNLWQKLKLSRDDAKPLLRLKGFPSFPLVERQANEVDWWDMVCNVKKLINEKKEDGKVFWQNLAGYKRQEALRPYLSSEEDRKKGKKFARYQLGDLLLHLEKKHGERDWGKVYDEAWERIDKKVEGLSKHIKLEEERRSEDAQSKAALTDWLRAKASFVIEGLKEADKDEFCRCELKLQKWYGDLRGKPFAIEAENSILDISGFSKQYNCAFIWQKDGVKKLNLYLIINYFKGGKLRFKKIKPEAFEANRFYTVINKKSGEIVPMEVNFNFDDPNLIILPLAFGKRQGREFIWNDLLSLETGSLKLANGRVIEKTLYNRRTRQDEPALFVALTFERREVLDSSNIKPMNLIGVDRGENIPAVIALTDPEGCPLSRFKDSLGNPTHILRIGESYKEKQRTIQAKKEVEQRRAGGYSRKYASKAKNLADDMVRNTARDLLYYAVTQDAMLIFENLSRGFGRQGKRTFMAERQYTRMEDWLTAKLAYEGLPSKTYLSKTLAQYTSKTCSNCGFTITSADYDRVLEKLKKTATGWMTTINGKELKVEGQITYYNRYKRQNVVKDLSVELDRLSEESVNNDISSWTKGRSGEALSLLKKRFSHRPVQEKFVCLNCGFETHADEQAALNIARSWLFLRSQEYKKYQTNKTTGNTDKRAFVETWQSFYRKKLKEVWKPAV

SEQ ID NO: 41845 - protein, 979 aa, synthetic construct
  REGION 1..979: note = engineered CasX variant
QEIKRISKIRRRLVKDSNTKKAGKTGPMKTLLVRVMTPDLRERLENLRKKPENIPQPISNTSRANLNKLLTDYTEMKKAILHVYWEEFQKDPVGLMSRVAQPASKKIDQNKLKPEMDEKGNLTTAGFACSQCGQPLFVYKLEQVSEKGKAYTNYFGRCNVAEHEKLILLAQLKPEKDSDEAVTYSLGKFGQRALDFYSIHVTKESTHPVKPLAQIAGNRYASTPVGKALSDACMGTIASFLSKYQDIIIEHQKVVKGNQKRLESLRELAGKENLEYPSVTLPPQPHTKEGVDAYNEVIARVRMWVNLNLWQKLKLSRDDAKPLLRLKGFPSFPLVERQANEVDWWDMVCNVKKLINEKKEDGKVFWQNLAGYKRQEALRPYLSSEEDRKKGKKFARYQLGDLLLHLEKKHGERDWGKVYDEAWERIDKKVEGLSKHIKLEEERRSEDAQSKAALTDWLRAKASFVIEGLKEADKDEFCRCELKLQKWYGDLRGKPFAIEAENSILDISGFSKQYNCAFIWQKDGVKKLNLYLIINYFKGGKLRFKKIKPEAFEANRFYTVINKKSGEIVPMEVNFNFDDPNLIILPLAFGKRQGREFIWNDLLSLETGSLKLANGRVIEKTLYNRRTRQDEPALFVALTFERREVLDSSNIKPMNLIGVDRGENIPAVIALTDPEGCPLSRFKDSLGNPTHILRIGESYKEKQRTIQAKKEVEQRRAGGYSRKYASKAKNLADDMVRNTARDLLYYAVTQDAMLIFENLSRGFGRQGKRTFMAERQYTRMEDWLTAKLAYEGLPSKTYLSKTLAQYTSKTCSNCGFTITSADYDRVLEKLKKTATGWMTTINGKELKVEGQITYYNRYKRQNVVKDLSVELDRLSEESVNNDISSWTKGRSGEALSLLKKRFSHRPVQEKFVCLNCGFETHADEQAALNIARSWLFLRSQEYKKYQTNKTTGNTDKRAFVETWQSFYRKKLKEVWKPAV

SEQ ID NO: 41846 - protein, 979 aa, synthetic construct
  REGION 1..979: note = engineered CasX variant
QEIKRISKIRRRLVKDSNTKKAGKTGPMKTLLVRVMTPDLRERLENLRKKPENIPQPISNTSRANLNKLLTDYTEMKKAILHVYWEEFQKDPVGLMSRVAQPASKKIDQNKLKPEMDEKGNLTTAGFACSQCGQPLFVYKLEQVSEKGKAYTNYFGRCNVAEHEKLILLAQLKPEKDSDEAVTYSLGKFGQRALDFYSIHVTKESTHPVKPLAQIAGNRYASAPVGKALSDACMGTIASFLSKYQDIIIEHQKVVKGNQKRLESLRELAGKENLEYPSVTLPPQPHTKEGVDAYNEVIARVRMWVNLNLWQKLKLSRDDAKPLLRLKGFPSFPLVERQANEVDWWDMVCNVKKLINEKKEDGKVFWQNLAGYKRQEALRPYLSSEEDRKKGKKFARYQLGDLLLHLEKKHGERDWGKVYDEAWERIDKKVEGLSKHIKLEEERRSEDAQSKAALTDWLRAKASFVIEGLKEADKDEFCRCELKLQKWYGDLRGKPFAIEAENSILDISGFSKQYNCAFIWQKDGVKKLNLYLIINYFKGGKLRFKKIKPEAFEANRFYTVINKKSGEIVPMEVNFNFDDPNLIILPLAFGKRQGREFIWNDLLSLETGSLKLANGRVIEKTLYNRRTRQDEPALFVALTFERREVLDSSNIKPMNLIGVDRGENIPAVIALTDPEGCPLSRFKDSLGNPTHILRIGESYKEKQRTIQAKKEVEQRRAGGYSRKYASKAKNLADDMVRNTARDLLYYAVTQDAMLIFENLSRGFGRQGKRTFMAERQYTRMEDWLTAKLAYEGLPSKTYLSKTLAQYTSKTCSNCGFTITSADYDRVLEKLKKTATGWMTTINGKELKVEGQITYYNRYKRQNVVKDLSVELDRLSEESVNNDISSWTKGRSGEALSLLKKRFSHRPVQEKFVCLNCGFETHADEQAALNIARSWLFLRSQEYKKYQTNKTTGNTDKRAFVETWQSFYRKKLKEVWKPAV

SEQ ID NO: 41847 - protein, 979 aa, synthetic construct
  REGION 1..979: note = engineered CasX variant
QEIKRISKIRRRLVKDSNTKKAGKTGPMKTLLVRVMTPDLRERLENLRKKPENIPQPISNTSRANLNKLLTDYTEMKKAILHVYWEEFQKDPVGLMSRVAQPASKKIDQNKLKPEMDEKGNLTTAGFACSQCGQPLFVYKLEQVSEKGKAYTNYFGRCNVAEHEKLILLAQLKPEKDSDEAVTYSLGKFGQRALDFYSIHVTKESTHPVKPLAQIAGNRYASVPVGKALSDACMGTIASFLSKYQDIIIEHQKVVKGNQKRLESLRELAGKENLEYPSVTLPPQPHTKEGVDAYNEVIARVRMWVNLNLWQKLKLSRDDAKPLLRLKGFPSFPLVERQANEVDWWDMVCNVKKLINEKKEDGKVFWQNLAGYKRQEALRPYLSSEEDRKKGKKFARYQLGDLLLHLEKKHGERDWGKVYDEAWERIDKKVEGLSKHIKLEEERRSEDAQSKAALTDWLRAKASFVIEGLKEADKDEFCRCELKLQKWYGDLRGKPFAIEAENSILDISGFSKQYNCAFIWQKDGVKKLNLYLIINYFKGGKLRFKKIKPEAFEANRFYTVINKKSGEIVPMEVNFNFDDPNLIILPLAFGKRQGREFIWNDLLSLETGSLKLANGRVIEKTLYNRRTRQDEPALFVALTFERREVLDSSNIKPMNLIGVDRGENIPAVIALTDPEGCPLSRFKDSLGNPTHILRIGESYKEKQRTIQAKKEVEQRRAGGYSRKYASKAKNLADDMVRNTARDLLYYAVTQDAMLIFENLSRGFGRQGKRTFMAERQYTRMEDWLTAKLAYEGLPSKTYLSKTLAQYTSKTCSNCGFTITSADYDRVLEKLKKTATGWMTTINGKELKVEGQITYYNRYKRQNVVKDLSVELDRLSEESVNNDISSWTKGRSGEALSLLKKRFSHRPVQEKFVCLNCGFETHADEQAALNIARSWLFLRSQEYKKYQTNKTTGNTDKRAFVETWQSFYRKKLKEVWKPAV

SEQ ID NO: 41848 - protein, 979 aa, synthetic construct
  REGION 1..979: note = engineered CasX variant
QEIKRISKIRRRLVKDSNTKKAGKTGPMKTLLVRVMTPDLRERLENLRKKPENIPQPISNTSRANLNKLLTDYTEMKKAILHVYWEEFQKDPVGLMSRVAQPASKKIDQNKLKPEMDEKGNLTTAGFACSQCGQPLFVYKLEQVSEKGKAYTNYFGRCNVAEHEKLIKLAQLKPEKDSDEAVTYSLGKFGQRALDFYSIHVTKESTHPVKPLAQIAGNRYASGPVGKALSDACMGTIASFLSKYQDIIIEHQKVVKGNQKRLESLRELAGKENLEYPSVTLPPQPHTKEGVDAYNEVIARVRMWVNLNLWQKLKLSRDDAKPLLRLKGFPSFPLVERQANEVDWWDMVCNVKKLINEKKEDGKVFWQNLAGYKRQEALRPYLSSEEDRKKGKKFARYQLGDLLLHLEKKHGERDWGKVYDEAWERIDKKVEGLSKHIKLEEERRSEDAQSKAALTDWLRAKASFVIEGLKEADKDEFCRCELKLQKWYGDLRGKPFAIEAENSILDISGFSKQYNCAFIWQKDGVKKLNLYLIINYFKGGKLRFKKIKPEAFEANRFYTVINKKSGEIVPMEVNFNFDDPNLIILPLAFGKRQGREFIWNDLLSLETGSLKLANGRVIEKTLYNRRTRQDEPALFVALTFERREVLDSSNIKPMNLIGVDRGENIPAVIALTDPEGCPLSRFKDSLGNPTHILRIGESYKEKQRTIQAKKEVEQRRAGGYSRKYASKAKNLADDMVRNTARDLLYYAVTQDAMLIFENLSRGFGRQGKRTFMAERQYTRMEDWLTAKLAYEGLPSKTYLSKTLAQYTSKTCSNCGFTITSADYDRVLEKLKKTATGWMTTINGKELKVEGQITYYNRYKRQNVVKDLSVELDRLSEESVNNDISSWTKGRSGEALSLLKKRFSHRPVQEKFVCLNCGFETHADEQAALNIARSWLFLRSQEYKKYQTNKTTGNTDKRAFVETWQSFYRKKLKEVWKPAV

SEQ ID NO: 41849 - protein, 978 aa, synthetic construct
  REGION 1..978: note = engineered CasX variant
QEIKRISKIRRRLVKDSNTKKAGKTGPMKTLLVRVMTPDLRERLENLRKKPENIPQPISNTSRANLNKLLTDYTEMKKAILHVYWEEFQKDPVGLMSRVAQPASKKIDQNKLKPEMDEKGNLTTAGFACSQCGQPLFVYKLEQVSEKGKAYTNYFGRCNVAEHEKLILLAQLKPEKDSDEAVTYSLGKFGQRALDFYSIHVTKESTHPVKPLAQIAGNRYASPVGKALSDACMGTIASFLSKYQDIIIEHQKVVKGNQKRLESLRELAGKENLEYPSVTLPPQPHTKEGVDAYNEVIARVRMWVNLNLWQKLKLSRDDAKPLLRLKGFPSFPLVERQANEVDWWDMVCNVKKLINEKKEDGKVFWQNLAGYKRQEALRPYLSSEEDRKKGKKFARYQLGDLLLHLEKKHGERDWGKVYDEAWERIDKKVEGLSKHIKLEEERRSEDAQSKAALTDWLRAKASFVIEGLKEADKDEFCRCELKLQKWYGDLRGKPFAIEAENSILDISGFSKQYNCAFIWQKDGVKKLNLYLIINYFKGGKLRFKKIKPEAFEANRFYTVINKKSGEIVPMEVNFNFDDPNLIILPLAFGKRQGREFIWNDLLSLETGSLKLANGRVIEKTLYNRRTRQDEPALFVALTFERREVLDSSNIKPMNLIGVDRGENIPAVIALTDPEGCPLSRFKDSLGNPTHILRIGESYKEKQRTIQAKKEVEQRRAGGYSRKYASKAKNLADDMVRNTARDLLYYAVTQDAMLIFENLSRGFGRQGKRTFMAERQYTRMEDWLTAKLAYEGLPSKTYLSKTLAQYTSKTCSNCGFTITSADYDRVLEKLKKTATGWMTTINGKELKVEGQITYYNRYKRQNVVKDLSVELDRLSEESVNNDISSWTKGRSGEALSLLKKRFSHRPVQEKFVCLNCGFETHADEQAALNIARSWLFLRSQEYKKYQTNKTTGNTDKRAFVETWQSFYRKKLKEVWKPAV

SEQ ID NO: 41850 - protein, 979 aa, synthetic construct
  REGION 1..979: note = engineered CasX variant
QEIKRISKIRRRLVKDSNTKKAGKTGPMKTLLVRVMTPDLRERLENLRKKPENIPQPISNTSRANLNKLLTDYTEMKKAILHVYWEEFQKDPVGLMSRVAQPASKKIDQNKLKPEMDEKGNLTTAGFACSQCGQPLFVYKLEQVSEKGKAYTNYFGRCNVAEHEKLILLAQLKPEKDSDEAVTYSLGKFGQRALDFYSIHVTKESTHPVKPLAQIAGNRYASYPVGKALSDACMGTIASFLSKYQDIIIEHQKVVKGNQKRLESLRELAGKENLEYPSVTLPPQPHTKEGVDAYNEVIARVRMWVNLNLWQKLKLSRDDAKPLLRLKGFPSFPLVERQANEVDWWDMVCNVKKLINEKKEDGKVFWQNLAGYKRQEALRPYLSSEEDRKKGKKFARYQLGDLLLHLEKKHGEYDWGKVYDEAWERIDKKVEGLSKHIKLEEERRSEDAQSKAALTDWLRAKASFVIEGLKEADKDEFCRCELKLQKWYGDLRGKPFAIEAENSILDISGFSKQYNCAFIWQKDGVKKLNLYLIINYFKGGKLRFKKIKPEAFEANRFYTVINKKSGEIVPMEVNFNFDDPNLIILPLAFGKRQGREFIWNDLLSLETGSLKLANGRVIEKTLYNRRTRQDEPALFVALTFERREVLDSSNIKPMNLIGVDRGENIPAVIALTDPEGCPLSRFKDSLGNPTHILRIGESYKEKQRTIQAKKEVEQRRAGGYSRKYASKAKNLADDMVRNTARDLLYYAVTQDAMLIFENLSRGFGRQGKRTFMAERQYTRMEDWLTAKLAYEGLPSKTYLSKTLAQYTSKTCSNCGFTITSADYDRVLEKLKKTATGWMTTINGKELKVEGQITYYNRYKRQNVVKDLSVELDRLSEESVNNDISSWTKGRSGEALSLLKKRFSHRPVQEKFVCLNCGFETHADEQAALNIARSWLFLRSQEYKKYQTNKTTGNTDKRAFVETWQSFYRKKLKEVWKPAV

SEQ ID NO: 41851 - protein, 979 aa, synthetic construct
  REGION 1..979: note = engineered CasX variant
QEIKRISKIRRRLVKDSNTKKAGKTGPMKTLLVRVMTPDLRERLENLRKKPENIPQPISNTSRANLNKLLTDYTEMKKAILHVYWEEFQKDPVGLMSRVAQPASKKIDQNKLKPEMDEKGNLTTAGFACSQCGQPLFVYKLEQVSEKGKAYTNYFGRCNVAEHEKLILLAQLKPEKDSDEAVTYSLGKFGQRALDFYSIHVTKESTHPVKPLAQIAGNRYASHPVGKALSDACMGTIASFLSKYQDIIIEHQKVVKGNQKRLESLRELAGKENLEYPSVTLPPQPHTKEGVDAYNEVIARVRMWVNLNLWQKLKLSRDDAKPLLRLKGFPSFPLVERQANEVDWWDMVCNVKKLINEKKEDGKVFWQNLAGYKRQEALRPYLSSEEDRKKGKKFARYQLGDLLLHLEKKHGEYDWGKVYDEAWERIDKKVEGLSKHIKLEEERRSEDAQSKAALTDWLRAKASFVIEGLKEADKDEFCRCELKLQKWYGDLRGKPFAIEAENSILDISGFSKQYNCAFIWQKDGVKKLNLYLIINYFKGGKLRFKKIKPEAFEANRFYTVINKKSGEIVPMEVNFNFDDPNLIILPLAFGKRQGREFIWNDLLSLETGSLKLANGRVIEKTLYNRRTRQDEPALFVALTFERREVLDSSNIKPMNLIGVDRGENIPAVIALTDPEGCPLSRFKDSLGNPTHILRIGESYKEKQRTIQAKKEVEQRRAGGYSRKYASKAKNLADDMVRNTARDLLYYAVTQDAMLIFENLSRGFGRQGKRTFMAERQYTRMEDWLTAKLAYEGLPSKTYLSKTLAQYTSKTCSNCGFTITSADYDRVLEKLKKTATGWMTTINGKELKVEGQITYYNRYKRQNVVKDLSVELDRLSEESVNNDISSWTKGRSGEALSLLKKRFSHRPVQEKFVCLNCGFETHADEQAALNIARSWLFLRSQEYKKYQTNKTTGNTDKRAFVETWQSFYRKKLKEVWKPAV

SEQ ID NO: 41852 - protein, 979 aa, synthetic construct
  REGION 1..979: note = engineered CasX variant
QEIKRISKIRRRLVKDSNTKKAGKTGPMKTLLVRVMTPDLRERLENLRKKPENIPQPISNTSRANLNKLLTDYTEMKKAILHVYWEEFQKDPVGLMSRVAQPASKKIDQNKLKPEMDEKGNLTTAGFACSQCGQPLFVYKLEQVSEKGKAYTNYFGRCNVAEHEKLILLAQLKPEKDSDEAVTYSLGKFGQRALDFYSIHVTKESTHPVKPLAQIAGNRYASSPVGKALSDACMGTIASFLSKYQDIIIEHQKVVKGNQKRLESLRELAGKENLEYPSVTLPPQPHTKEGVDAYNEVIARVRMWVNLNLWQKLKLSRDDAKPLLRLKGFPSFPLVERQANEVDWWDMVCNVKKLINEKKEDGKVFWQNLAGYKRQEALRPYLSSEEDRKKGKKFARYQLGDLLLHLEKKHGEYDWGKVYDEAWERIDKKVEGLSKHIKLEEERRSEDAQSKAALTDWLRAKASFVIEGLKEADKDEFCRCELKLQKWYGDLRGKPFAIEAENSILDISGFSKQYNCAFIWQKDGVKKLNLYLIINYFKGGKLRFKKIKPEAFEANRFYTVINKKSGEIVPMEVNFNFDDPNLIILPLAFGKRQGREFIWNDLLSLETGSLKLANGRVIEKTLYNRRTRQDEPALFVALTFERREVLDSSNIKPMNLIGVDRGENIPAVIALTDPEGCPLSRFKDSLGNPTHILRIGESYKEKQRTIQAKKEVEQRRAGGYSRKYASKAKNLADDMVRNTARDLLYYAVTQDAMLIFENLSRGFGRQGKRTFMAERQYTRMEDWLTAKLAYEGLPSKTYLSKTLAQYTSKTCSNCGFTITSADYDRVLEKLKKTATGWMTTINGKELKVEGQITYYNRYKRQNVVKDLSVELDRLSEESVNNDISSWTKGRSGEALSLLKKRFSHRPVQEKFVCLNCGFETHADEQAALNIARSWLFLRSQEYKKYQTNKTTGNTDKRAFVETWQSFYRKKLKEVWKPAV

SEQ ID NO: 41853 - protein, 979 aa, synthetic construct
  REGION 1..979: note = engineered CasX variant
QEIKRISKIRRRLVKDSNTKKAGKTGPMKTLLVRVMTPDLRERLENLRKKPENIPQPISNTSRANLNKLLTDYTEMKKAILHVYWEEFQKDPVGLMSRVAQPASKKIDQNKLKPEMDEKGNLTTAGFACSQCGQPLFVYKLEQVSEKGKAYTNYFGRCNVAEHEKLILLAQLKPEKDSDEAVTYSLGKFGQRALDFYSIHVTKESTHPVKPLAQIAGNRYASTPVGKALSDACMGTIASFLSKYQDIIIEHQKVVKGNQKRLESLRELAGKENLEYPSVTLPPQPHTKEGVDAYNEVIARVRMWVNLNLWQKLKLSRDDAKPLLRLKGFPSFPLVERQANEVDWWDMVCNVKKLINEKKEDGKVFWQNLAGYKRQEALRPYLSSEEDRKKGKKFARYQLGDLLLHLEKKHGEYDWGKVYDEAWERIDKKVEGLSKHIKLEEERRSEDAQSKAALTDWLRAKASFVIEGLKEADKDEFCRCELKLQKWYGDLRGKPFAIEAENSILDISGFSKQYNCAFIWQKDGVKKLNLYLIINYFKGGKLRFKKIKPEAFEANRFYTVINKKSGEIVPMEVNFNFDDPNLIILPLAFGKRQGREFIWNDLLSLETGSLKLANGRVIEKTLYNRRTRQDEPALFVALTFERREVLDSSNIKPMNLIGVDRGENIPAVIALTDPEGCPLSRFKDSLGNPTHILRIGESYKEKQRTIQAKKEVEQRRAGGYSRKYASKAKNLADDMVRNTARDLLYYAVTQDAMLIFENLSRGFGRQGKRTFMAERQYTRMEDWLTAKLAYEGLPSKTYLSKTLAQYTSKTCSNCGFTITSADYDRVLEKLKKTATGWMTTINGKELKVEGQITYYNRYKRQNVVKDLSVELDRLSEESVNNDISSWTKGRSGEALSLLKKRFSHRPVQEKFVCLNCGFETHADEQAALNIARSWLFLRSQEYKKYQTNKTTGNTDKRAFVETWQSFYRKKLKEVWKPAV

SEQ ID NO: 41854 - protein, 979 aa, synthetic construct
  REGION 1..979: note = engineered CasX variant
QEIKRISKIRRRLVKDSNTKKAGKTGPMKTLLVRVMTPDLRERLENLRKKPENIPQPISNTSRANLNKLLTDYTEMKKAILHVYWEEFQKDPVGLMSRVAQPASKKIDQNKLKPEMDEKGNLTTAGFACSQCGQPLFVYKLEQVSEKGKAYTNYFGRCNVAEHEKLILLAQLKPEKDSDEAVTYSLGKFGQRALDFYSIHVTKESTHPVKPLAQIAGNRYASAPVGKALSDACMGTIASFLSKYQDIIIEHQKVVKGNQKRLESLRELAGKENLEYPSVTLPPQPHTKEGVDAYNEVIARVRMWVNLNLWQKLKLSRDDAKPLLRLKGFPSFPLVERQANEVDWWDMVCNVKKLINEKKEDGKVFWQNLAGYKRQEALRPYLSSEEDRKKGKKFARYQLGDLLLHLEKKHGEYDWGKVYDEAWERIDKKVEGLSKHIKLEEERRSEDAQSKAALTDWLRAKASFVIEGLKEADKDEFCRCELKLQKWYGDLRGKPFAIEAENSILDISGFSKQYNCAFIWQKDGVKKLNLYLIINYFKGGKLRFKKIKPEAFEANRFYTVINKKSGEIVPMEVNFNFDDPNLIILPLAFGKRQGREFIWNDLLSLETGSLKLANGRVIEKTLYNRRTRQDEPALFVALTFERREVLDSSNIKPMNLIGVDRGENIPAVIALTDPEGCPLSRFKDSLGNPTHILRIGESYKEKQRTIQAKKEVEQRRAGGYSRKYASKAKNLADDMVRNTARDLLYYAVTQDAMLIFENLSRGFGRQGKRTFMAERQYTRMEDWLTAKLAYEGLPSKTYLSKTLAQYTSKTCSNCGFTITSADYDRVLEKLKKTATGWMTTINGKELKVEGQITYYNRYKRQNVVKDLSVELDRLSEESVNNDISSWTKGRSGEALSLLKKRFSHRPVQEKFVCLNCGFETHADEQAALNIARSWLFLRSQEYKKYQTNKTTGNTDKRAFVETWQSFYRKKLKEVWKPAV

SEQ ID NO: 41855 - protein, 979 aa, synthetic construct
  REGION 1..979: note = engineered CasX variant
QEIKRISKIRRRLVKDSNTKKAGKTGPMKTLLVRVMTPDLRERLENLRKKPENIPQPISNTSRANLNKLLTDYTEMKKAILHVYWEEFQKDPVGLMSRVAQPASKKIDQNKLKPEMDEKGNLTTAGFACSQCGQPLFVYKLEQVSEKGKAYTNYFGRCNVAEHEKLILLAQLKPEKDSDEAVTYSLGKFGQRALDFYSIHVTKESTHPVKPLAQIAGNRYASVPVGKALSDACMGTIASFLSKYQDIIIEHQKVVKGNQKRLESLRELAGKENLEYPSVTLPPQPHTKEGVDAYNEVIARVRMWVNLNLWQKLKLSRDDAKPLLRLKGFPSFPLVERQANEVDWWDMVCNVKKLINEKKEDGKVFWQNLAGYKRQEALRPYLSSEEDRKKGKKFARYQLGDLLLHLEKKHGEYDWGKVYDEAWERIDKKVEGLSKHIKLEEERRSEDAQSKAALTDWLRAKASFVIEGLKEADKDEFCRCELKLQKWYGDLRGKPFAIEAENSILDISGFSKQYNCAFIWQKDGVKKLNLYLIINYFKGGKLRFKKIKPEAFEANRFYTVINKKSGEIVPMEVNFNFDDPNLIILPLAFGKRQGREFIWNDLLSLETGSLKLANGRVIEKTLYNRRTRQDEPALFVALTFERREVLDSSNIKPMNLIGVDRGENIPAVIALTDPEGCPLSRFKDSLGNPTHILRIGESYKEKQRTIQAKKEVEQRRAGGYSRKYASKAKNLADDMVRNTARDLLYYAVTQDAMLIFENLSRGFGRQGKRTFMAERQYTRMEDWLTAKLAYEGLPSKTYLSKTLAQYTSKTCSNCGFTITSADYDRVLEKLKKTATGWMTTINGKELKVEGQITYYNRYKRQNVVKDLSVELDRLSEESVNNDISSWTKGRSGEALSLLKKRFSHRPVQEKFVCLNCGFETHADEQAALNIARSWLFLRSQEYKKYQTNKTTGNTDKRAFVETWQSFYRKKLKEVWKPAV

SEQ ID NO: 41856 - protein, 979 aa, synthetic construct
  REGION 1..979: note = engineered CasX variant
QEIKRISKIRRRLVKDSNTKKAGKTGPMKTLLVRVMTPDLRERLENLRKKPENIPQPISNTSRANLNKLLTDYTEMKKAILHVYWEEFQKDPVGLMSRVAQPASKKIDQNKLKPEMDEKGNLTTAGFACSQCGQPLFVYKLEQVSEKGKAYTNYFGRCNVAEHEKLIKLAQLKPEKDSDEAVTYSLGKFGQRALDFYSIHVTKESTHPVKPLAQIAGNRYASGPVGKALSDACMGTIASFLSKYQDIIIEHQKVVKGNQKRLESLRELAGKENLEYPSVTLPPQPHTKEGVDAYNEVIARVRMWVNLNLWQKLKLSRDDAKPLLRLKGFPSFPLVERQANEVDWWDMVCNVKKLINEKKEDGKVFWQNLAGYKRQEALRPYLSSEEDRKKGKKFARYQLGDLLLHLEKKHGEYDWGKVYDEAWERIDKKVEGLSKHIKLEEERRSEDAQSKAALTDWLRAKASFVIEGLKEADKDEFCRCELKLQKWYGDLRGKPFAIEAENSILDISGFSKQYNCAFIWQKDGVKKLNLYLIINYFKGGKLRFKKIKPEAFEANRFYTVINKKSGEIVPMEVNFNFDDPNLIILPLAFGKRQGREFIWNDLLSLETGSLKLANGRVIEKTLYNRRTRQDEPALFVALTFERREVLDSSNIKPMNLIGVDRGENIPAVIALTDPEGCPLSRFKDSLGNPTHILRIGESYKEKQRTIQAKKEVEQRRAGGYSRKYASKAKNLADDMVRNTARDLLYYAVTQDAMLIFENLSRGFGRQGKRTFMAERQYTRMEDWLTAKLAYEGLPSKTYLSKTLAQYTSKTCSNCGFTITSADYDRVLEKLKKTATGWMTTINGKELKVEGQITYYNRYKRQNVVKDLSVELDRLSEESVNNDISSWTKGRSGEALSLLKKRFSHRPVQEKFVCLNCGFETHADEQAALNIARSWLFLRSQEYKKYQTNKTTGNTDKRAFVETWQSFYRKKLKEVWKPAV

SEQ ID NO: 41857 - protein, 978 aa, synthetic construct
  REGION 1..978: note = engineered CasX variant
QEIKRISKIRRRLVKDSNTKKAGKTGPMKTLLVRVMTPDLRERLENLRKKPENIPQPISNTSRANLNKLLTDYTEMKKAILHVYWEEFQKDPVGLMSRVAQPASKKIDQNKLKPEMDEKGNLTTAGFACSQCGQPLFVYKLEQVSEKGKAYTNYFGRCNVAEHEKLILLAQLKPEKDSDEAVTYSLGKFGQRALDFYSIHVTKESTHPVKPLAQIAGNRYASPVGKALSDACMGTIASFLSKYQDIIIEHQKVVKGNQKRLESLRELAGKENLEYPSVTLPPQPHTKEGVDAYNEVIARVRMWVNLNLWQKLKLSRDDAKPLLRLKGFPSFPLVERQANEVDWWDMVCNVKKLINEKKEDGKVFWQNLAGYKRQEALRPYLSSEEDRKKGKKFARYQLGDLLLHLEKKHGEYDWGKVYDEAWERIDKKVEGLSKHIKLEEERRSEDAQSKAALTDWLRAKASFVIEGLKEADKDEFCRCELKLQKWYGDLRGKPFAIEAENSILDISGFSKQYNCAFIWQKDGVKKLNLYLIINYFKGGKLRFKKIKPEAFEANRFYTVINKKSGEIVPMEVNFNFDDPNLIILPLAFGKRQGREFIWNDLLSLETGSLKLANGRVIEKTLYNRRTRQDEPALFVALTFERREVLDSSNIKPMNLIGVDRGENIPAVIALTDPEGCPLSRFKDSLGNPTHILRIGESYKEKQRTIQAKKEVEQRRAGGYSRKYASKAKNLADDMVRNTARDLLYYAVTQDAMLIFENLSRGFGRQGKRTFMAERQYTRMEDWLTAKLAYEGLPSKTYLSKTLAQYTSKTCSNCGFTITSADYDRVLEKLKKTATGWMTTINGKELKVEGQITYYNRYKRQNVVKDLSVELDRLSEESVNNDISSWTKGRSGEALSLLKKRFSHRPVQEKFVCLNCGFETHADEQAALNIARSWLFLRSQEYKKYQTNKTTGNTDKRAFVETWQSFYRKKLKEVWKPAV

SEQ ID NO: 41858 - protein, 978 aa, synthetic construct
  REGION 1..978: note = engineered CasX variant
QEIKRISKIRRRLVKDSNTKKAGKTGPMKTLLVRVMTPDLRERLENLRKKPENIPQPISNTSRANLNKLLTDYTEMKKAILHVYWEEFQKDPVGLMSRVAQPASKKIDQNKLKPEMDEKGNLTTAGFACSQCGQPLFVYKLEQVSEKGKAYTNYFGRCNVAEHEKLILLAQLKPEKDSDEAVTYSLGKFGQRALDFYSIHVTKESTHPVKPLAQIAGNRYASYPVGKALSDACMGTIASFLSKYQDIIIEHQKVVKGNQKRLESLRELAGKENLEYPSVTLPPQPHTKEGVDAYNEVIARVRMWVNLNLWQKLKLSRDDAKPLLRLKGFPSFPLVERQANEVDWWDMVCNVKKLINEKKEDGKVFWQNLAGYKRQEALRPYLSSEEDRKKGKKFARYQLGDLLLHLEKKHGEDWGDVYDEAWERIDKKVEGLSKHIKLEEERRSEDAQSKAALTDWLRAKASFVIEGLKEADKDEFCRCELKLQKWYGDLRGKPFAIEAENSILDISGFSKQYNCAFIWQKDGVKKLNLYLIINYFKGGKLRFKKIKPEAFEANRFYTVINKKSGEIVPMEVNFNFDDPNLIILPLAFGKRQGREFIWNDLLSLETGSLKLANGRVIEKTLYNRRTRQDEPALFVALTFERREVLDSSNIKPMNLIGVDRGENIPAVIALTDPEGCPLSRFKDSLGNPTHILRIGESYKEKQRTIQAKKEVEQRRAGGYSRKYASKAKNLADDMVRNTARDLLYYAVTQDAMLIFENLSRGFGRQGKRTFMAERQYTRMEDWLTAKLAYEGLPSKTYLSKTLAQYTSKTCSNCGFTITSADYDRVLEKLKKTATGWMTTINGKELKVEGQITYYNRYKRQNVVKDLSVELDRLSEESVNNDISSWTKGRSGEALSLLKKRFSHRPVQEKFVCLNCGFETHADEQAALNIARSWLFLRSQEYKKYQTNKTTGNTDKRAFVETWQSFYRKKLKEVWKPAV

SEQ ID NO: 41859 - protein, 978 aa, synthetic construct
  REGION 1..978: note = engineered CasX variant
QEIKRISKIRRRLVKDSNTKKAGKTGPMKTLLVRVMTPDLRERLENLRKKPENIPQPISNTSRANLNKLLTDYTEMKKAILHVYWEEFQKDPVGLMSRVAQPASKKIDQNKLKPEMDEKGNLTTAGFACSQCGQPLFVYKLEQVSEKGKAYTNYFGRCNVAEHEKLILLAQLKPEKDSDEAVTYSLGKFGQRALDFYSIHVTKESTHPVKPLAQIAGNRYASHPVGKALSDACMGTIASFLSKYQDIIIEHQKVVKGNQKRLESLRELAGKENLEYPSVTLPPQPHTKEGVDAYNEVIARVRMWVNLNLWQKLKLSRDDAKPLLRLKGFPSFPLVERQANEVDWWDMVCNVKKLINEKKEDGKVFWQNLAGYKRQEALRPYLSSEEDRKKGKKFARYQLGDLLLHLEKKHGEDWGDVYDEAWERIDKKVEGLSKHIKLEEERRSEDAQSKAALTDWLRAKASFVIEGLKEADKDEFCRCELKLQKWYGDLRGKPFAIEAENSILDISGFSKQYNCAFIWQKDGVKKLNLYLIINYFKGGKLRFKKIKPEAFEANRFYTVINKKSGEIVPMEVNFNFDDPNLIILPLAFGKRQGREFIWNDLLSLETGSLKLANGRVIEKTLYNRRTRQDEPALFVALTFERREVLDSSNIKPMNLIGVDRGENIPAVIALTDPEGCPLSRFKDSLGNPTHILRIGESYKEKQRTIQAKKEVEQRRAGGYSRKYASKAKNLADDMVRNTARDLLYYAVTQDAMLIFENLSRGFGRQGKRTFMAERQYTRMEDWLTAKLAYEGLPSKTYLSKTLAQYTSKTCSNCGFTITSADYDRVLEKLKKTATGWMTTINGKELKVEGQITYYNRYKRQNVVKDLSVELDRLSEESVNNDISSWTKGRSGEALSLLKKRFSHRPVQEKFVCLNCGFETHADEQAALNIARSWLFLRSQEYKKYQTNKTTGNTDKRAFVETWQSFYRKKLKEVWKPAV

SEQ ID NO: 41860 - protein, 978 aa, synthetic construct
  REGION 1..978: note = engineered CasX variant
QEIKRISKIRRRLVKDSNTKKAGKTGPMKTLLVRVMTPDLRERLENLRKKPENIPQPISNTSRANLNKLLTDYTEMKKAILHVYWEEFQKDPVGLMSRVAQPASKKIDQNKLKPEMDEKGNLTTAGFACSQCGQPLFVYKLEQVSEKGKAYTNYFGRCNVAEHEKLILLAQLKPEKDSDEAVTYSLGKFGQRALDFYSIHVTKESTHPVKPLAQIAGNRYASSPVGKALSDACMGTIASFLSKYQDIIIEHQKVVKGNQKRLESLRELAGKENLEYPSVTLPPQPHTKEGVDAYNEVIARVRMWVNLNLWQKLKLSRDDAKPLLRLKGFPSFPLVERQANEVDWWDMVCNVKKLINEKKEDGKVFWQNLAGYKRQEALRPYLSSEEDRKKGKKFARYQLGDLLLHLEKKHGEDWGDVYDEAWERIDKKVEGLSKHIKLEEERRSEDAQSKAALTDWLRAKASFVIEGLKEADKDEFCRCELKLQKWYGDLRGKPFAIEAENSILDISGFSKQYNCAFIWQKDGVKKLNLYLIINYFKGGKLRFKKIKPEAFEANRFYTVINKKSGEIVPMEVNFNFDDPNLIILPLAFGKRQGREFIWNDLLSLETGSLKLANGRVIEKTLYNRRTRQDEPALFVALTFERREVLDSSNIKPMNLIGVDRGENIPAVIALTDPEGCPLSRFKDSLGNPTHILRIGESYKEKQRTIQAKKEVEQRRAGGYSRKYASKAKNLADDMVRNTARDLLYYAVTQDAMLIFENLSRGFGRQGKRTFMAERQYTRMEDWLTAKLAYEGLPSKTYLSKTLAQYTSKTCSNCGFTITSADYDRVLEKLKKTATGWMTTINGKELKVEGQITYYNRYKRQNVVKDLSVELDRLSEESVNNDISSWTKGRSGEALSLLKKRFSHRPVQEKFVCLNCGFETHADEQAALNIARSWLFLRSQEYKKYQTNKTTGNTDKRAFVETWQSFYRKKLKEVWKPAV

SEQ ID NO: 41861 - protein, 978 aa, synthetic construct
  REGION 1..978: note = engineered CasX variant
QEIKRISKIRRRLVKDSNTKKAGKTGPMKTLLVRVMTPDLRERLENLRKKPENIPQPISNTSRANLNKLLTDYTEMKKAILHVYWEEFQKDPVGLMSRVAQPASKKIDQNKLKPEMDEKGNLTTAGFACSQCGQPLFVYKLEQVSEKGKAYTNYFGRCNVAEHEKLILLAQLKPEKDSDEAVTYSLGKFGQRALDFYSIHVTKESTHPVKPLAQIAGNRYASTPVGKALSDACMGTIASFLSKYQDIIIEHQKVVKGNQKRLESLRELAGKENLEYPSVTLPPQPHTKEGVDAYNEVIARVRMWVNLNLWQKLKLSRDDAKPLLRLKGFPSFPLVERQANEVDWWDMVCNVKKLINEKKEDGKVFWQNLAGYKRQEALRPYLSSEEDRKKGKKFARYQLGDLLLHLEKKHGEDWGDVYDEAWERIDKKVEGLSKHIKLEEERRSEDAQSKAALTDWLRAKASFVIEGLKEADKDEFCRCELKLQKWYGDLRGKPFAIEAENSILDISGFSKQYNCAFIWQKDGVKKLNLYLIINYFKGGKLRFKKIKPEAFEANRFYTVINKKSGEIVPMEVNFNFDDPNLIILPLAFGKRQGREFIWNDLLSLETGSLKLANGRVIEKTLYNRRTRQDEPALFVALTFERREVLDSSNIKPMNLIGVDRGENIPAVIALTDPEGCPLSRFKDSLGNPTHILRIGESYKEKQRTIQAKKEVEQRRAGGYSRKYASKAKNLADDMVRNTARDLLYYAVTQDAMLIFENLSRGFGRQGKRTFMAERQYTRMEDWLTAKLAYEGLPSKTYLSKTLAQYTSKTCSNCGFTITSADYDRVLEKLKKTATGWMTTINGKELKVEGQITYYNRYKRQNVVKDLSVELDRLSEESVNNDISSWTKGRSGEALSLLKKRFSHRPVQEKFVCLNCGFETHADEQAALNIARSWLFLRSQEYKKYQTNKTTGNTDKRAFVETWQSFYRKKLKEVWKPAV

SEQ ID NO: 41862 - protein, 978 aa, synthetic construct
  REGION 1..978: note = engineered CasX variant
QEIKRISKIRRRLVKDSNTKKAGKTGPMKTLLVRVMTPDLRERLENLRKKPENIPQPISNTSRANLNKLLTDYTEMKKAILHVYWEEFQKDPVGLMSRVAQPASKKIDQNKLKPEMDEKGNLTTAGFACSQCGQPLFVYKLEQVSEKGKAYTNYFGRCNVAEHEKLILLAQLKPEKDSDEAVTYSLGKFGQRALDFYSIHVTKESTHPVKPLAQIAGNRYASAPVGKALSDACMGTIASFLSKYQDIIIEHQKVVKGNQKRLESLRELAGKENLEYPSVTLPPQPHTKEGVDAYNEVIARVRMWVNLNLWQKLKLSRDDAKPLLRLKGFPSFPLVERQANEVDWWDMVCNVKKLINEKKEDGKVFWQNLAGYKRQEALRPYLSSEEDRKKGKKFARYQLGDLLLHLEKKHGEDWGDVYDEAWERIDKKVEGLSKHIKLEEERRSEDAQSKAALTDWLRAKASFVIEGLKEADKDEFCRCELKLQKWYGDLRGKPFAIEAENSILDISGFSKQYNCAFIWQKDGVKKLNLYLIINYFKGGKLRFKKIKPEAFEANRFYTVINKKSGEIVPMEVNFNFDDPNLIILPLAFGKRQGREFIWNDLLSLETGSLKLANGRVIEKTLYNRRTRQDEPALFVALTFERREVLDSSNIKPMNLIGVDRGENIPAVIALTDPEGCPLSRFKDSLGNPTHILRIGESYKEKQRTIQAKKEVEQRRAGGYSRKYASKAKNLADDMVRNTARDLLYYAVTQDAMLIFENLSRGFGRQGKRTFMAERQYTRMEDWLTAKLAYEGLPSKTYLSKTLAQYTSKTCSNCGFTITSADYDRVLEKLKKTATGWMTTINGKELKVEGQITYYNRYKRQNVVKDLSVELDRLSEESVNNDISSWTKGRSGEALSLLKKRFSHRPVQEKFVCLNCGFETHADEQAALNIARSWLFLRSQEYKKYQTNKTTGNTDKRAFVETWQSFYRKKLKEVWKPAV

SEQ ID NO: 41863 - protein, 978 aa, synthetic construct
  REGION 1..978: note = engineered CasX variant
QEIKRISKIRRRLVKDSNTKKAGKTGPMKTLLVRVMTPDLRERLENLRKKPENIPQPISNTSRANLNKLLTDYTEMKKAILHVYWEEFQKDPVGLMSRVAQPASKKIDQNKLKPEMDEKGNLTTAGFACSQCGQPLFVYKLEQVSEKGKAYTNYFGRCNVAEHEKLILLAQLKPEKDSDEAVTYSLGKFGQRALDFYSIHVTKESTHPVKPLAQIAGNRYASVPVGKALSDACMGTIASFLSKYQDIIIEHQKVVKGNQKRLESLRELAGKENLEYPSVTLPPQPHTKEGVDAYNEVIARVRMWVNLNLWQKLKLSRDDAKPLLRLKGFPSFPLVERQANEVDWWDMVCNVKKLINEKKEDGKVFWQNLAGYKRQEALRPYLSSEEDRKKGKKFARYQLGDLLLHLEKKHGEDWGDVYDEAWERIDKKVEGLSKHIKLEEERRSEDAQSKAALTDWLRAKASFVIEGLKEADKDEFCRCELKLQKWYGDLRGKPFAIEAENSILDISGFSKQYNCAFIWQKDGVKKLNLYLIINYFKGGKLRFKKIKPEAFEANRFYTVINKKSGEIVPMEVNFNFDDPNLIILPLAFGKRQGREFIWNDLLSLETGSLKLANGRVIEKTLYNRRTRQDEPALFVALTFERREVLDSSNIKPMNLIGVDRGENIPAVIALTDPEGCPLSRFKDSLGNPTHILRIGESYKEKQRTIQAKKEVEQRRAGGYSRKYASKAKNLADDMVRNTARDLLYYAVTQDAMLIFENLSRGFGRQGKRTFMAERQYTRMEDWLTAKLAYEGLPSKTYLSKTLAQYTSKTCSNCGFTITSADYDRVLEKLKKTATGWMTTINGKELKVEGQITYYNRYKRQNVVKDLSVELDRLSEESVNNDISSWTKGRSGEALSLLKKRFSHRPVQEKFVCLNCGFETHADEQAALNIARSWLFLRSQEYKKYQTNKTTGNTDKRAFVETWQSFYRKKLKEVWKPAV

SEQ ID NO: 41864 - protein, 978 aa, synthetic construct
  REGION 1..978: note = engineered CasX variant
QEIKRISKIRRRLVKDSNTKKAGKTGPMKTLLVRVMTPDLRERLENLRKKPENIPQPISNTSRANLNKLLTDYTEMKKAILHVYWEEFQKDPVGLMSRVAQPASKKIDQNKLKPEMDEKGNLTTAGFACSQCGQPLFVYKLEQVSEKGKAYTNYFGRCNVAEHEKLIKLAQLKPEKDSDEAVTYSLGKFGQRALDFYSIHVTKESTHPVKPLAQIAGNRYASGPVGKALSDACMGTIASFLSKYQDIIIEHQKVVKGNQKRLESLRELAGKENLEYPSVTLPPQPHTKEGVDAYNEVIARVRMWVNLNLWQKLKLSRDDAKPLLRLKGFPSFPLVERQANEVDWWDMVCNVKKLINEKKEDGKVFWQNLAGYKRQEALRPYLSSEEDRKKGKKFARYQLGDLLLHLEKKHGEDWGDVYDEAWERIDKKVEGLSKHIKLEEERRSEDAQSKAALTDWLRAKASFVIEGLKEADKDEFCRCELKLQKWYGDLRGKPFAIEAENSILDISGFSKQYNCAFIWQKDGVKKLNLYLIINYFKGGKLRFKKIKPEAFEANRFYTVINKKSGEIVPMEVNFNFDDPNLIILPLAFGKRQGREFIWNDLLSLETGSLKLANGRVIEKTLYNRRTRQDEPALFVALTFERREVLDSSNIKPMNLIGVDRGENIPAVIALTDPEGCPLSRFKDSLGNPTHILRIGESYKEKQRTIQAKKEVEQRRAGGYSRKYASKAKNLADDMVRNTARDLLYYAVTQDAMLIFENLSRGFGRQGKRTFMAERQYTRMEDWLTAKLAYEGLPSKTYLSKTLAQYTSKTCSNCGFTITSADYDRVLEKLKKTATGWMTTINGKELKVEGQITYYNRYKRQNVVKDLSVELDRLSEESVNNDISSWTKGRSGEALSLLKKRFSHRPVQEKFVCLNCGFETHADEQAALNIARSWLFLRSQEYKKYQTNKTTGNTDKRAFVETWQSFYRKKLKEVWKPAV

SEQ ID NO: 41865 - protein, 977 aa, synthetic construct
  REGION 1..977: note = engineered CasX variant
QEIKRISKIRRRLVKDSNTKKAGKTGPMKTLLVRVMTPDLRERLENLRKKPENIPQPISNTSRANLNKLLTDYTEMKKAILHVYWEEFQKDPVGLMSRVAQPASKKIDQNKLKPEMDEKGNLTTAGFACSQCGQPLFVYKLEQVSEKGKAYTNYFGRCNVAEHEKLILLAQLKPEKDSDEAVTYSLGKFGQRALDFYSIHVTKESTHPVKPLAQIAGNRYASPVGKALSDACMGTIASFLSKYQDIIIEHQKVVKGNQKRLESLRELAGKENLEYPSVTLPPQPHTKEGVDAYNEVIARVRMWVNLNLWQKLKLSRDDAKPLLRLKGFPSFPLVERQANEVDWWDMVCNVKKLINEKKEDGKVFWQNLAGYKRQEALRPYLSSEEDRKKGKKFARYQLGDLLLHLEKKHGEDWGDVYDEAWERIDKKVEGLSKHIKLEEERRSEDAQSKAALTDWLRAKASFVIEGLKEADKDEFCRCELKLQKWYGDLRGKPFAIEAENSILDISGFSKQYNCAFIWQKDGVKKLNLYLIINYFKGGKLRFKKIKPEAFEANRFYTVINKKSGEIVPMEVNFNFDDPNLIILPLAFGKRQGREFIWNDLLSLETGSLKLANGRVIEKTLYNRRTRQDEPALFVALTFERREVLDSSNIKPMNLIGVDRGENIPAVIALTDPEGCPLSRFKDSLGNPTHILRIGESYKEKQRTIQAKKEVEQRRAGGYSRKYASKAKNLADDMVRNTARDLLYYAVTQDAMLIFENLSRGFGRQGKRTFMAERQYTRMEDWLTAKLAYEGLPSKTYLSKTLAQYTSKTCSNCGFTITSADYDRVLEKLKKTATGWMTTINGKELKVEGQITYYNRYKRQNVVKDLSVELDRLSEESVNNDISSWTKGRSGEALSLLKKRFSHRPVQEKFVCLNCGFETHADEQAALNIARSWLFLRSQEYKKYQTNKTTGNTDKRAFVETWQSFYRKKLKEVWKPAV

SEQ ID NO: 41866 - protein, 978 aa, synthetic construct
  REGION 1..978: note = engineered CasX variant
QEIKRISKIRRRLVKDSNTKKAGKTGPMKTLLVRVMTPDLRERLENLRKKPENIPQPISNTSRANLNKLLTDYTEMKKAILHVYWEEFQKDPVGLMSRVAQPASKKIDQNKLKPEMDEKGNLTTAGFACSQCGQPLFVYKLEQVSEKGKAYTNYFGRCNVAEHEKLILLAQLKPEKDSDEAVTYSLGKFGQRALDFYSIHVTKESTHPVKPLAQIAGNRYASYPVGKALSDACMGTIASFLSKYQDIIIEHQKVVKGNQKRLESLRELAGKENLEYPSVTLPPQPHTKEGVDAYNEVIARVRMWVNLNLWQKLKLSRDDAKPLLRLKGFPSFPLVERQANEVDWWDMVCNVKKLINEKKEDGKVFWQNLAGYKRQEALRPYLSSEEDRKKGKKFARYQLGDLLLHLEKKHGEDWGKVYGEAWERIDKKVEGLSKHIKLEEERRSEDAQSKAALTDWLRAKASFVIEGLKEADKDEFCRCELKLQKWYGDLRGKPFAIEAENSILDISGFSKQYNCAFIWQKDGVKKLNLYLIINYFKGGKLRFKKIKPEAFEANRFYTVINKKSGEIVPMEVNFNFDDPNLIILPLAFGKRQGREFIWNDLLSLETGSLKLANGRVIEKTLYNRRTRQDEPALFVALTFERREVLDSSNIKPMNLIGVDRGENIPAVIALTDPEGCPLSRFKDSLGNPTHILRIGESYKEKQRTIQAKKEVEQRRAGGYSRKYASKAKNLADDMVRNTARDLLYYAVTQDAMLIFENLSRGFGRQGKRTFMAERQYTRMEDWLTAKLAYEGLPSKTYLSKTLAQYTSKTCSNCGFTITSADYDRVLEKLKKTATGWMTTINGKELKVEGQITYYNRYKRQNVVKDLSVELDRLSEESVNNDISSWTKGRSGEALSLLKKRFSHRPVQEKFVCLNCGFETHADEQAALNIARSWLFLRSQEYKKYQTNKTTGNTDKRAFVETWQSFYRKKLKEVWKPAV

SEQ ID NO: 41867 - protein, 978 aa, synthetic construct
  REGION 1..978: note = engineered CasX variant
QEIKRISKIRRRLVKDSNTKKAGKTGPMKTLLVRVMTPDLRERLENLRKKPENIPQPISNTSRANLNKLLTDYTEMKKAILHVYWEEFQKDPVGLMSRVAQPASKKIDQNKLKPEMDEKGNLTTAGFACSQCGQPLFVYKLEQVSEKGKAYTNYFGRCNVAEHEKLILLAQLKPEKDSDEAVTYSLGKFGQRALDFYSIHVTKESTHPVKPLAQIAGNRYASHPVGKALSDACMGTIASFLSKYQDIIIEHQKVVKGNQKRLESLRELAGKENLEYPSVTLPPQPHTKEGVDAYNEVIARVRMWVNLNLWQKLKLSRDDAKPLLRLKGFPSFPLVERQANEVDWWDMVCNVKKLINEKKEDGKVFWQNLAGYKRQEALRPYLSSEEDRKKGKKFARYQLGDLLLHLEKKHGEDWGKVYGEAWERIDKKVEGLSKHIKLEEERRSEDAQSKAALTDWLRAKASFVIEGLKEADKDEFCRCELKLQKWYGDLRGKPFAIEAENSILDISGFSKQYNCAFIWQKDGVKKLNLYLIINYFKGGKLRFKKIKPEAFEANRFYTVINKKSGEIVPMEVNFNFDDPNLIILPLAFGKRQGREFIWNDLLSLETGSLKLANGRVIEKTLYNRRTRQDEPALFVALTFERREVLDSSNIKPMNLIGVDRGENIPAVIALTDPEGCPLSRFKDSLGNPTHILRIGESYKEKQRTIQAKKEVEQRRAGGYSRKYASKAKNLADDMVRNTARDLLYYAVTQDAMLIFENLSRGFGRQGKRTFMAERQYTRMEDWLTAKLAYEGLPSKTYLSKTLAQYTSKTCSNCGFTITSADYDRVLEKLKKTATGWMTTINGKELKVEGQITYYNRYKRQNVVKDLSVELDRLSEESVNNDISSWTKGRSGEALSLLKKRFSHRPVQEKFVCLNCGFETHADEQAALNIARSWLFLRSQEYKKYQTNKTTGNTDKRAFVETWQSFYRKKLKEVWKPAV

SEQ ID NO: 41868 - protein, 978 aa, synthetic construct
  REGION 1..978: note = engineered CasX variant
QEIKRISKIRRRLVKDSNTKKAGKTGPMKTLLVRVMTPDLRERLENLRKKPENIPQPISNTSRANLNKLLTDYTEMKKAILHVYWEEFQKDPVGLMSRVAQPASKKIDQNKLKPEMDEKGNLTTAGFACSQCGQPLFVYKLEQVSEKGKAYTNYFGRCNVAEHEKLILLAQLKPEKDSDEAVTYSLGKFGQRALDFYSIHVTKESTHPVKPLAQIAGNRYASSPVGKALSDACMGTIASFLSKYQDIIIEHQKVVKGNQKRLESLRELAGKENLEYPSVTLPPQPHTKEGVDAYNEVIARVRMWVNLNLWQKLKLSRDDAKPLLRLKGFPSFPLVERQANEVDWWDMVCNVKKLINEKKEDGKVFWQNLAGYKRQEALRPYLSSEEDRKKGKKFARYQLGDLLLHLEKKHGEDWGKVYGEAWERIDKKVEGLSKHIKLEEERRSEDAQSKAALTDWLRAKASFVIEGLKEADKDEFCRCELKLQKWYGDLRGKPFAIEAENSILDISGFSKQYNCAFIWQKDGVKKLNLYLIINYFKGGKLRFKKIKPEAFEANRFYTVINKKSGEIVPMEVNFNFDDPNLIILPLAFGKRQGREFIWNDLLSLETGSLKLANGRVIEKTLYNRRTRQDEPALFVALTFERREVLDSSNIKPMNLIGVDRGENIPAVIALTDPEGCPLSRFKDSLGNPTHILRIGESYKEKQRTIQAKKEVEQRRAGGYSRKYASKAKNLADDMVRNTARDLLYYAVTQDAMLIFENLSRGFGRQGKRTFMAERQYTRMEDWLTAKLAYEGLPSKTYLSKTLAQYTSKTCSNCGFTITSADYDRVLEKLKKTATGWMTTINGKELKVEGQITYYNRYKRQNVVKDLSVELDRLSEESVNNDISSWTKGRSGEALSLLKKRFSHRPVQEKFVCLNCGFETHADEQAALNIARSWLFLRSQEYKKYQTNKTTGNTDKRAFVETWQSFYRKKLKEVWKPAV

SEQ ID NO: 41869 - protein, 978 aa, synthetic construct
  REGION 1..978: note = engineered CasX variant
QEIKRISKIRRRLVKDSNTKKAGKTGPMKTLLVRVMTPDLRERLENLRKKPENIPQPISNTSRANLNKLLTDYTEMKKAILHVYWEEFQKDPVGLMSRVAQPASKKIDQNKLKPEMDEKGNLTTAGFACSQCGQPLFVYKLEQVSEKGKAYTNYFGRCNVAEHEKLILLAQLKPEKDSDEAVTYSLGKFGQRALDFYSIHVTKESTHPVKPLAQIAGNRYASTPVGKALSDACMGTIASFLSKYQDIIIEHQKVVKGNQKRLESLRELAGKENLEYPSVTLPPQPHTKEGVDAYNEVIARVRMWVNLNLWQKLKLSRDDAKPLLRLKGFPSFPLVERQANEVDWWDMVCNVKKLINEKKEDGKVFWQNLAGYKRQEALRPYLSSEEDRKKGKKFARYQLGDLLLHLEKKHGEDWGKVYGEAWERIDKKVEGLSKHIKLEEERRSEDAQSKAALTDWLRAKASFVIEGLKEADKDEFCRCELKLQKWYGDLRGKPFAIEAENSILDISGFSKQYNCAFIWQKDGVKKLNLYLIINYFKGGKLRFKKIKPEAFEANRFYTVINKKSGEIVPMEVNFNFDDPNLIILPLAFGKRQGREFIWNDLLSLETGSLKLANGRVIEKTLYNRRTRQDEPALFVALTFERREVLDSSNIKPMNLIGVDRGENIPAVIALTDPEGCPLSRFKDSLGNPTHILRIGESYKEKQRTIQAKKEVEQRRAGGYSRKYASKAKNLADDMVRNTARDLLYYAVTQDAMLIFENLSRGFGRQGKRTFMAERQYTRMEDWLTAKLAYEGLPSKTYLSKTLAQYTSKTCSNCGFTITSADYDRVLEKLKKTATGWMTTINGKELKVEGQITYYNRYKRQNVVKDLSVELDRLSEESVNNDISSWTKGRSGEALSLLKKRFSHRPVQEKFVCLNCGFETHADEQAALNIARSWLFLRSQEYKKYQTNKTTGNTDKRAFVETWQSFYRKKLKEVWKPAV

SEQ ID NO: 41870 - protein, 978 aa, synthetic construct
  REGION 1..978: note = engineered CasX variant
QEIKRISKIRRRLVKDSNTKKAGKTGPMKTLLVRVMTPDLRERLENLRKKPENIPQPISNTSRANLNKLLTDYTEMKKAILHVYWEEFQKDPVGLMSRVAQPASKKIDQNKLKPEMDEKGNLTTAGFACSQCGQPLFVYKLEQVSEKGKAYTNYFGRCNVAEHEKLILLAQLKPEKDSDEAVTYSLGKFGQRALDFYSIHVTKESTHPVKPLAQIAGNRYASAPVGKALSDACMGTIASFLSKYQDIIIEHQKVVKGNQKRLESLRELAGKENLEYPSVTLPPQPHTKEGVDAYNEVIARVRMWVNLNLWQKLKLSRDDAKPLLRLKGFPSFPLVERQANEVDWWDMVCNVKKLINEKKEDGKVFWQNLAGYKRQEALRPYLSSEEDRKKGKKFARYQLGDLLLHLEKKHGEDWGKVYGEAWERIDKKVEGLSKHIKLEEERRSEDAQSKAALTDWLRAKASFVIEGLKEADKDEFCRCELKLQKWYGDLRGKPFAIEAENSILDISGFSKQYNCAFIWQKDGVKKLNLYLIINYFKGGKLRFKKIKPEAFEANRFYTVINKKSGEIVPMEVNFNFDDPNLIILPLAFGKRQGREFIWNDLLSLETGSLKLANGRVIEKTLYNRRTRQDEPALFVALTFERREVLDSSNIKPMNLIGVDRGENIPAVIALTDPEGCPLSRFKDSLGNPTHILRIGESYKEKQRTIQAKKEVEQRRAGGYSRKYASKAKNLADDMVRNTARDLLYYAVTQDAMLIFENLSRGFGRQGKRTFMAERQYTRMEDWLTAKLAYEGLPSKTYLSKTLAQYTSKTCSNCGFTITSADYDRVLEKLKKTATGWMTTINGKELKVEGQITYYNRYKRQNVVKDLSVELDRLSEESVNNDISSWTKGRSGEALSLLKKRFSHRPVQEKFVCLNCGFETHADEQAALNIARSWLFLRSQEYKKYQTNKTTGNTDKRAFVETWQSFYRKKLKEVWKPAV

SEQ ID NO: 41871 - protein, 978 aa, synthetic construct
  REGION 1..978: note = engineered CasX variant
QEIKRISKIRRRLVKDSNTKKAGKTGPMKTLLVRVMTPDLRERLENLRKKPENIPQPISNTSRANLNKLLTDYTEMKKAILHVYWEEFQKDPVGLMSRVAQPASKKIDQNKLKPEMDEKGNLTTAGFACSQCGQPLFVYKLEQVSEKGKAYTNYFGRCNVAEHEKLILLAQLKPEKDSDEAVTYSLGKFGQRALDFYSIHVTKESTHPVKPLAQIAGNRYASVPVGKALSDACMGTIASFLSKYQDIIIEHQKVVKGNQKRLESLRELAGKENLEYPSVTLPPQPHTKEGVDAYNEVIARVRMWVNLNLWQKLKLSRDDAKPLLRLKGFPSFPLVERQANEVDWWDMVCNVKKLINEKKEDGKVFWQNLAGYKRQEALRPYLSSEEDRKKGKKFARYQLGDLLLHLEKKHGEDWGKVYGEAWERIDKKVEGLSKHIKLEEERRSEDAQSKAALTDWLRAKASFVIEGLKEADKDEFCRCELKLQKWYGDLRGKPFAIEAENSILDISGFSKQYNCAFIWQKDGVKKLNLYLIINYFKGGKLRFKKIKPEAFEANRFYTVINKKSGEIVPMEVNFNFDDPNLIILPLAFGKRQGREFIWNDLLSLETGSLKLANGRVIEKTLYNRRTRQDEPALFVALTFERREVLDSSNIKPMNLIGVDRGENIPAVIALTDPEGCPLSRFKDSLGNPTHILRIGESYKEKQRTIQAKKEVEQRRAGGYSRKYASKAKNLADDMVRNTARDLLYYAVTQDAMLIFENLSRGFGRQGKRTFMAERQYTRMEDWLTAKLAYEGLPSKTYLSKTLAQYTSKTCSNCGFTITSADYDRVLEKLKKTATGWMTTINGKELKVEGQITYYNRYKRQNVVKDLSVELDRLSEESVNNDISSWTKGRSGEALSLLKKRFSHRPVQEKFVCLNCGFETHADEQAALNIARSWLFLRSQEYKKYQTNKTTGNTDKRAFVETWQSFYRKKLKEVWKPAV

SEQ ID NO: 41872 - protein, 978 aa, synthetic construct
  REGION 1..978: note = engineered CasX variant
QEIKRISKIRRRLVKDSNTKKAGKTGPMKTLLVRVMTPDLRERLENLRKKPENIPQPISNTSRANLNKLLTDYTEMKKAILHVYWEEFQKDPVGLMSRVAQPASKKIDQNKLKPEMDEKGNLTTAGFACSQCGQPLFVYKLEQVSEKGKAYTNYFGRCNVAEHEKLIKLAQLKPEKDSDEAVTYSLGKFGQRALDFYSIHVTKESTHPVKPLAQIAGNRYASGPVGKALSDACMGTIASFLSKYQDIIIEHQKVVKGNQKRLESLRELAGKENLEYPSVTLPPQPHTKEGVDAYNEVIARVRMWVNLNLWQKLKLSRDDAKPLLRLKGFPSFPLVERQANEVDWWDMVCNVKKLINEKKEDGKVFWQNLAGYKRQEALRPYLSSEEDRKKGKKFARYQLGDLLLHLEKKHGEDWGKVYGEAWERIDKKVEGLSKHIKLEEERRSEDAQSKAALTDWLRAKASFVIEGLKEADKDEFCRCELKLQKWYGDLRGKPFAIEAENSILDISGFSKQYNCAFIWQKDGVKKLNLYLIINYFKGGKLRFKKIKPEAFEANRFYTVINKKSGEIVPMEVNFNFDDPNLIILPLAFGKRQGREFIWNDLLSLETGSLKLANGRVIEKTLYNRRTRQDEPALFVALTFERREVLDSSNIKPMNLIGVDRGENIPAVIALTDPEGCPLSRFKDSLGNPTHILRIGESYKEKQRTIQAKKEVEQRRAGGYSRKYASKAKNLADDMVRNTARDLLYYAVTQDAMLIFENLSRGFGRQGKRTFMAERQYTRMEDWLTAKLAYEGLPSKTYLSKTLAQYTSKTCSNCGFTITSADYDRVLEKLKKTATGWMTTINGKELKVEGQITYYNRYKRQNVVKDLSVELDRLSEESVNNDISSWTKGRSGEALSLLKKRFSHRPVQEKFVCLNCGFETHADEQAALNIARSWLFLRSQEYKKYQTNKTTGNTDKRAFVETWQSFYRKKLKEVWKPAV

SEQ ID NO: 41873 - protein, 977 aa, synthetic construct
  REGION 1..977: note = engineered CasX variant
QEIKRISKIRRRLVKDSNTKKAGKTGPMKTLLVRVMTPDLRERLENLRKKPENIPQPISNTSRANLNKLLTDYTEMKKAILHVYWEEFQKDPVGLMSRVAQPASKKIDQNKLKPEMDEKGNLTTAGFACSQCGQPLFVYKLEQVSEKGKAYTNYFGRCNVAEHEKLILLAQLKPEKDSDEAVTYSLGKFGQRALDFYSIHVTKESTHPVKPLAQIAGNRYASPVGKALSDACMGTIASFLSKYQDIIIEHQKVVKGNQKRLESLRELAGKENLEYPSVTLPPQPHTKEGVDAYNEVIARVRMWVNLNLWQKLKLSRDDAKPLLRLKGFPSFPLVERQANEVDWWDMVCNVKKLINEKKEDGKVFWQNLAGYKRQEALRPYLSSEEDRKKGKKFARYQLGDLLLHLEKKHGEDWGKVYGEAWERIDKKVEGLSKHIKLEEERRSEDAQSKAALTDWLRAKASFVIEGLKEADKDEFCRCELKLQKWYGDLRGKPFAIEAENSILDISGFSKQYNCAFIWQKDGVKKLNLYLIINYFKGGKLRFKKIKPEAFEANRFYTVINKKSGEIVPMEVNFNFDDPNLIILPLAFGKRQGREFIWNDLLSLETGSLKLANGRVIEKTLYNRRTRQDEPALFVALTFERREVLDSSNIKPMNLIGVDRGENIPAVIALTDPEGCPLSRFKDSLGNPTHILRIGESYKEKQRTIQAKKEVEQRRAGGYSRKYASKAKNLADDMVRNTARDLLYYAVTQDAMLIFENLSRGFGRQGKRTFMAERQYTRMEDWLTAKLAYEGLPSKTYLSKTLAQYTSKTCSNCGFTITSADYDRVLEKLKKTATGWMTTINGKELKVEGQITYYNRYKRQNVVKDLSVELDRLSEESVNNDISSWTKGRSGEALSLLKKRFSHRPVQEKFVCLNCGFETHADEQAALNIARSWLFLRSQEYKKYQTNKTTGNTDKRAFVETWQSFYRKKLKEVWKPAV

SEQ ID NO: 41874 - protein, 978 aa, synthetic construct
  REGION 1..978: note = engineered CasX variant
QEIKRISKIRRRLVKDSNTKKAGKTGPMKTLLVRVMTPDLRERLENLRKKPENIPQPISNTSRANLNKLLTDYTEMKKAILHVYWEEFQKDPVGLMSRVAQPASKKIDQNKLKPEMDEKGNLTTAGFACSQCGQPLFVYKLEQVSEKGKAYTNYFGRCNVAEHEKLILLAQLKPEKDSDEAVTYSLGKFGQRALDFYSIHVTKESTHPVKPLAQIAGNRYASYPVGKALSDACMGTIASFLSKYQDIIIEHQKVVKGNQKRLESLRELAGKENLEYPSVTLPPQPHTKEGVDAYNEVIARVRMWVNLNLWQKLKLSRDDAKPLLRLKGFPSFPLVERQANEVDWWDMVCNVKKLINEKKEDGKVFWQNLAGYKRQEALRPYLSSEEDRKKGKKFARYQLGDLLLHLEKKHGEDWGKVYDEAWERIDKKVEGLSKHIKLEEERRSEDAQSKAALTDWLRAKASFVIEGKKEADKDEFCRCELKLQKWYGDLRGKPFAIEAENSILDISGFSKQYNCAFIWQKDGVKKLNLYLIINYFKGGKLRFKKIKPEAFEANRFYTVINKKSGEIVPMEVNFNFDDPNLIILPLAFGKRQGREFIWNDLLSLETGSLKLANGRVIEKTLYNRRTRQDEPALFVALTFERREVLDSSNIKPMNLIGVDRGENIPAVIALTDPEGCPLSRFKDSLGNPTHILRIGESYKEKQRTIQAKKEVEQRRAGGYSRKYASKAKNLADDMVRNTARDLLYYAVTQDAMLIFENLSRGFGRQGKRTFMAERQYTRMEDWLTAKLAYEGLPSKTYLSKTLAQYTSKTCSNCGFTITSADYDRVLEKLKKTATGWMTTINGKELKVEGQITYYNRYKRQNVVKDLSVELDRLSEESVNNDISSWTKGRSGEALSLLKKRFSHRPVQEKFVCLNCGFETHADEQAALNIARSWLFLRSQEYKKYQTNKTTGNTDKRAFVETWQSFYRKKLKEVWKPAV

SEQ ID NO: 41875 - protein, 978 aa, synthetic construct
  REGION 1..978: note = engineered CasX variant
QEIKRISKIRRRLVKDSNTKKAGKTGPMKTLLVRVMTPDLRERLENLRKKPENIPQPISNTSRANLNKLLTDYTEMKKAILHVYWEEFQKDPVGLMSRVAQPASKKIDQNKLKPEMDEKGNLTTAGFACSQCGQPLFVYKLEQVSEKGKAYTNYFGRCNVAEHEKLILLAQLKPEKDSDEAVTYSLGKFGQRALDFYSIHVTKESTHPVKPLAQIAGNRYASHPVGKALSDACMGTIASFLSKYQDIIIEHQKVVKGNQKRLESLRELAGKENLEYPSVTLPPQPHTKEGVDAYNEVIARVRMWVNLNLWQKLKLSRDDAKPLLRLKGFPSFPLVERQANEVDWWDMVCNVKKLINEKKEDGKVFWQNLAGYKRQEALRPYLSSEEDRKKGKKFARYQLGDLLLHLEKKHGEDWGKVYDEAWERIDKKVEGLSKHIKLEEERRSEDAQSKAALTDWLRAKASFVIEGKKEADKDEFCRCELKLQKWYGDLRGKPFAIEAENSILDISGFSKQYNCAFIWQKDGVKKLNLYLIINYFKGGKLRFKKIKPEAFEANRFYTVINKKSGEIVPMEVNFNFDDPNLIILPLAFGKRQGREFIWNDLLSLETGSLKLANGRVIEKTLYNRRTRQDEPALFVALTFERREVLDSSNIKPMNLIGVDRGENIPAVIALTDPEGCPLSRFKDSLGNPTHILRIGESYKEKQRTIQAKKEVEQRRAGGYSRKYASKAKNLADDMVRNTARDLLYYAVTQDAMLIFENLSRGFGRQGKRTFMAERQYTRMEDWLTAKLAYEGLPSKTYLSKTLAQYTSKTCSNCGFTITSADYDRVLEKLKKTATGWMTTINGKELKVEGQITYYNRYKRQNVVKDLSVELDRLSEESVNNDISSWTKGRSGEALSLLKKRFSHRPVQEKFVCLNCGFETHADEQAALNIARSWLFLRSQEYKKYQTNKTTGNTDKRAFVETWQSFYRKKLKEVWKPAV

SEQ ID NO: 41876 - protein, 978 aa, synthetic construct
  REGION 1..978: note = engineered CasX variant
QEIKRISKIRRRLVKDSNTKKAGKTGPMKTLLVRVMTPDLRERLENLRKKPENIPQPISNTSRANLNKLLTDYTEMKKAILHVYWEEFQKDPVGLMSRVAQPASKKIDQNKLKPEMDEKGNLTTAGFACSQCGQPLFVYKLEQVSEKGKAYTNYFGRCNVAEHEKLILLAQLKPEKDSDEAVTYSLGKFGQRALDFYSIHVTKESTHPVKPLAQIAGNRYASSPVGKALSDACMGTIASFLSKYQDIIIEHQKVVKGNQKRLESLRELAGKENLEYPSVTLPPQPHTKEGVDAYNEVIARVRMWVNLNLWQKLKLSRDDAKPLLRLKGFPSFPLVERQANEVDWWDMVCNVKKLINEKKEDGKVFWQNLAGYKRQEALRPYLSSEEDRKKGKKFARYQLGDLLLHLEKKHGEDWGKVYDEAWERIDKKVEGLSKHIKLEEERRSEDAQSKAALTDWLRAKASFVIEGKKEADKDEFCRCELKLQKWYGDLRGKPFAIEAENSILDISGFSKQYNCAFIWQKDGVKKLNLYLIINYFKGGKLRFKKIKPEAFEANRFYTVINKKSGEIVPMEVNFNFDDPNLIILPLAFGKRQGREFIWNDLLSLETGSLKLANGRVIEKTLYNRRTRQDEPALFVALTFERREVLDSSNIKPMNLIGVDRGENIPAVIALTDPEGCPLSRFKDSLGNPTHILRIGESYKEKQRTIQAKKEVEQRRAGGYSRKYASKAKNLADDMVRNTARDLLYYAVTQDAMLIFENLSRGFGRQGKRTFMAERQYTRMEDWLTAKLAYEGLPSKTYLSKTLAQYTSKTCSNCGFTITSADYDRVLEKLKKTATGWMTTINGKELKVEGQITYYNRYKRQNVVKDLSVELDRLSEESVNNDISSWTKGRSGEALSLLKKRFSHRPVQEKFVCLNCGFETHADEQAALNIARSWLFLRSQEYKKYQTNKTTGNTDKRAFVETWQSFYRKKLKEVWKPAV

SEQ ID NO: 41877 - protein, 978 aa, synthetic construct
  REGION 1..978: note = engineered CasX variant
QEIKRISKIRRRLVKDSNTKKAGKTGPMKTLLVRVMTPDLRERLENLRKKPENIPQPISNTSRANLNKLLTDYTEMKKAILHVYWEEFQKDPVGLMSRVAQPASKKIDQNKLKPEMDEKGNLTTAGFACSQCGQPLFVYKLEQVSEKGKAYTNYFGRCNVAEHEKLILLAQLKPEKDSDEAVTYSLGKFGQRALDFYSIHVTKESTHPVKPLAQIAGNRYASTPVGKALSDACMGTIASFLSKYQDIIIEHQKVVKGNQKRLESLRELAGKENLEYPSVTLPPQPHTKEGVDAYNEVIARVRMWVNLNLWQKLKLSRDDAKPLLRLKGFPSFPLVERQANEVDWWDMVCNVKKLINEKKEDGKVFWQNLAGYKRQEALRPYLSSEEDRKKGKKFARYQLGDLLLHLEKKHGEDWGKVYDEAWERIDKKVEGLSKHIKLEEERRSEDAQSKAALTDWLRAKASFVIEGKKEADKDEFCRCELKLQKWYGDLRGKPFAIEAENSILDISGFSKQYNCAFIWQKDGVKKLNLYLIINYFKGGKLRFKKIKPEAFEANRFYTVINKKSGEIVPMEVNFNFDDPNLIILPLAFGKRQGREFIWNDLLSLETGSLKLANGRVIEKTLYNRRTRQDEPALFVALTFERREVLDSSNIKPMNLIGVDRGENIPAVIALTDPEGCPLSRFKDSLGNPTHILRIGESYKEKQRTIQAKKEVEQRRAGGYSRKYASKAKNLADDMVRNTARDLLYYAVTQDAMLIFENLSRGFGRQGKRTFMAERQYTRMEDWLTAKLAYEGLPSKTYLSKTLAQYTSKTCSNCGFTITSADYDRVLEKLKKTATGWMTTINGKELKVEGQITYYNRYKRQNVVKDLSVELDRLSEESVNNDISSWTKGRSGEALSLLKKRFSHRPVQEKFVCLNCGFETHADEQAALNIARSWLFLRSQEYKKYQTNKTTGNTDKRAFVETWQSFYRKKLKEVWKPAV

SEQ ID NO: 41878 - protein, 978 aa, synthetic construct
  REGION 1..978: note = engineered CasX variant
QEIKRISKIRRRLVKDSNTKKAGKTGPMKTLLVRVMTPDLRERLENLRKKPENIPQPISNTSRANLNKLLTDYTEMKKAILHVYWEEFQKDPVGLMSRVAQPASKKIDQNKLKPEMDEKGNLTTAGFACSQCGQPLFVYKLEQVSEKGKAYTNYFGRCNVAEHEKLILLAQLKPEKDSDEAVTYSLGKFGQRALDFYSIHVTKESTHPVKPLAQIAGNRYASAPVGKALSDACMGTIASFLSKYQDIIIEHQKVVKGNQKRLESLRELAGKENLEYPSVTLPPQPHTKEGVDAYNEVIARVRMWVNLNLWQKLKLSRDDAKPLLRLKGFPSFPLVERQANEVDWWDMVCNVKKLINEKKEDGKVFWQNLAGYKRQEALRPYLSSEEDRKKGKKFARYQLGDLLLHLEKKHGEDWGKVYDEAWERIDKKVEGLSKHIKLEEERRSEDAQSKAALTDWLRAKASFVIEGKKEADKDEFCRCELKLQKWYGDLRGKPFAIEAENSILDISGFSKQYNCAFIWQKDGVKKLNLYLIINYFKGGKLRFKKIKPEAFEANRFYTVINKKSGEIVPMEVNFNFDDPNLIILPLAFGKRQGREFIWNDLLSLETGSLKLANGRVIEKTLYNRRTRQDEPALFVALTFERREVLDSSNIKPMNLIGVDRGENIPAVIALTDPEGCPLSRFKDSLGNPTHILRIGESYKEKQRTIQAKKEVEQRRAGGYSRKYASKAKNLADDMVRNTARDLLYYAVTQDAMLIFENLSRGFGRQGKRTFMAERQYTRMEDWLTAKLAYEGLPSKTYLSKTLAQYTSKTCSNCGFTITSADYDRVLEKLKKTATGWMTTINGKELKVEGQITYYNRYKRQNVVKDLSVELDRLSEESVNNDISSWTKGRSGEALSLLKKRFSHRPVQEKFVCLNCGFETHADEQAALNIARSWLFLRSQEYKKYQTNKTTGNTDKRAFVETWQSFYRKKLKEVWKPAV

SEQ ID NO: 41879 - protein, 978 aa, synthetic construct
  REGION 1..978: note = engineered CasX variant
QEIKRISKIRRRLVKDSNTKKAGKTGPMKTLLVRVMTPDLRERLENLRKKPENIPQPISNTSRANLNKLLTDYTEMKKAILHVYWEEFQKDPVGLMSRVAQPASKKIDQNKLKPEMDEKGNLTTAGFACSQCGQPLFVYKLEQVSEKGKAYTNYFGRCNVAEHEKLILLAQLKPEKDSDEAVTYSLGKFGQRALDFYSIHVTKESTHPVKPLAQIAGNRYASVPVGKALSDACMGTIASFLSKYQDIIIEHQKVVKGNQKRLESLRELAGKENLEYPSVTLPPQPHTKEGVDAYNEVIARVRMWVNLNLWQKLKLSRDDAKPLLRLKGFPSFPLVERQANEVDWWDMVCNVKKLINEKKEDGKVFWQNLAGYKRQEALRPYLSSEEDRKKGKKFARYQLGDLLLHLEKKHGEDWGKVYDEAWERIDKKVEGLSKHIKLEEERRSEDAQSKAALTDWLRAKASFVIEGKKEADKDEFCRCELKLQKWYGDLRGKPFAIEAENSILDISGFSKQYNCAFIWQKDGVKKLNLYLIINYFKGGKLRFKKIKPEAFEANRFYTVINKKSGEIVPMEVNFNFDDPNLIILPLAFGKRQGREFIWNDLLSLETGSLKLANGRVIEKTLYNRRTRQDEPALFVALTFERREVLDSSNIKPMNLIGVDRGENIPAVIALTDPEGCPLSRFKDSLGNPTHILRIGESYKEKQRTIQAKKEVEQRRAGGYSRKYASKAKNLADDMVRNTARDLLYYAVTQDAMLIFENLSRGFGRQGKRTFMAERQYTRMEDWLTAKLAYEGLPSKTYLSKTLAQYTSKTCSNCGFTITSADYDRVLEKLKKTATGWMTTINGKELKVEGQITYYNRYKRQNVVKDLSVELDRLSEESVNNDISSWTKGRSGEALSLLKKRFSHRPVQEKFVCLNCGFETHADEQAALNIARSWLFLRSQEYKKYQTNKTTGNTDKRAFVETWQSFYRKKLKEVWKPAV

SEQ ID NO: 41880 - protein, 978 aa, synthetic construct
  REGION 1..978: note = engineered CasX variant
QEIKRISKIRRRLVKDSNTKKAGKTGPMKTLLVRVMTPDLRERLENLRKKPENIPQPISNTSRANLNKLLTDYTEMKKAILHVYWEEFQKDPVGLMSRVAQPASKKIDQNKLKPEMDEKGNLTTAGFACSQCGQPLFVYKLEQVSEKGKAYTNYFGRCNVAEHEKLIKLAQLKPEKDSDEAVTYSLGKFGQRALDFYSIHVTKESTHPVKPLAQIAGNRYASGPVGKALSDACMGTIASFLSKYQDIIIEHQKVVKGNQKRLESLRELAGKENLEYPSVTLPPQPHTKEGVDAYNEVIARVRMWVNLNLWQKLKLSRDDAKPLLRLKGFPSFPLVERQANEVDWWDMVCNVKKLINEKKEDGKVFWQNLAGYKRQEALRPYLSSEEDRKKGKKFARYQLGDLLLHLEKKHGEDWGKVYDEAWERIDKKVEGLSKHIKLEEERRSEDAQSKAALTDWLRAKASFVIEGKKEADKDEFCRCELKLQKWYGDLRGKPFAIEAENSILDISGFSKQYNCAFIWQKDGVKKLNLYLIINYFKGGKLRFKKIKPEAFEANRFYTVINKKSGEIVPMEVNFNFDDPNLIILPLAFGKRQGREFIWNDLLSLETGSLKLANGRVIEKTLYNRRTRQDEPALFVALTFERREVLDSSNIKPMNLIGVDRGENIPAVIALTDPEGCPLSRFKDSLGNPTHILRIGESYKEKQRTIQAKKEVEQRRAGGYSRKYASKAKNLADDMVRNTARDLLYYAVTQDAMLIFENLSRGFGRQGKRTFMAERQYTRMEDWLTAKLAYEGLPSKTYLSKTLAQYTSKTCSNCGFTITSADYDRVLEKLKKTATGWMTTINGKELKVEGQITYYNRYKRQNVVKDLSVELDRLSEESVNNDISSWTKGRSGEALSLLKKRFSHRPVQEKFVCLNCGFETHADEQAALNIARSWLFLRSQEYKKYQTNKTTGNTDKRAFVETWQSFYRKKLKEVWKPAV

SEQ ID NO: 41881 - protein, 977 aa, synthetic construct
  REGION 1..977: note = engineered CasX variant
QEIKRISKIRRRLVKDSNTKKAGKTGPMKTLLVRVMTPDLRERLENLRKKPENIPQPISNTSRANLNKLLTDYTEMKKAILHVYWEEFQKDPVGLMSRVAQPASKKIDQNKLKPEMDEKGNLTTAGFACSQCGQPLFVYKLEQVSEKGKAYTNYFGRCNVAEHEKLILLAQLKPEKDSDEAVTYSLGKFGQRALDFYSIHVTKESTHPVKPLAQIAGNRYASPVGKALSDACMGTIASFLSKYQDIIIEHQKVVKGNQKRLESLRELAGKENLEYPSVTLPPQPHTKEGVDAYNEVIARVRMWVNLNLWQKLKLSRDDAKPLLRLKGFPSFPLVERQANEVDWWDMVCNVKKLINEKKEDGKVFWQNLAGYKRQEALRPYLSSEEDRKKGKKFARYQLGDLLLHLEKKHGEDWGKVYDEAWERIDKKVEGLSKHIKLEEERRSEDAQSKAALTDWLRAKASFVIEGKKEADKDEFCRCELKLQKWYGDLRGKPFAIEAENSILDISGFSKQYNCAFIWQKDGVKKLNLYLIINYFKGGKLRFKKIKPEAFEANRFYTVINKKSGEIVPMEVNFNFDDPNLIILPLAFGKRQGREFIWNDLLSLETGSLKLANGRVIEKTLYNRRTRQDEPALFVALTFERREVLDSSNIKPMNLIGVDRGENIPAVIALTDPEGCPLSRFKDSLGNPTHILRIGESYKEKQRTIQAKKEVEQRRAGGYSRKYASKAKNLADDMVRNTARDLLYYAVTQDAMLIFENLSRGFGRQGKRTFMAERQYTRMEDWLTAKLAYEGLPSKTYLSKTLAQYTSKTCSNCGFTITSADYDRVLEKLKKTATGWMTTINGKELKVEGQITYYNRYKRQNVVKDLSVELDRLSEESVNNDISSWTKGRSGEALSLLKKRFSHRPVQEKFVCLNCGFETHADEQAALNIARSWLFLRSQEYKKYQTNKTTGNTDKRAFVETWQSFYRKKLKEVWKPAV

SEQ ID NO: 41882 - protein, 978 aa, synthetic construct
  REGION 1..978: note = engineered CasX variant
QEIKRISKIRRRLVKDSNTKKAGKTGPMKTLLVRVMTPDLRERLENLRKKPENIPQPISNTSRANLNKLLTDYTEMKKAILHVYWEEFQKDPVGLMSRVAQPASKKIDQNKLKPEMDEKGNLTTAGFACSQCGQPLFVYKLEQVSEKGKAYTNYFGRCNVAEHEKLILLAQLKPEKDSDEAVTYSLGKFGQRALDFYSIHVTKESTHPVKPLAQIAGNRYASYPVGKALSDACMGTIASFLSKYQDIIIEHQKVVKGNQKRLESLRELAGKENLEYPSVTLPPQPHTKEGVDAYNEVIARVRMWVNLNLWQKLKLSRDDAKPLLRLKGFPSFPLVERQANEVDWWDMVCNVKKLINEKKEDGKVFWQNLAGYKRQEALRPYLSSEEDRKKGKKFARYQLGDLLLHLEKKHGEDWGKVYDEAWERIDKKVEGLSKHIKLEEERRSEDAQSKAALTDWLRAKASFVIEGSKEADKDEFCRCELKLQKWYGDLRGKPFAIEAENSILDISGFSKQYNCAFIWQKDGVKKLNLYLIINYFKGGKLRFKKIKPEAFEANRFYTVINKKSGEIVPMEVNFNFDDPNLIILPLAFGKRQGREFIWNDLLSLETGSLKLANGRVIEKTLYNRRTRQDEPALFVALTFERREVLDSSNIKPMNLIGVDRGENIPAVIALTDPEGCPLSRFKDSLGNPTHILRIGESYKEKQRTIQAKKEVEQRRAGGYSRKYASKAKNLADDMVRNTARDLLYYAVTQDAMLIFENLSRGFGRQGKRTFMAERQYTRMEDWLTAKLAYEGLPSKTYLSKTLAQYTSKTCSNCGFTITSADYDRVLEKLKKTATGWMTTINGKELKVEGQITYYNRYKRQNVVKDLSVELDRLSEESVNNDISSWTKGRSGEALSLLKKRFSHRPVQEKFVCLNCGFETHADEQAALNIARSWLFLRSQEYKKYQTNKTTGNTDKRAFVETWQSFYRKKLKEVWKPAV

SEQ ID NO: 41883 - protein, 978 aa, synthetic construct
  REGION 1..978: note = engineered CasX variant
QEIKRISKIRRRLVKDSNTKKAGKTGPMKTLLVRVMTPDLRERLENLRKKPENIPQPISNTSRANLNKLLTDYTEMKKAILHVYWEEFQKDPVGLMSRVAQPASKKIDQNKLKPEMDEKGNLTTAGFACSQCGQPLFVYKLEQVSEKGKAYTNYFGRCNVAEHEKLILLAQLKPEKDSDEAVTYSLGKFGQRALDFYSIHVTKESTHPVKPLAQIAGNRYASHPVGKALSDACMGTIASFLSKYQDIIIEHQKVVKGNQKRLESLRELAGKENLEYPSVTLPPQPHTKEGVDAYNEVIARVRMWVNLNLWQKLKLSRDDAKPLLRLKGFPSFPLVERQANEVDWWDMVCNVKKLINEKKEDGKVFWQNLAGYKRQEALRPYLSSEEDRKKGKKFARYQLGDLLLHLEKKHGEDWGKVYDEAWERIDKKVEGLSKHIKLEEERRSEDAQSKAALTDWLRAKASFVIEGSKEADKDEFCRCELKLQKWYGDLRGKPFAIEAENSILDISGFSKQYNCAFIWQKDGVKKLNLYLIINYFKGGKLRFKKIKPEAFEANRFYTVINKKSGEIVPMEVNFNFDDPNLIILPLAFGKRQGREFIWNDLLSLETGSLKLANGRVIEKTLYNRRTRQDEPALFVALTFERREVLDSSNIKPMNLIGVDRGENIPAVIALTDPEGCPLSRFKDSLGNPTHILRIGESYKEKQRTIQAKKEVEQRRAGGYSRKYASKAKNLADDMVRNTARDLLYYAVTQDAMLIFENLSRGFGRQGKRTFMAERQYTRMEDWLTAKLAYEGLPSKTYLSKTLAQYTSKTCSNCGFTITSADYDRVLEKLKKTATGWMTTINGKELKVEGQITYYNRYKRQNVVKDLSVELDRLSEESVNNDISSWTKGRSGEALSLLKKRFSHRPVQEKFVCLNCGFETHADEQAALNIARSWLFLRSQEYKKYQTNKTTGNTDKRAFVETWQSFYRKKLKEVWKPAV

SEQ ID NO: 41884 - protein, 978 aa, synthetic construct
  REGION 1..978: note = engineered CasX variant
QEIKRISKIRRRLVKDSNTKKAGKTGPMKTLLVRVMTPDLRERLENLRKKPENIPQPISNTSRANLNKLLTDYTEMKKAILHVYWEEFQKDPVGLMSRVAQPASKKIDQNKLKPEMDEKGNLTTAGFACSQCGQPLFVYKLEQVSEKGKAYTNYFGRCNVAEHEKLILLAQLKPEKDSDEAVTYSLGKFGQRALDFYSIHVTKESTHPVKPLAQIAGNRYASSPVGKALSDACMGTIASFLSKYQDIIIEHQKVVKGNQKRLESLRELAGKENLEYPSVTLPPQPHTKEGVDAYNEVIARVRMWVNLNLWQKLKLSRDDAKPLLRLKGFPSFPLVERQANEVDWWDMVCNVKKLINEKKEDGKVFWQNLAGYKRQEALRPYLSSEEDRKKGKKFARYQLGDLLLHLEKKHGEDWGKVYDEAWERIDKKVEGLSKHIKLEEERRSEDAQSKAALTDWLRAKASFVIEGSKEADKDEFCRCELKLQKWYGDLRGKPFAIEAENSILDISGFSKQYNCAFIWQKDGVKKLNLYLIINYFKGGKLRFKKIKPEAFEANRFYTVINKKSGEIVPMEVNFNFDDPNLIILPLAFGKRQGREFIWNDLLSLETGSLKLANGRVIEKTLYNRRTRQDEPALFVALTFERREVLDSSNIKPMNLIGVDRGENIPAVIALTDPEGCPLSRFKDSLGNPTHILRIGESYKEKQRTIQAKKEVEQRRAGGYSRKYASKAKNLADDMVRNTARDLLYYAVTQDAMLIFENLSRGFGRQGKRTFMAERQYTRMEDWLTAKLAYEGLPSKTYLSKTLAQYTSKTCSNCGFTITSADYDRVLEKLKKTATGWMTTINGKELKVEGQITYYNRYKRQNVVKDLSVELDRLSEESVNNDISSWTKGRSGEALSLLKKRFSHRPVQEKFVCLNCGFETHADEQAALNIARSWLFLRSQEYKKYQTNKTTGNTDKRAFVETWQSFYRKKLKEVWKPAV

SEQ ID NO: 41885 - protein, 978 aa, synthetic construct
  REGION 1..978: note = engineered CasX variant
QEIKRISKIRRRLVKDSNTKKAGKTGPMKTLLVRVMTPDLRERLENLRKKPENIPQPISNTSRANLNKLLTDYTEMKKAILHVYWEEFQKDPVGLMSRVAQPASKKIDQNKLKPEMDEKGNLTTAGFACSQCGQPLFVYKLEQVSEKGKAYTNYFGRCNVAEHEKLILLAQLKPEKDSDEAVTYSLGKFGQRALDFYSIHVTKESTHPVKPLAQIAGNRYASTPVGKALSDACMGTIASFLSKYQDIIIEHQKVVKGNQKRLESLRELAGKENLEYPSVTLPPQPHTKEGVDAYNEVIARVRMWVNLNLWQKLKLSRDDAKPLLRLKGFPSFPLVERQANEVDWWDMVCNVKKLINEKKEDGKVFWQNLAGYKRQEALRPYLSSEEDRKKGKKFARYQLGDLLLHLEKKHGEDWGKVYDEAWERIDKKVEGLSKHIKLEEERRSEDAQSKAALTDWLRAKASFVIEGSKEADKDEFCRCELKLQKWYGDLRGKPFAIEAENSILDISGFSKQYNCAFIWQKDGVKKLNLYLIINYFKGGKLRFKKIKPEAFEANRFYTVINKKSGEIVPMEVNFNFDDPNLIILPLAFGKRQGREFIWNDLLSLETGSLKLANGRVIEKTLYNRRTRQDEPALFVALTFERREVLDSSNIKPMNLIGVDRGENIPAVIALTDPEGCPLSRFKDSLGNPTHILRIGESYKEKQRTIQAKKEVEQRRAGGYSRKYASKAKNLADDMVRNTARDLLYYAVTQDAMLIFENLSRGFGRQGKRTFMAERQYTRMEDWLTAKLAYEGLPSKTYLSKTLAQYTSKTCSNCGFTITSADYDRVLEKLKKTATGWMTTINGKELKVEGQITYYNRYKRQNVVKDLSVELDRLSEESVNNDISSWTKGRSGEALSLLKKRFSHRPVQEKFVCLNCGFETHADEQAALNIARSWLFLRSQEYKKYQTNKTTGNTDKRAFVETWQSFYRKKLKEVWKPAV

SEQ ID NO: 41886 - protein, 978 aa, synthetic construct
  REGION 1..978: note = engineered CasX variant
QEIKRISKIRRRLVKDSNTKKAGKTGPMKTLLVRVMTPDLRERLENLRKKPENIPQPISNTSRANLNKLLTDYTEMKKAILHVYWEEFQKDPVGLMSRVAQPASKKIDQNKLKPEMDEKGNLTTAGFACSQCGQPLFVYKLEQVSEKGKAYTNYFGRCNVAEHEKLILLAQLKPEKDSDEAVTYSLGKFGQRALDFYSIHVTKESTHPVKPLAQIAGNRYASAPVGKALSDACMGTIASFLSKYQDIIIEHQKVVKGNQKRLESLRELAGKENLEYPSVTLPPQPHTKEGVDAYNEVIARVRMWVNLNLWQKLKLSRDDAKPLLRLKGFPSFPLVERQANEVDWWDMVCNVKKLINEKKEDGKVFWQNLAGYKRQEALRPYLSSEEDRKKGKKFARYQLGDLLLHLEKKHGEDWGKVYDEAWERIDKKVEGLSKHIKLEEERRSEDAQSKAALTDWLRAKASFVIEGSKEADKDEFCRCELKLQKWYGDLRGKPFAIEAENSILDISGFSKQYNCAFIWQKDGVKKLNLYLIINYFKGGKLRFKKIKPEAFEANRFYTVINKKSGEIVPMEVNFNFDDPNLIILPLAFGKRQGREFIWNDLLSLETGSLKLANGRVIEKTLYNRRTRQDEPALFVALTFERREVLDSSNIKPMNLIGVDRGENIPAVIALTDPEGCPLSRFKDSLGNPTHILRIGESYKEKQRTIQAKKEVEQRRAGGYSRKYASKAKNLADDMVRNTARDLLYYAVTQDAMLIFENLSRGFGRQGKRTFMAERQYTRMEDWLTAKLAYEGLPSKTYLSKTLAQYTSKTCSNCGFTITSADYDRVLEKLKKTATGWMTTINGKELKVEGQITYYNRYKRQNVVKDLSVELDRLSEESVNNDISSWTKGRSGEALSLLKKRFSHRPVQEKFVCLNCGFETHADEQAALNIARSWLFLRSQEYKKYQTNKTTGNTDKRAFVETWQSFYRKKLKEVWKPAV

SEQ ID NO: 41887 - protein, 978 aa, synthetic construct
  REGION 1..978: note = engineered CasX variant
QEIKRISKIRRRLVKDSNTKKAGKTGPMKTLLVRVMTPDLRERLENLRKKPENIPQPISNTSRANLNKLLTDYTEMKKAILHVYWEEFQKDPVGLMSRVAQPASKKIDQNKLKPEMDEKGNLTTAGFACSQCGQPLFVYKLEQVSEKGKAYTNYFGRCNVAEHEKLILLAQLKPEKDSDEAVTYSLGKFGQRALDFYSIHVTKESTHPVKPLAQIAGNRYASVPVGKALSDACMGTIASFLSKYQDIIIEHQKVVKGNQKRLESLRELAGKENLEYPSVTLPPQPHTKEGVDAYNEVIARVRMWVNLNLWQKLKLSRDDAKPLLRLKGFPSFPLVERQANEVDWWDMVCNVKKLINEKKEDGKVFWQNLAGYKRQEALRPYLSSEEDRKKGKKFARYQLGDLLLHLEKKHGEDWGKVYDEAWERIDKKVEGLSKHIKLEEERRSEDAQSKAALTDWLRAKASFVIEGSKEADKDEFCRCELKLQKWYGDLRGKPFAIEAENSILDISGFSKQYNCAFIWQKDGVKKLNLYLIINYFKGGKLRFKKIKPEAFEANRFYTVINKKSGEIVPMEVNFNFDDPNLIILPLAFGKRQGREFIWNDLLSLETGSLKLANGRVIEKTLYNRRTRQDEPALFVALTFERREVLDSSNIKPMNLIGVDRGENIPAVIALTDPEGCPLSRFKDSLGNPTHILRIGESYKEKQRTIQAKKEVEQRRAGGYSRKYASKAKNLADDMVRNTARDLLYYAVTQDAMLIFENLSRGFGRQGKRTFMAERQYTRMEDWLTAKLAYEGLPSKTYLSKTLAQYTSKTCSNCGFTITSADYDRVLEKLKKTATGWMTTINGKELKVEGQITYYNRYKRQNVVKDLSVELDRLSEESVNNDISSWTKGRSGEALSLLKKRFSHRPVQEKFVCLNCGFETHADEQAALNIARSWLFLRSQEYKKYQTNKTTGNTDKRAFVETWQSFYRKKLKEVWKPAV

SEQ ID NO: 41888 - protein, 978 aa, synthetic construct
  REGION 1..978: note = engineered CasX variant
QEIKRISKIRRRLVKDSNTKKAGKTGPMKTLLVRVMTPDLRERLENLRKKPENIPQPISNTSRANLNKLLTDYTEMKKAILHVYWEEFQKDPVGLMSRVAQPASKKIDQNKLKPEMDEKGNLTTAGFACSQCGQPLFVYKLEQVSEKGKAYTNYFGRCNVAEHEKLIKLAQLKPEKDSDEAVTYSLGKFGQRALDFYSIHVTKESTHPVKPLAQIAGNRYASGPVGKALSDACMGTIASFLSKYQDIIIEHQKVVKGNQKRLESLRELAGKENLEYPSVTLPPQPHTKEGVDAYNEVIARVRMWVNLNLWQKLKLSRDDAKPLLRLKGFPSFPLVERQANEVDWWDMVCNVKKLINEKKEDGKVFWQNLAGYKRQEALRPYLSSEEDRKKGKKFARYQLGDLLLHLEKKHGEDWGKVYDEAWERIDKKVEGLSKHIKLEEERRSEDAQSKAALTDWLRAKASFVIEGSKEADKDEFCRCELKLQKWYGDLRGKPFAIEAENSILDISGFSKQYNCAFIWQKDGVKKLNLYLIINYFKGGKLRFKKIKPEAFEANRFYTVINKKSGEIVPMEVNFNFDDPNLIILPLAFGKRQGREFIWNDLLSLETGSLKLANGRVIEKTLYNRRTRQDEPALFVALTFERREVLDSSNIKPMNLIGVDRGENIPAVIALTDPEGCPLSRFKDSLGNPTHILRIGESYKEKQRTIQAKKEVEQRRAGGYSRKYASKAKNLADDMVRNTARDLLYYAVTQDAMLIFENLSRGFGRQGKRTFMAERQYTRMEDWLTAKLAYEGLPSKTYLSKTLAQYTSKTCSNCGFTITSADYDRVLEKLKKTATGWMTTINGKELKVEGQITYYNRYKRQNVVKDLSVELDRLSEESVNNDISSWTKGRSGEALSLLKKRFSHRPVQEKFVCLNCGFETHADEQAALNIARSWLFLRSQEYKKYQTNKTTGNTDKRAFVETWQSFYRKKLKEVWKPAV

SEQ ID NO: 41889 - protein, 977 aa, synthetic construct
  REGION 1..977: note = engineered CasX variant
QEIKRISKIRRRLVKDSNTKKAGKTGPMKTLLVRVMTPDLRERLENLRKKPENIPQPISNTSRANLNKLLTDYTEMKKAILHVYWEEFQKDPVGLMSRVAQPASKKIDQNKLKPEMDEKGNLTTAGFACSQCGQPLFVYKLEQVSEKGKAYTNYFGRCNVAEHEKLILLAQLKPEKDSDEAVTYSLGKFGQRALDFYSIHVTKESTHPVKPLAQIAGNRYASPVGKALSDACMGTIASFLSKYQDIIIEHQKVVKGNQKRLESLRELAGKENLEYPSVTLPPQPHTKEGVDAYNEVIARVRMWVNLNLWQKLKLSRDDAKPLLRLKGFPSFPLVERQANEVDWWDMVCNVKKLINEKKEDGKVFWQNLAGYKRQEALRPYLSSEEDRKKGKKFARYQLGDLLLHLEKKHGEDWGKVYDEAWERIDKKVEGLSKHIKLEEERRSEDAQSKAALTDWLRAKASFVIEGSKEADKDEFCRCELKLQKWYGDLRGKPFAIEAENSILDISGFSKQYNCAFIWQKDGVKKLNLYLIINYFKGGKLRFKKIKPEAFEANRFYTVINKKSGEIVPMEVNFNFDDPNLIILPLAFGKRQGREFIWNDLLSLETGSLKLANGRVIEKTLYNRRTRQDEPALFVALTFERREVLDSSNIKPMNLIGVDRGENIPAVIALTDPEGCPLSRFKDSLGNPTHILRIGESYKEKQRTIQAKKEVEQRRAGGYSRKYASKAKNLADDMVRNTARDLLYYAVTQDAMLIFENLSRGFGRQGKRTFMAERQYTRMEDWLTAKLAYEGLPSKTYLSKTLAQYTSKTCSNCGFTITSADYDRVLEKLKKTATGWMTTINGKELKVEGQITYYNRYKRQNVVKDLSVELDRLSEESVNNDISSWTKGRSGEALSLLKKRFSHRPVQEKFVCLNCGFETHADEQAALNIARSWLFLRSQEYKKYQTNKTTGNTDKRAFVETWQSFYRKKLKEVWKPAV

SEQ ID NO: 41890 - protein, 979 aa, synthetic construct
  REGION 1..979: note = engineered CasX variant
QEIKRISKIRRRLVKDSNTKKAGKTGPMKTLLVRVMTPDLRERLENLRKKPENIPQPISNTSRANLNKLLTDYTEMKKAILHVYWEEFQKDPVGLMSRVAQPASKKIDQNKLKPEMDEKGNLTTAGFACSQCGQPLFVYKLEQVSEKGKAYTNYFGRCNVAEHEKLILLAQLKPEKDSDEAVTYSLGKFGQRALDFYSIHVTKESTHPVKPLAQIAGNRYASYPVGKALSDACMGTIASFLSKYQDIIIEHQKVVKGNQKRLESLRELAGKENLEYPSVTLPPQPHTKEGVDAYNEVIARVRMWVNLNLWQKLKLSRDDAKPLLRLKGFPSFPLVERQANEVDWWDMVCNVKKLINEKKEDGKVFWQNLAGYKRQEALRPYLSSEEDRKKGKKFARYQLGDLLLHLEKKHGEDWGKVYDEAWERIDKKVEGLSKHIKLEEERRSEDAQSKAALTDWLRAKASFVIEGLKEADDKDEFCRCELKLQKWYGDLRGKPFAIEAENSILDISGFSKQYNCAFIWQKDGVKKLNLYLIINYFKGGKLRFKKIKPEAFEANRFYTVINKKSGEIVPMEVNFNFDDPNLIILPLAFGKRQGREFIWNDLLSLETGSLKLANGRVIEKTLYNRRTRQDEPALFVALTFERREVLDSSNIKPMNLIGVDRGENIPAVIALTDPEGCPLSRFKDSLGNPTHILRIGESYKEKQRTIQAKKEVEQRRAGGYSRKYASKAKNLADDMVRNTARDLLYYAVTQDAMLIFENLSRGFGRQGKRTFMAERQYTRMEDWLTAKLAYEGLPSKTYLSKTLAQYTSKTCSNCGFTITSADYDRVLEKLKKTATGWMTTINGKELKVEGQITYYNRYKRQNVVKDLSVELDRLSEESVNNDISSWTKGRSGEALSLLKKRFSHRPVQEKFVCLNCGFETHADEQAALNIARSWLFLRSQEYKKYQTNKTTGNTDKRAFVETWQSFYRKKLKEVWKPAV

SEQ ID NO: 41891 - protein, 979 aa, synthetic construct
  REGION 1..979: note = engineered CasX variant
QEIKRISKIRRRLVKDSNTKKAGKTGPMKTLLVRVMTPDLRERLENLRKKPENIPQPISNTSRANLNKLLTDYTEMKKAILHVYWEEFQKDPVGLMSRVAQPASKKIDQNKLKPEMDEKGNLTTAGFACSQCGQPLFVYKLEQVSEKGKAYTNYFGRCNVAEHEKLILLAQLKPEKDSDEAVTYSLGKFGQRALDFYSIHVTKESTHPVKPLAQIAGNRYASHPVGKALSDACMGTIASFLSKYQDIIIEHQKVVKGNQKRLESLRELAGKENLEYPSVTLPPQPHTKEGVDAYNEVIARVRMWVNLNLWQKLKLSRDDAKPLLRLKGFPSFPLVERQANEVDWWDMVCNVKKLINEKKEDGKVFWQNLAGYKRQEALRPYLSSEEDRKKGKKFARYQLGDLLLHLEKKHGEDWGKVYDEAWERIDKKVEGLSKHIKLEEERRSEDAQSKAALTDWLRAKASFVIEGLKEADDKDEFCRCELKLQKWYGDLRGKPFAIEAENSILDISGFSKQYNCAFIWQKDGVKKLNLYLIINYFKGGKLRFKKIKPEAFEANRFYTVINKKSGEIVPMEVNFNFDDPNLIILPLAFGKRQGREFIWNDLLSLETGSLKLANGRVIEKTLYNRRTRQDEPALFVALTFERREVLDSSNIKPMNLIGVDRGENIPAVIALTDPEGCPLSRFKDSLGNPTHILRIGESYKEKQRTIQAKKEVEQRRAGGYSRKYASKAKNLADDMVRNTARDLLYYAVTQDAMLIFENLSRGFGRQGKRTFMAERQYTRMEDWLTAKLAYEGLPSKTYLSKTLAQYTSKTCSNCGFTITSADYDRVLEKLKKTATGWMTTINGKELKVEGQITYYNRYKRQNVVKDLSVELDRLSEESVNNDISSWTKGRSGEALSLLKKRFSHRPVQEKFVCLNCGFETHADEQAALNIARSWLFLRSQEYKKYQTNKTTGNTDKRAFVETWQSFYRKKLKEVWKPAV

SEQ ID NO: 41892 - protein, 979 aa, synthetic construct
  REGION 1..979: note = engineered CasX variant
QEIKRISKIRRRLVKDSNTKKAGKTGPMKTLLVRVMTPDLRERLENLRKKPENIPQPISNTSRANLNKLLTDYTEMKKAILHVYWEEFQKDPVGLMSRVAQPASKKIDQNKLKPEMDEKGNLTTAGFACSQCGQPLFVYKLEQVSEKGKAYTNYFGRCNVAEHEKLILLAQLKPEKDSDEAVTYSLGKFGQRALDFYSIHVTKESTHPVKPLAQIAGNRYASSPVGKALSDACMGTIASFLSKYQDIIIEHQKVVKGNQKRLESLRELAGKENLEYPSVTLPPQPHTKEGVDAYNEVIARVRMWVNLNLWQKLKLSRDDAKPLLRLKGFPSFPLVERQANEVDWWDMVCNVKKLINEKKEDGKVFWQNLAGYKRQEALRPYLSSEEDRKKGKKFARYQLGDLLLHLEKKHGEDWGKVYDEAWERIDKKVEGLSKHIKLEEERRSEDAQSKAALTDWLRAKASFVIEGLKEADDKDEFCRCELKLQKWYGDLRGKPFAIEAENSILDISGFSKQYNCAFIWQKDGVKKLNLYLIINYFKGGKLRFKKIKPEAFEANRFYTVINKKSGEIVPMEVNFNFDDPNLIILPLAFGKRQGREFIWNDLLSLETGSLKLANGRVIEKTLYNRRTRQDEPALFVALTFERREVLDSSNIKPMNLIGVDRGENIPAVIALTDPEGCPLSRFKDSLGNPTHILRIGESYKEKQRTIQAKKEVEQRRAGGYSRKYASKAKNLADDMVRNTARDLLYYAVTQDAMLIFENLSRGFGRQGKRTFMAERQYTRMEDWLTAKLAYEGLPSKTYLSKTLAQYTSKTCSNCGFTITSADYDRVLEKLKKTATGWMTTINGKELKVEGQITYYNRYKRQNVVKDLSVELDRLSEESVNNDISSWTKGRSGEALSLLKKRFSHRPVQEKFVCLNCGFETHADEQAALNIARSWLFLRSQEYKKYQTNKTTGNTDKRAFVETWQSFYRKKLKEVWKPAV

SEQ ID NO: 41893 - protein, 979 aa, synthetic construct
  REGION 1..979: note = engineered CasX variant
QEIKRISKIRRRLVKDSNTKKAGKTGPMKTLLVRVMTPDLRERLENLRKKPENIPQPISNTSRANLNKLLTDYTEMKKAILHVYWEEFQKDPVGLMSRVAQPASKKIDQNKLKPEMDEKGNLTTAGFACSQCGQPLFVYKLEQVSEKGKAYTNYFGRCNVAEHEKLILLAQLKPEKDSDEAVTYSLGKFGQRALDFYSIHVTKESTHPVKPLAQIAGNRYASTPVGKALSDACMGTIASFLSKYQDIIIEHQKVVKGNQKRLESLRELAGKENLEYPSVTLPPQPHTKEGVDAYNEVIARVRMWVNLNLWQKLKLSRDDAKPLLRLKGFPSFPLVERQANEVDWWDMVCNVKKLINEKKEDGKVFWQNLAGYKRQEALRPYLSSEEDRKKGKKFARYQLGDLLLHLEKKHGEDWGKVYDEAWERIDKKVEGLSKHIKLEEERRSEDAQSKAALTDWLRAKASFVIEGLKEADDKDEFCRCELKLQKWYGDLRGKPFAIEAENSILDISGFSKQYNCAFIWQKDGVKKLNLYLIINYFKGGKLRFKKIKPEAFEANRFYTVINKKSGEIVPMEVNFNFDDPNLIILPLAFGKRQGREFIWNDLLSLETGSLKLANGRVIEKTLYNRRTRQDEPALFVALTFERREVLDSSNIKPMNLIGVDRGENIPAVIALTDPEGCPLSRFKDSLGNPTHILRIGESYKEKQRTIQAKKEVEQRRAGGYSRKYASKAKNLADDMVRNTARDLLYYAVTQDAMLIFENLSRGFGRQGKRTFMAERQYTRMEDWLTAKLAYEGLPSKTYLSKTLAQYTSKTCSNCGFTITSADYDRVLEKLKKTATGWMTTINGKELKVEGQITYYNRYKRQNVVKDLSVELDRLSEESVNNDISSWTKGRSGEALSLLKKRFSHRPVQEKFVCLNCGFETHADEQAALNIARSWLFLRSQEYKKYQTNKTTGNTDKRAFVETWQSFYRKKLKEVWKPAV

SEQ ID NO: 41894 - protein, 979 aa, synthetic construct
  REGION 1..979: note = engineered CasX variant
QEIKRISKIRRRLVKDSNTKKAGKTGPMKTLLVRVMTPDLRERLENLRKKPENIPQPISNTSRANLNKLLTDYTEMKKAILHVYWEEFQKDPVGLMSRVAQPASKKIDQNKLKPEMDEKGNLTTAGFACSQCGQPLFVYKLEQVSEKGKAYTNYFGRCNVAEHEKLILLAQLKPEKDSDEAVTYSLGKFGQRALDFYSIHVTKESTHPVKPLAQIAGNRYASAPVGKALSDACMGTIASFLSKYQDIIIEHQKVVKGNQKRLESLRELAGKENLEYPSVTLPPQPHTKEGVDAYNEVIARVRMWVNLNLWQKLKLSRDDAKPLLRLKGFPSFPLVERQANEVDWWDMVCNVKKLINEKKEDGKVFWQNLAGYKRQEALRPYLSSEEDRKKGKKFARYQLGDLLLHLEKKHGEDWGKVYDEAWERIDKKVEGLSKHIKLEEERRSEDAQSKAALTDWLRAKASFVIEGLKEADDKDEFCRCELKLQKWYGDLRGKPFAIEAENSILDISGFSKQYNCAFIWQKDGVKKLNLYLIINYFKGGKLRFKKIKPEAFEANRFYTVINKKSGEIVPMEVNFNFDDPNLIILPLAFGKRQGREFIWNDLLSLETGSLKLANGRVIEKTLYNRRTRQDEPALFVALTFERREVLDSSNIKPMNLIGVDRGENIPAVIALTDPEGCPLSRFKDSLGNPTHILRIGESYKEKQRTIQAKKEVEQRRAGGYSRKYASKAKNLADDMVRNTARDLLYYAVTQDAMLIFENLSRGFGRQGKRTFMAERQYTRMEDWLTAKLAYEGLPSKTYLSKTLAQYTSKTCSNCGFTITSADYDRVLEKLKKTATGWMTTINGKELKVEGQITYYNRYKRQNVVKDLSVELDRLSEESVNNDISSWTKGRSGEALSLLKKRFSHRPVQEKFVCLNCGFETHADEQAALNIARSWLFLRSQEYKKYQTNKTTGNTDKRAFVETWQSFYRKKLKEVWKPAV

SEQ ID NO: 41895 - protein, 979 aa, synthetic construct
  REGION 1..979: note = engineered CasX variant
QEIKRISKIRRRLVKDSNTKKAGKTGPMKTLLVRVMTPDLRERLENLRKKPENIPQPISNTSRANLNKLLTDYTEMKKAILHVYWEEFQKDPVGLMSRVAQPASKKIDQNKLKPEMDEKGNLTTAGFACSQCGQPLFVYKLEQVSEKGKAYTNYFGRCNVAEHEKLILLAQLKPEKDSDEAVTYSLGKFGQRALDFYSIHVTKESTHPVKPLAQIAGNRYASVPVGKALSDACMGTIASFLSKYQDIIIEHQKVVKGNQKRLESLRELAGKENLEYPSVTLPPQPHTKEGVDAYNEVIARVRMWVNLNLWQKLKLSRDDAKPLLRLKGFPSFPLVERQANEVDWWDMVCNVKKLINEKKEDGKVFWQNLAGYKRQEALRPYLSSEEDRKKGKKFARYQLGDLLLHLEKKHGEDWGKVYDEAWERIDKKVEGLSKHIKLEEERRSEDAQSKAALTDWLRAKASFVIEGLKEADDKDEFCRCELKLQKWYGDLRGKPFAIEAENSILDISGFSKQYNCAFIWQKDGVKKLNLYLIINYFKGGKLRFKKIKPEAFEANRFYTVINKKSGEIVPMEVNFNFDDPNLIILPLAFGKRQGREFIWNDLLSLETGSLKLANGRVIEKTLYNRRTRQDEPALFVALTFERREVLDSSNIKPMNLIGVDRGENIPAVIALTDPEGCPLSRFKDSLGNPTHILRIGESYKEKQRTIQAKKEVEQRRAGGYSRKYASKAKNLADDMVRNTARDLLYYAVTQDAMLIFENLSRGFGRQGKRTFMAERQYTRMEDWLTAKLAYEGLPSKTYLSKTLAQYTSKTCSNCGFTITSADYDRVLEKLKKTATGWMTTINGKELKVEGQITYYNRYKRQNVVKDLSVELDRLSEESVNNDISSWTKGRSGEALSLLKKRFSHRPVQEKFVCLNCGFETHADEQAALNIARSWLFLRSQEYKKYQTNKTTGNTDKRAFVETWQSFYRKKLKEVWKPAV

SEQ ID NO: 41896 - protein, 979 aa, synthetic construct
  REGION 1..979: note = engineered CasX variant
QEIKRISKIRRRLVKDSNTKKAGKTGPMKTLLVRVMTPDLRERLENLRKKPENIPQPISNTSRANLNKLLTDYTEMKKAILHVYWEEFQKDPVGLMSRVAQPASKKIDQNKLKPEMDEKGNLTTAGFACSQCGQPLFVYKLEQVSEKGKAYTNYFGRCNVAEHEKLIKLAQLKPEKDSDEAVTYSLGKFGQRALDFYSIHVTKESTHPVKPLAQIAGNRYASGPVGKALSDACMGTIASFLSKYQDIIIEHQKVVKGNQKRLESLRELAGKENLEYPSVTLPPQPHTKEGVDAYNEVIARVRMWVNLNLWQKLKLSRDDAKPLLRLKGFPSFPLVERQANEVDWWDMVCNVKKLINEKKEDGKVFWQNLAGYKRQEALRPYLSSEEDRKKGKKFARYQLGDLLLHLEKKHGEDWGKVYDEAWERIDKKVEGLSKHIKLEEERRSEDAQSKAALTDWLRAKASFVIEGLKEADDKDEFCRCELKLQKWYGDLRGKPFAIEAENSILDISGFSKQYNCAFIWQKDGVKKLNLYLIINYFKGGKLRFKKIKPEAFEANRFYTVINKKSGEIVPMEVNFNFDDPNLIILPLAFGKRQGREFIWNDLLSLETGSLKLANGRVIEKTLYNRRTRQDEPALFVALTFERREVLDSSNIKPMNLIGVDRGENIPAVIALTDPEGCPLSRFKDSLGNPTHILRIGESYKEKQRTIQAKKEVEQRRAGGYSRKYASKAKNLADDMVRNTARDLLYYAVTQDAMLIFENLSRGFGRQGKRTFMAERQYTRMEDWLTAKLAYEGLPSKTYLSKTLAQYTSKTCSNCGFTITSADYDRVLEKLKKTATGWMTTINGKELKVEGQITYYNRYKRQNVVKDLSVELDRLSEESVNNDISSWTKGRSGEALSLLKKRFSHRPVQEKFVCLNCGFETHADEQAALNIARSWLFLRSQEYKKYQTNKTTGNTDKRAFVETWQSFYRKKLKEVWKPAV

SEQ ID NO: 41897 - protein, 978 aa, synthetic construct
  REGION 1..978: note = engineered CasX variant
QEIKRISKIRRRLVKDSNTKKAGKTGPMKTLLVRVMTPDLRERLENLRKKPENIPQPISNTSRANLNKLLTDYTEMKKAILHVYWEEFQKDPVGLMSRVAQPASKKIDQNKLKPEMDEKGNLTTAGFACSQCGQPLFVYKLEQVSEKGKAYTNYFGRCNVAEHEKLILLAQLKPEKDSDEAVTYSLGKFGQRALDFYSIHVTKESTHPVKPLAQIAGNRYASPVGKALSDACMGTIASFLSKYQDIIIEHQKVVKGNQKRLESLRELAGKENLEYPSVTLPPQPHTKEGVDAYNEVIARVRMWVNLNLWQKLKLSRDDAKPLLRLKGFPSFPLVERQANEVDWWDMVCNVKKLINEKKEDGKVFWQNLAGYKRQEALRPYLSSEEDRKKGKKFARYQLGDLLLHLEKKHGEDWGKVYDEAWERIDKKVEGLSKHIKLEEERRSEDAQSKAALTDWLRAKASFVIEGLKEADDKDEFCRCELKLQKWYGDLRGKPFAIEAENSILDISGFSKQYNCAFIWQKDGVKKLNLYLIINYFKGGKLRFKKIKPEAFEANRFYTVINKKSGEIVPMEVNFNFDDPNLIILPLAFGKRQGREFIWNDLLSLETGSLKLANGRVIEKTLYNRRTRQDEPALFVALTFERREVLDSSNIKPMNLIGVDRGENIPAVIALTDPEGCPLSRFKDSLGNPTHILRIGESYKEKQRTIQAKKEVEQRRAGGYSRKYASKAKNLADDMVRNTARDLLYYAVTQDAMLIFENLSRGFGRQGKRTFMAERQYTRMEDWLTAKLAYEGLPSKTYLSKTLAQYTSKTCSNCGFTITSADYDRVLEKLKKTATGWMTTINGKELKVEGQITYYNRYKRQNVVKDLSVELDRLSEESVNNDISSWTKGRSGEALSLLKKRFSHRPVQEKFVCLNCGFETHADEQAALNIARSWLFLRSQEYKKYQTNKTTGNTDKRAFVETWQSFYRKKLKEVWKPAV

SEQ ID NO: 41898 - protein, 979 aa, synthetic construct
  REGION 1..979: note = engineered CasX variant
QEIKRISKIRRRLVKDSNTKKAGKTGPMKTLLVRVMTPDLRERLENLRKKPENIPQPISNTSRANLNKLLTDYTEMKKAILHVYWEEFQKDPVGLMSRVAQPASKKIDQNKLKPEMDEKGNLTTAGFACSQCGQPLFVYKLEQVSEKGKAYTNYFGRCNVAEHEKLILLAQLKPEKDSDEAVTYSLGKFGQRALDFYSIHVTKESTHPVKPLAQIAGNRYASYPVGKALSDACMGTIASFLSKYQDIIIEHQKVVKGNQKRLESLRELAGKENLEYPSVTLPPQPHTKEGVDAYNEVIARVRMWVNLNLWQKLKLSRDDAKPLLRLKGFPSFPLVERQANEVDWWDMVCNVKKLINEKKEDGKVFWQNLAGYKRQEALRPYLSSEEDRKKGKKFARYQLGDLLLHLEKKHGEDWGKVYDEAWERIDKKVEGLSKHIKLEEERRSEDAQSKAALTDWLRAKASFVIEGLKEADKDEFCRCELKLQKWYGDLRGKPFAIEAENSILDISGFSKQYNCAFIWQKDGVKKLNLYLIINYFKGGKLRFKKIKPEAFEANRFYTVINKKSGEIVPMEVNFNFDDPNLIILPLAFGKRQGREFIWNDLLSLETGSLKLANGRVIEKTLYNRRTRQDEPALFVALTFERREVLDSSNIKPMNLIGVDRGENIPAVIALTDPEGCPLSRFKDSLGNPTHILRIGESYKEKQRTIQAKKEVEQRRAGGYSRKYASKAKNLADDMVRNTARDLLYYAVTQDAMLIFENLSRGFGRQGKRTFMAERQYTRMEDWLTAKLAYEGLPSKTYLSKTLAQYTSKTCSNCGFTITSADYDRVLEKLKKTATGWMTTINGKELKVEGQITYYNRYKRQNVVKDLSVELDRLSEESVNNDISSWTKGRSGNEALSLLKKRFSHRPVQEKFVCLNCGFETHADEQAALNIARSWLFLRSQEYKKYQTNKTTGNTDKRAFVETWQSFYRKKLKEVWKPAV

SEQ ID NO: 41899 - protein, 979 aa, synthetic construct
  REGION 1..979: note = engineered CasX variant
QEIKRISKIRRRLVKDSNTKKAGKTGPMKTLLVRVMTPDLRERLENLRKKPENIPQPISNTSRANLNKLLTDYTEMKKAILHVYWEEFQKDPVGLMSRVAQPASKKIDQNKLKPEMDEKGNLTTAGFACSQCGQPLFVYKLEQVSEKGKAYTNYFGRCNVAEHEKLILLAQLKPEKDSDEAVTYSLGKFGQRALDFYSIHVTKESTHPVKPLAQIAGNRYASHPVGKALSDACMGTIASFLSKYQDIIIEHQKVVKGNQKRLESLRELAGKENLEYPSVTLPPQPHTKEGVDAYNEVIARVRMWVNLNLWQKLKLSRDDAKPLLRLKGFPSFPLVERQANEVDWWDMVCNVKKLINEKKEDGKVFWQNLAGYKRQEALRPYLSSEEDRKKGKKFARYQLGDLLLHLEKKHGEDWGKVYDEAWERIDKKVEGLSKHIKLEEERRSEDAQSKAALTDWLRAKASFVIEGLKEADKDEFCRCELKLQKWYGDLRGKPFAIEAENSILDISGFSKQYNCAFIWQKDGVKKLNLYLIINYFKGGKLRFKKIKPEAFEANRFYTVINKKSGEIVPMEVNFNFDDPNLIILPLAFGKRQGREFIWNDLLSLETGSLKLANGRVIEKTLYNRRTRQDEPALFVALTFERREVLDSSNIKPMNLIGVDRGENIPAVIALTDPEGCPLSRFKDSLGNPTHILRIGESYKEKQRTIQAKKEVEQRRAGGYSRKYASKAKNLADDMVRNTARDLLYYAVTQDAMLIFENLSRGFGRQGKRTFMAERQYTRMEDWLTAKLAYEGLPSKTYLSKTLAQYTSKTCSNCGFTITSADYDRVLEKLKKTATGWMTTINGKELKVEGQITYYNRYKRQNVVKDLSVELDRLSEESVNNDISSWTKGRSGNEALSLLKKRFSHRPVQEKFVCLNCGFETHADEQAALNIARSWLFLRSQEYKKYQTNKTTGNTDKRAFVETWQSFYRKKLKEVWKPAV

SEQ ID NO: 41900 - protein, 979 aa, synthetic construct
  REGION 1..979: note = engineered CasX variant
QEIKRISKIRRRLVKDSNTKKAGKTGPMKTLLVRVMTPDLRERLENLRKKPENIPQPISNTSRANLNKLLTDYTEMKKAILHVYWEEFQKDPVGLMSRVAQPASKKIDQNKLKPEMDEKGNLTTAGFACSQCGQPLFVYKLEQVSEKGKAYTNYFGRCNVAEHEKLILLAQLKPEKDSDEAVTYSLGKFGQRALDFYSIHVTKESTHPVKPLAQIAGNRYASSPVGKALSDACMGTIASFLSKYQDIIIEHQKVVKGNQKRLESLRELAGKENLEYPSVTLPPQPHTKEGVDAYNEVIARVRMWVNLNLWQKLKLSRDDAKPLLRLKGFPSFPLVERQANEVDWWDMVCNVKKLINEKKEDGKVFWQNLAGYKRQEALRPYLSSEEDRKKGKKFARYQLGDLLLHLEKKHGEDWGKVYDEAWERIDKKVEGLSKHIKLEEERRSEDAQSKAALTDWLRAKASFVIEGLKEADKDEFCRCELKLQKWYGDLRGKPFAIEAENSILDISGFSKQYNCAFIWQKDGVKKLNLYLIINYFKGGKLRFKKIKPEAFEANRFYTVINKKSGEIVPMEVNFNFDDPNLIILPLAFGKRQGREFIWNDLLSLETGSLKLANGRVIEKTLYNRRTRQDEPALFVALTFERREVLDSSNIKPMNLIGVDRGENIPAVIALTDPEGCPLSRFKDSLGNPTHILRIGESYKEKQRTIQAKKEVEQRRAGGYSRKYASKAKNLADDMVRNTARDLLYYAVTQDAMLIFENLSRGFGRQGKRTFMAERQYTRMEDWLTAKLAYEGLPSKTYLSKTLAQYTSKTCSNCGFTITSADYDRVLEKLKKTATGWMTTINGKELKVEGQITYYNRYKRQNVVKDLSVELDRLSEESVNNDISSWTKGRSGNEALSLLKKRFSHRPVQEKFVCLNCGFETHADEQAALNIARSWLFLRSQEYKKYQTNKTTGNTDKRAFVETWQSFYRKKLKEVWKPAV

SEQ ID NO: 41901 - protein, 979 aa, synthetic construct
  REGION 1..979: note = engineered CasX variant
QEIKRISKIRRRLVKDSNTKKAGKTGPMKTLLVRVMTPDLRERLENLRKKPENIPQPISNTSRANLNKLLTDYTEMKKAILHVYWEEFQKDPVGLMSRVAQPASKKIDQNKLKPEMDEKGNLTTAGFACSQCGQPLFVYKLEQVSEKGKAYTNYFGRCNVAEHEKLILLAQLKPEKDSDEAVTYSLGKFGQRALDFYSIHVTKESTHPVKPLAQIAGNRYASTPVGKALSDACMGTIASFLSKYQDIIIEHQKVVKGNQKRLESLRELAGKENLEYPSVTLPPQPHTKEGVDAYNEVIARVRMWVNLNLWQKLKLSRDDAKPLLRLKGFPSFPLVERQANEVDWWDMVCNVKKLINEKKEDGKVFWQNLAGYKRQEALRPYLSSEEDRKKGKKFARYQLGDLLLHLEKKHGEDWGKVYDEAWERIDKKVEGLSKHIKLEEERRSEDAQSKAALTDWLRAKASFVIEGLKEADKDEFCRCELKLQKWYGDLRGKPFAIEAENSILDISGFSKQYNCAFIWQKDGVKKLNLYLIINYFKGGKLRFKKIKPEAFEANRFYTVINKKSGEIVPMEVNFNFDDPNLIILPLAFGKRQGREFIWNDLLSLETGSLKLANGRVIEKTLYNRRTRQDEPALFVALTFERREVLDSSNIKPMNLIGVDRGENIPAVIALTDPEGCPLSRFKDSLGNPTHILRIGESYKEKQRTIQAKKEVEQRRAGGYSRKYASKAKNLADDMVRNTARDLLYYAVTQDAMLIFENLSRGFGRQGKRTFMAERQYTRMEDWLTAKLAYEGLPSKTYLSKTLAQYTSKTCSNCGFTITSADYDRVLEKLKKTATGWMTTINGKELKVEGQITYYNRYKRQNVVKDLSVELDRLSEESVNNDISSWTKGRSGNEALSLLKKRFSHRPVQEKFVCLNCGFETHADEQAALNIARSWLFLRSQEYKKYQTNKTTGNTDKRAFVETWQSFYRKKLKEVWKPAV

SEQ ID NO: 41902 - protein, 979 aa, synthetic construct
  REGION 1..979: note = engineered CasX variant
QEIKRISKIRRRLVKDSNTKKAGKTGPMKTLLVRVMTPDLRERLENLRKKPENIPQPISNTSRANLNKLLTDYTEMKKAILHVYWEEFQKDPVGLMSRVAQPASKKIDQNKLKPEMDEKGNLTTAGFACSQCGQPLFVYKLEQVSEKGKAYTNYFGRCNVAEHEKLILLAQLKPEKDSDEAVTYSLGKFGQRALDFYSIHVTKESTHPVKPLAQIAGNRYASAPVGKALSDACMGTIASFLSKYQDIIIEHQKVVKGNQKRLESLRELAGKENLEYPSVTLPPQPHTKEGVDAYNEVIARVRMWVNLNLWQKLKLSRDDAKPLLRLKGFPSFPLVERQANEVDWWDMVCNVKKLINEKKEDGKVFWQNLAGYKRQEALRPYLSSEEDRKKGKKFARYQLGDLLLHLEKKHGEDWGKVYDEAWERIDKKVEGLSKHIKLEEERRSEDAQSKAALTDWLRAKASFVIEGLKEADKDEFCRCELKLQKWYGDLRGKPFAIEAENSILDISGFSKQYNCAFIWQKDGVKKLNLYLIINYFKGGKLRFKKIKPEAFEANRFYTVINKKSGEIVPMEVNFNFDDPNLIILPLAFGKRQGREFIWNDLLSLETGSLKLANGRVIEKTLYNRRTRQDEPALFVALTFERREVLDSSNIKPMNLIGVDRGENIPAVIALTDPEGCPLSRFKDSLGNPTHILRIGESYKEKQRTIQAKKEVEQRRAGGYSRKYASKAKNLADDMVRNTARDLLYYAVTQDAMLIFENLSRGFGRQGKRTFMAERQYTRMEDWLTAKLAYEGLPSKTYLSKTLAQYTSKTCSNCGFTITSADYDRVLEKLKKTATGWMTTINGKELKVEGQITYYNRYKRQNVVKDLSVELDRLSEESVNNDISSWTKGRSGNEALSLLKKRFSHRPVQEKFVCLNCGFETHADEQAALNIARSWLFLRSQEYKKYQTNKTTGNTDKRAFVETWQSFYRKKLKEVWKPAV

SEQ ID NO: 41903 - protein, 979 aa, synthetic construct
  REGION 1..979: note = engineered CasX variant
QEIKRISKIRRRLVKDSNTKKAGKTGPMKTLLVRVMTPDLRERLENLRKKPENIPQPISNTSRANLNKLLTDYTEMKKAILHVYWEEFQKDPVGLMSRVAQPASKKIDQNKLKPEMDEKGNLTTAGFACSQCGQPLFVYKLEQVSEKGKAYTNYFGRCNVAEHEKLILLAQLKPEKDSDEAVTYSLGKFGQRALDFYSIHVTKESTHPVKPLAQIAGNRYASVPVGKALSDACMGTIASFLSKYQDIIIEHQKVVKGNQKRLESLRELAGKENLEYPSVTLPPQPHTKEGVDAYNEVIARVRMWVNLNLWQKLKLSRDDAKPLLRLKGFPSFPLVERQANEVDWWDMVCNVKKLINEKKEDGKVFWQNLAGYKRQEALRPYLSSEEDRKKGKKFARYQLGDLLLHLEKKHGEDWGKVYDEAWERIDKKVEGLSKHIKLEEERRSEDAQSKAALTDWLRAKASFVIEGLKEADKDEFCRCELKLQKWYGDLRGKPFAIEAENSILDISGFSKQYNCAFIWQKDGVKKLNLYLIINYFKGGKLRFKKIKPEAFEANRFYTVINKKSGEIVPMEVNFNFDDPNLIILPLAFGKRQGREFIWNDLLSLETGSLKLANGRVIEKTLYNRRTRQDEPALFVALTFERREVLDSSNIKPMNLIGVDRGENIPAVIALTDPEGCPLSRFKDSLGNPTHILRIGESYKEKQRTIQAKKEVEQRRAGGYSRKYASKAKNLADDMVRNTARDLLYYAVTQDAMLIFENLSRGFGRQGKRTFMAERQYTRMEDWLTAKLAYEGLPSKTYLSKTLAQYTSKTCSNCGFTITSADYDRVLEKLKKTATGWMTTINGKELKVEGQITYYNRYKRQNVVKDLSVELDRLSEESVNNDISSWTKGRSGNEALSLLKKRFSHRPVQEKFVCLNCGFETHADEQAALNIARSWLFLRSQEYKKYQTNKTTGNTDKRAFVETWQSFYRKKLKEVWKPAV

SEQ ID NO: 41904 - protein, 979 aa, synthetic construct
  REGION 1..979: note = engineered CasX variant
QEIKRISKIRRRLVKDSNTKKAGKTGPMKTLLVRVMTPDLRERLENLRKKPENIPQPISNTSRANLNKLLTDYTEMKKAILHVYWEEFQKDPVGLMSRVAQPASKKIDQNKLKPEMDEKGNLTTAGFACSQCGQPLFVYKLEQVSEKGKAYTNYFGRCNVAEHEKLIKLAQLKPEKDSDEAVTYSLGKFGQRALDFYSIHVTKESTHPVKPLAQIAGNRYASGPVGKALSDACMGTIASFLSKYQDIIIEHQKVVKGNQKRLESLRELAGKENLEYPSVTLPPQPHTKEGVDAYNEVIARVRMWVNLNLWQKLKLSRDDAKPLLRLKGFPSFPLVERQANEVDWWDMVCNVKKLINEKKEDGKVFWQNLAGYKRQEALRPYLSSEEDRKKGKKFARYQLGDLLLHLEKKHGEDWGKVYDEAWERIDKKVEGLSKHIKLEEERRSEDAQSKAALTDWLRAKASFVIEGLKEADKDEFCRCELKLQKWYGDLRGKPFAIEAENSILDISGFSKQYNCAFIWQKDGVKKLNLYLIINYFKGGKLRFKKIKPEAFEANRFYTVINKKSGEIVPMEVNFNFDDPNLIILPLAFGKRQGREFIWNDLLSLETGSLKLANGRVIEKTLYNRRTRQDEPALFVALTFERREVLDSSNIKPMNLIGVDRGENIPAVIALTDPEGCPLSRFKDSLGNPTHILRIGESYKEKQRTIQAKKEVEQRRAGGYSRKYASKAKNLADDMVRNTARDLLYYAVTQDAMLIFENLSRGFGRQGKRTFMAERQYTRMEDWLTAKLAYEGLPSKTYLSKTLAQYTSKTCSNCGFTITSADYDRVLEKLKKTATGWMTTINGKELKVEGQITYYNRYKRQNVVKDLSVELDRLSEESVNNDISSWTKGRSGNEALSLLKKRFSHRPVQEKFVCLNCGFETHADEQAALNIARSWLFLRSQEYKKYQTNKTTGNTDKRAFVETWQSFYRKKLKEVWKPAV

SEQ ID NO: 41905 - protein, 978 aa, synthetic construct
  REGION 1..978: note = engineered CasX variant
QEIKRISKIRRRLVKDSNTKKAGKTGPMKTLLVRVMTPDLRERLENLRKKPENIPQPISNTSRANLNKLLTDYTEMKKAILHVYWEEFQKDPVGLMSRVAQPASKKIDQNKLKPEMDEKGNLTTAGFACSQCGQPLFVYKLEQVSEKGKAYTNYFGRCNVAEHEKLILLAQLKPEKDSDEAVTYSLGKFGQRALDFYSIHVTKESTHPVKPLAQIAGNRYASPVGKALSDACMGTIASFLSKYQDIIIEHQKVVKGNQKRLESLRELAGKENLEYPSVTLPPQPHTKEGVDAYNEVIARVRMWVNLNLWQKLKLSRDDAKPLLRLKGFPSFPLVERQANEVDWWDMVCNVKKLINEKKEDGKVFWQNLAGYKRQEALRPYLSSEEDRKKGKKFARYQLGDLLLHLEKKHGEDWGKVYDEAWERIDKKVEGLSKHIKLEEERRSEDAQSKAALTDWLRAKASFVIEGLKEADKDEFCRCELKLQKWYGDLRGKPFAIEAENSILDISGFSKQYNCAFIWQKDGVKKLNLYLIINYFKGGKLRFKKIKPEAFEANRFYTVINKKSGEIVPMEVNFNFDDPNLIILPLAFGKRQGREFIWNDLLSLETGSLKLANGRVIEKTLYNRRTRQDEPALFVALTFERREVLDSSNIKPMNLIGVDRGENIPAVIALTDPEGCPLSRFKDSLGNPTHILRIGESYKEKQRTIQAKKEVEQRRAGGYSRKYASKAKNLADDMVRNTARDLLYYAVTQDAMLIFENLSRGFGRQGKRTFMAERQYTRMEDWLTAKLAYEGLPSKTYLSKTLAQYTSKTCSNCGFTITSADYDRVLEKLKKTATGWMTTINGKELKVEGQITYYNRYKRQNVVKDLSVELDRLSEESVNNDISSWTKGRSGNEALSLLKKRFSHRPVQEKFVCLNCGFETHADEQAALNIARSWLFLRSQEYKKYQTNKTTGNTDKRAFVETWQSFYRKKLKEVWKPAV

SEQ ID NO: 41906 - protein, 978 aa, synthetic construct
  REGION 1..978: note = engineered CasX variant
QEIKRISKIRRRLVKDSNTKKAGKTGPMKTLLVRVMTPDLRERLENLRKKPENIPQPISNTSRANLNKLLTDYTEMKKAILHVYWEEFQKDPVGLMSRVAQPASKKIDQNKLKPEMDEKGNLTTAGFACSQCGQPLFVYKLEQVSEKGKAYTNYFGRCNVAEHEKLILLAQLKPEKDSDEAVTYSLGKFGQRALDFYSIHVTKESTHPVKPLAQIAGNRYASYPVGKALSDACMGTIASFLSKYQDIIIEHQKVVKGNQKRLESLRELAGKENLEYPSVTLPPQPHTKEGVDAYNEVIARVRMWVNLNLWQKLKLSRDDAKPLLRLKGFPSFPLVERQANEVDWWDMVCNVKKLINEKKEDGKVFWQNLAGYKRQEALRPYLSSEEDRQKGKKFARYQLGDLLLHLEKKHGEDWGKVYDEAWERIDKKVEGLSKHIKLEEERRSEDAQSKAALTDWLRAKASFVIEGLKEADKDEFCRCELKLQKWYGDLRGKPFAIEAENSILDISGFSKQYNCAFIWQKDGVKKLNLYLIINYFKGGKLRFKKIKPEAFEANRFYTVINKKSGEIVPMEVNFNFDDPNLIILPLAFGKRQGREFIWNDLLSLETGSLKLANGRVIEKTLYNRRTRQDEPALFVALTFERREVLDSSNIKPMNLIGVDRGENIPAVIALTDPEGCPLSRFKDSLGNPTHILRIGESYKEKQRTIQAKKEVEQRRAGGYSRKYASKAKNLADDMVRNTARDLLYYAVTQDAMLIFENLSRGFGRQGKRTFMAERQYTRMEDWLTAKLAYEGLPSKTYLSKTLAQYTSKTCSNCGFTITSADYDRVLEKLKKTATGWMTTINGKELKVEGQITYYNRYKRQNVVKDLSVELDRLSEESVNNDISSWTKGRSGEALSLLKKRFSHRPVQEKFVCLNCGFETHADEQAALNIARSWLFLRSQEYKKYQTNKTTGNTDKRAFVETWQSFYRKKLKEVWKPAV

SEQ ID NO: 41907 - protein, 978 aa, synthetic construct
  REGION 1..978: note = engineered CasX variant
QEIKRISKIRRRLVKDSNTKKAGKTGPMKTLLVRVMTPDLRERLENLRKKPENIPQPISNTSRANLNKLLTDYTEMKKAILHVYWEEFQKDPVGLMSRVAQPASKKIDQNKLKPEMDEKGNLTTAGFACSQCGQPLFVYKLEQVSEKGKAYTNYFGRCNVAEHEKLILLAQLKPEKDSDEAVTYSLGKFGQRALDFYSIHVTKESTHPVKPLAQIAGNRYASHPVGKALSDACMGTIASFLSKYQDIIIEHQKVVKGNQKRLESLRELAGKENLEYPSVTLPPQPHTKEGVDAYNEVIARVRMWVNLNLWQKLKLSRDDAKPLLRLKGFPSFPLVERQANEVDWWDMVCNVKKLINEKKEDGKVFWQNLAGYKRQEALRPYLSSEEDRQKGKKFARYQLGDLLLHLEKKHGEDWGKVYDEAWERIDKKVEGLSKHIKLEEERRSEDAQSKAALTDWLRAKASFVIEGLKEADKDEFCRCELKLQKWYGDLRGKPFAIEAENSILDISGFSKQYNCAFIWQKDGVKKLNLYLIINYFKGGKLRFKKIKPEAFEANRFYTVINKKSGEIVPMEVNFNFDDPNLIILPLAFGKRQGREFIWNDLLSLETGSLKLANGRVIEKTLYNRRTRQDEPALFVALTFERREVLDSSNIKPMNLIGVDRGENIPAVIALTDPEGCPLSRFKDSLGNPTHILRIGESYKEKQRTIQAKKEVEQRRAGGYSRKYASKAKNLADDMVRNTARDLLYYAVTQDAMLIFENLSRGFGRQGKRTFMAERQYTRMEDWLTAKLAYEGLPSKTYLSKTLAQYTSKTCSNCGFTITSADYDRVLEKLKKTATGWMTTINGKELKVEGQITYYNRYKRQNVVKDLSVELDRLSEESVNNDISSWTKGRSGEALSLLKKRFSHRPVQEKFVCLNCGFETHADEQAALNIARSWLFLRSQEYKKYQTNKTTGNTDKRAFVETWQSFYRKKLKEVWKPAV

SEQ ID NO: 41908 - protein, 978 aa, synthetic construct
  REGION 1..978: note = engineered CasX variant
QEIKRISKIRRRLVKDSNTKKAGKTGPMKTLLVRVMTPDLRERLENLRKKPENIPQPISNTSRANLNKLLTDYTEMKKAILHVYWEEFQKDPVGLMSRVAQPASKKIDQNKLKPEMDEKGNLTTAGFACSQCGQPLFVYKLEQVSEKGKAYTNYFGRCNVAEHEKLILLAQLKPEKDSDEAVTYSLGKFGQRALDFYSIHVTKESTHPVKPLAQIAGNRYASSPVGKALSDACMGTIASFLSKYQDIIIEHQKVVKGNQKRLESLRELAGKENLEYPSVTLPPQPHTKEGVDAYNEVIARVRMWVNLNLWQKLKLSRDDAKPLLRLKGFPSFPLVERQANEVDWWDMVCNVKKLINEKKEDGKVFWQNLAGYKRQEALRPYLSSEEDRQKGKKFARYQLGDLLLHLEKKHGEDWGKVYDEAWERIDKKVEGLSKHIKLEEERRSEDAQSKAALTDWLRAKASFVIEGLKEADKDEFCRCELKLQKWYGDLRGKPFAIEAENSILDISGFSKQYNCAFIWQKDGVKKLNLYLIINYFKGGKLRFKKIKPEAFEANRFYTVINKKSGEIVPMEVNFNFDDPNLIILPLAFGKRQGREFIWNDLLSLETGSLKLANGRVIEKTLYNRRTRQDEPALFVALTFERREVLDSSNIKPMNLIGVDRGENIPAVIALTDPEGCPLSRFKDSLGNPTHILRIGESYKEKQRTIQAKKEVEQRRAGGYSRKYASKAKNLADDMVRNTARDLLYYAVTQDAMLIFENLSRGFGRQGKRTFMAERQYTRMEDWLTAKLAYEGLPSKTYLSKTLAQYTSKTCSNCGFTITSADYDRVLEKLKKTATGWMTTINGKELKVEGQITYYNRYKRQNVVKDLSVELDRLSEESVNNDISSWTKGRSGEALSLLKKRFSHRPVQEKFVCLNCGFETHADEQAALNIARSWLFLRSQEYKKYQTNKTTGNTDKRAFVETWQSFYRKKLKEVWKPAV

SEQ ID NO: 41909 - protein, 978 aa, synthetic construct
  REGION 1..978: note = engineered CasX variant
QEIKRISKIRRRLVKDSNTKKAGKTGPMKTLLVRVMTPDLRERLENLRKKPENIPQPISNTSRANLNKLLTDYTEMKKAILHVYWEEFQKDPVGLMSRVAQPASKKIDQNKLKPEMDEKGNLTTAGFACSQCGQPLFVYKLEQVSEKGKAYTNYFGRCNVAEHEKLILLAQLKPEKDSDEAVTYSLGKFGQRALDFYSIHVTKESTHPVKPLAQIAGNRYASTPVGKALSDACMGTIASFLSKYQDIIIEHQKVVKGNQKRLESLRELAGKENLEYPSVTLPPQPHTKEGVDAYNEVIARVRMWVNLNLWQKLKLSRDDAKPLLRLKGFPSFPLVERQANEVDWWDMVCNVKKLINEKKEDGKVFWQNLAGYKRQEALRPYLSSEEDRQKGKKFARYQLGDLLLHLEKKHGEDWGKVYDEAWERIDKKVEGLSKHIKLEEERRSEDAQSKAALTDWLRAKASFVIEGLKEADKDEFCRCELKLQKWYGDLRGKPFAIEAENSILDISGFSKQYNCAFIWQKDGVKKLNLYLIINYFKGGKLRFKKIKPEAFEANRFYTVINKKSGEIVPMEVNFNFDDPNLIILPLAFGKRQGREFIWNDLLSLETGSLKLANGRVIEKTLYNRRTRQDEPALFVALTFERREVLDSSNIKPMNLIGVDRGENIPAVIALTDPEGCPLSRFKDSLGNPTHILRIGESYKEKQRTIQAKKEVEQRRAGGYSRKYASKAKNLADDMVRNTARDLLYYAVTQDAMLIFENLSRGFGRQGKRTFMAERQYTRMEDWLTAKLAYEGLPSKTYLSKTLAQYTSKTCSNCGFTITSADYDRVLEKLKKTATGWMTTINGKELKVEGQITYYNRYKRQNVVKDLSVELDRLSEESVNNDISSWTKGRSGEALSLLKKRFSHRPVQEKFVCLNCGFETHADEQAALNIARSWLFLRSQEYKKYQTNKTTGNTDKRAFVETWQSFYRKKLKEVWKPAV

SEQ ID NO: 41910 - protein, 978 aa, synthetic construct
  REGION 1..978: note = engineered CasX variant
QEIKRISKIRRRLVKDSNTKKAGKTGPMKTLLVRVMTPDLRERLENLRKKPENIPQPISNTSRANLNKLLTDYTEMKKAILHVYWEEFQKDPVGLMSRVAQPASKKIDQNKLKPEMDEKGNLTTAGFACSQCGQPLFVYKLEQVSEKGKAYTNYFGRCNVAEHEKLILLAQLKPEKDSDEAVTYSLGKFGQRALDFYSIHVTKESTHPVKPLAQIAGNRYASAPVGKALSDACMGTIASFLSKYQDIIIEHQKVVKGNQKRLESLRELAGKENLEYPSVTLPPQPHTKEGVDAYNEVIARVRMWVNLNLWQKLKLSRDDAKPLLRLKGFPSFPLVERQANEVDWWDMVCNVKKLINEKKEDGKVFWQNLAGYKRQEALRPYLSSEEDRQKGKKFARYQLGDLLLHLEKKHGEDWGKVYDEAWERIDKKVEGLSKHIKLEEERRSEDAQSKAALTDWLRAKASFVIEGLKEADKDEFCRCELKLQKWYGDLRGKPFAIEAENSILDISGFSKQYNCAFIWQKDGVKKLNLYLIINYFKGGKLRFKKIKPEAFEANRFYTVINKKSGEIVPMEVNFNFDDPNLIILPLAFGKRQGREFIWNDLLSLETGSLKLANGRVIEKTLYNRRTRQDEPALFVALTFERREVLDSSNIKPMNLIGVDRGENIPAVIALTDPEGCPLSRFKDSLGNPTHILRIGESYKEKQRTIQAKKEVEQRRAGGYSRKYASKAKNLADDMVRNTARDLLYYAVTQDAMLIFENLSRGFGRQGKRTFMAERQYTRMEDWLTAKLAYEGLPSKTYLSKTLAQYTSKTCSNCGFTITSADYDRVLEKLKKTATGWMTTINGKELKVEGQITYYNRYKRQNVVKDLSVELDRLSEESVNNDISSWTKGRSGEALSLLKKRFSHRPVQEKFVCLNCGFETHADEQAALNIARSWLFLRSQEYKKYQTNKTTGNTDKRAFVETWQSFYRKKLKEVWKPAV

SEQ ID NO: 41911 - protein, 978 aa, synthetic construct
  REGION 1..978: note = engineered CasX variant
QEIKRISKIRRRLVKDSNTKKAGKTGPMKTLLVRVMTPDLRERLENLRKKPENIPQPISNTSRANLNKLLTDYTEMKKAILHVYWEEFQKDPVGLMSRVAQPASKKIDQNKLKPEMDEKGNLTTAGFACSQCGQPLFVYKLEQVSEKGKAYTNYFGRCNVAEHEKLILLAQLKPEKDSDEAVTYSLGKFGQRALDFYSIHVTKESTHPVKPLAQIAGNRYASVPVGKALSDACMGTIASFLSKYQDIIIEHQKVVKGNQKRLESLRELAGKENLEYPSVTLPPQPHTKEGVDAYNEVIARVRMWVNLNLWQKLKLSRDDAKPLLRLKGFPSFPLVERQANEVDWWDMVCNVKKLINEKKEDGKVFWQNLAGYKRQEALRPYLSSEEDRQKGKKFARYQLGDLLLHLEKKHGEDWGKVYDEAWERIDKKVEGLSKHIKLEEERRSEDAQSKAALTDWLRAKASFVIEGLKEADKDEFCRCELKLQKWYGDLRGKPFAIEAENSILDISGFSKQYNCAFIWQKDGVKKLNLYLIINYFKGGKLRFKKIKPEAFEANRFYTVINKKSGEIVPMEVNFNFDDPNLIILPLAFGKRQGREFIWNDLLSLETGSLKLANGRVIEKTLYNRRTRQDEPALFVALTFERREVLDSSNIKPMNLIGVDRGENIPAVIALTDPEGCPLSRFKDSLGNPTHILRIGESYKEKQRTIQAKKEVEQRRAGGYSRKYASKAKNLADDMVRNTARDLLYYAVTQDAMLIFENLSRGFGRQGKRTFMAERQYTRMEDWLTAKLAYEGLPSKTYLSKTLAQYTSKTCSNCGFTITSADYDRVLEKLKKTATGWMTTINGKELKVEGQITYYNRYKRQNVVKDLSVELDRLSEESVNNDISSWTKGRSGEALSLLKKRFSHRPVQEKFVCLNCGFETHADEQAALNIARSWLFLRSQEYKKYQTNKTTGNTDKRAFVETWQSFYRKKLKEVWKPAV

SEQ ID NO: 41912 - protein, 978 aa, synthetic construct
  REGION 1..978: note = engineered CasX variant
QEIKRISKIRRRLVKDSNTKKAGKTGPMKTLLVRVMTPDLRERLENLRKKPENIPQPISNTSRANLNKLLTDYTEMKKAILHVYWEEFQKDPVGLMSRVAQPASKKIDQNKLKPEMDEKGNLTTAGFACSQCGQPLFVYKLEQVSEKGKAYTNYFGRCNVAEHEKLIKLAQLKPEKDSDEAVTYSLGKFGQRALDFYSIHVTKESTHPVKPLAQIAGNRYASGPVGKALSDACMGTIASFLSKYQDIIIEHQKVVKGNQKRLESLRELAGKENLEYPSVTLPPQPHTKEGVDAYNEVIARVRMWVNLNLWQKLKLSRDDAKPLLRLKGFPSFPLVERQANEVDWWDMVCNVKKLINEKKEDGKVFWQNLAGYKRQEALRPYLSSEEDRQKGKKFARYQLGDLLLHLEKKHGEDWGKVYDEAWERIDKKVEGLSKHIKLEEERRSEDAQSKAALTDWLRAKASFVIEGLKEADKDEFCRCELKLQKWYGDLRGKPFAIEAENSILDISGFSKQYNCAFIWQKDGVKKLNLYLIINYFKGGKLRFKKIKPEAFEANRFYTVINKKSGEIVPMEVNFNFDDPNLIILPLAFGKRQGREFIWNDLLSLETGSLKLANGRVIEKTLYNRRTRQDEPALFVALTFERREVLDSSNIKPMNLIGVDRGENIPAVIALTDPEGCPLSRFKDSLGNPTHILRIGESYKEKQRTIQAKKEVEQRRAGGYSRKYASKAKNLADDMVRNTARDLLYYAVTQDAMLIFENLSRGFGRQGKRTFMAERQYTRMEDWLTAKLAYEGLPSKTYLSKTLAQYTSKTCSNCGFTITSADYDRVLEKLKKTATGWMTTINGKELKVEGQITYYNRYKRQNVVKDLSVELDRLSEESVNNDISSWTKGRSGEALSLLKKRFSHRPVQEKFVCLNCGFETHADEQAALNIARSWLFLRSQEYKKYQTNKTTGNTDKRAFVETWQSFYRKKLKEVWKPAV

SEQ ID NO: 41913 - protein, 977 aa, synthetic construct
  REGION 1..977: note = engineered CasX variant
QEIKRISKIRRRLVKDSNTKKAGKTGPMKTLLVRVMTPDLRERLENLRKKPENIPQPISNTSRANLNKLLTDYTEMKKAILHVYWEEFQKDPVGLMSRVAQPASKKIDQNKLKPEMDEKGNLTTAGFACSQCGQPLFVYKLEQVSEKGKAYTNYFGRCNVAEHEKLILLAQLKPEKDSDEAVTYSLGKFGQRALDFYSIHVTKESTHPVKPLAQIAGNRYASPVGKALSDACMGTIASFLSKYQDIIIEHQKVVKGNQKRLESLRELAGKENLEYPSVTLPPQPHTKEGVDAYNEVIARVRMWVNLNLWQKLKLSRDDAKPLLRLKGFPSFPLVERQANEVDWWDMVCNVKKLINEKKEDGKVFWQNLAGYKRQEALRPYLSSEEDRQKGKKFARYQLGDLLLHLEKKHGEDWGKVYDEAWERIDKKVEGLSKHIKLEEERRSEDAQSKAALTDWLRAKASFVIEGLKEADKDEFCRCELKLQKWYGDLRGKPFAIEAENSILDISGFSKQYNCAFIWQKDGVKKLNLYLIINYFKGGKLRFKKIKPEAFEANRFYTVINKKSGEIVPMEVNFNFDDPNLIILPLAFGKRQGREFIWNDLLSLETGSLKLANGRVIEKTLYNRRTRQDEPALFVALTFERREVLDSSNIKPMNLIGVDRGENIPAVIALTDPEGCPLSRFKDSLGNPTHILRIGESYKEKQRTIQAKKEVEQRRAGGYSRKYASKAKNLADDMVRNTARDLLYYAVTQDAMLIFENLSRGFGRQGKRTFMAERQYTRMEDWLTAKLAYEGLPSKTYLSKTLAQYTSKTCSNCGFTITSADYDRVLEKLKKTATGWMTTINGKELKVEGQITYYNRYKRQNVVKDLSVELDRLSEESVNNDISSWTKGRSGEALSLLKKRFSHRPVQEKFVCLNCGFETHADEQAALNIARSWLFLRSQEYKKYQTNKTTGNTDKRAFVETWQSFYRKKLKEVWKPAV

SEQ ID NO: 41914 - protein, 978 aa, synthetic construct
  REGION 1..978: note = engineered CasX variant
QEIKRISKIRRRLVKDSNTKKAGKTGPMKTLLVRVMTPDLRERLENLRKKPENIPQPISNTSRANLNKLLTDYTEMKKAILHVYWEEFQKDPVGLMSRVAQPASKKIDQNKLKPEMDEKGNLTTAGFACSQCGQPLFVYKLEQVSEKGKAYTNYFGRCNVAEHEKLILLAQLKPEKDSDEAVTYSLGKFGQRALDFYSIHVTKESTHPVKPLAQIAGNRYASYPVGKALSDACMGTIASFLSKYQDIIIEHQKVVKGNQKRLESLRELAGKENLEYPSVTLPPQPHTKEGVDAYNEVIARVRMWVNLNLWQKLKLSRDDAKPLLRLKGFPSFPLVERQANEVDWWDMVCNVKKLINEKKEDGKVFWQNLAGYKRQEALRPYLSSEEDRKKGKKFARYQLGDLLLHLEKKHGEDWGKVYDEAWERIDKKVEGLSKHIKLEEERRSEDAQSKAALTDWLRAKASFVIEGLKEADKDEFCRCELKLQKWYGDLRGKPFAIEAENSILDISGFSKQYNCAFIWQKDGVKKLNLYLIINYFKGGKLRFKKIKPEAFEANRFYTVINKKSGEIVPMEVNFNFDDPNLIILPLAFGKRQGREFIWNDLLSLETGSLKLANGRVIEKTLYNRRTRQDEPALFVALTFERREVLDSSNIKPMNLIGVDRGENIPAVIALTDPEGCPLSRFKDSLGNPTHILRIGESYKEKQRTIQAKKEVEQRRAGGYSRKYASKAKNLADDMVRNTARDLLYYAVTQDAMLIFENLSRGFGRQGKRTFMAERQYTRMEDWLTAKLAYEGLPSQTYLSKTLAQYTSKTCSNCGFTITSADYDRVLEKLKKTATGWMTTINGKELKVEGQITYYNRYKRQNVVKDLSVELDRLSEESVNNDISSWTKGRSGEALSLLKKRFSHRPVQEKFVCLNCGFETHADEQAALNIARSWLFLRSQEYKKYQTNKTTGNTDKRAFVETWQSFYRKKLKEVWKPAV

SEQ ID NO: 41915 - protein, 978 aa, synthetic construct
  REGION 1..978: note = engineered CasX variant
QEIKRISKIRRRLVKDSNTKKAGKTGPMKTLLVRVMTPDLRERLENLRKKPENIPQPISNTSRANLNKLLTDYTEMKKAILHVYWEEFQKDPVGLMSRVAQPASKKIDQNKLKPEMDEKGNLTTAGFACSQCGQPLFVYKLEQVSEKGKAYTNYFGRCNVAEHEKLILLAQLKPEKDSDEAVTYSLGKFGQRALDFYSIHVTKESTHPVKPLAQIAGNRYASHPVGKALSDACMGTIASFLSKYQDIIIEHQKVVKGNQKRLESLRELAGKENLEYPSVTLPPQPHTKEGVDAYNEVIARVRMWVNLNLWQKLKLSRDDAKPLLRLKGFPSFPLVERQANEVDWWDMVCNVKKLINEKKEDGKVFWQNLAGYKRQEALRPYLSSEEDRKKGKKFARYQLGDLLLHLEKKHGEDWGKVYDEAWERIDKKVEGLSKHIKLEEERRSEDAQSKAALTDWLRAKASFVIEGLKEADKDEFCRCELKLQKWYGDLRGKPFAIEAENSILDISGFSKQYNCAFIWQKDGVKKLNLYLIINYFKGGKLRFKKIKPEAFEANRFYTVINKKSGEIVPMEVNFNFDDPNLIILPLAFGKRQGREFIWNDLLSLETGSLKLANGRVIEKTLYNRRTRQDEPALFVALTFERREVLDSSNIKPMNLIGVDRGENIPAVIALTDPEGCPLSRFKDSLGNPTHILRIGESYKEKQRTIQAKKEVEQRRAGGYSRKYASKAKNLADDMVRNTARDLLYYAVTQDAMLIFENLSRGFGRQGKRTFMAERQYTRMEDWLTAKLAYEGLPSQTYLSKTLAQYTSKTCSNCGFTITSADYDRVLEKLKKTATGWMTTINGKELKVEGQITYYNRYKRQNVVKDLSVELDRLSEESVNNDISSWTKGRSGEALSLLKKRFSHRPVQEKFVCLNCGFETHADEQAALNIARSWLFLRSQEYKKYQTNKTTGNTDKRAFVETWQSFYRKKLKEVWKPAV

SEQ ID NO: 41916 - protein, 978 aa, synthetic construct
  REGION 1..978: note = engineered CasX variant
QEIKRISKIRRRLVKDSNTKKAGKTGPMKTLLVRVMTPDLRERLENLRKKPENIPQPISNTSRANLNKLLTDYTEMKKAILHVYWEEFQKDPVGLMSRVAQPASKKIDQNKLKPEMDEKGNLTTAGFACSQCGQPLFVYKLEQVSEKGKAYTNYFGRCNVAEHEKLILLAQLKPEKDSDEAVTYSLGKFGQRALDFYSIHVTKESTHPVKPLAQIAGNRYASSPVGKALSDACMGTIASFLSKYQDIIIEHQKVVKGNQKRLESLRELAGKENLEYPSVTLPPQPHTKEGVDAYNEVIARVRMWVNLNLWQKLKLSRDDAKPLLRLKGFPSFPLVERQANEVDWWDMVCNVKKLINEKKEDGKVFWQNLAGYKRQEALRPYLSSEEDRKKGKKFARYQLGDLLLHLEKKHGEDWGKVYDEAWERIDKKVEGLSKHIKLEEERRSEDAQSKAALTDWLRAKASFVIEGLKEADKDEFCRCELKLQKWYGDLRGKPFAIEAENSILDISGFSKQYNCAFIWQKDGVKKLNLYLIINYFKGGKLRFKKIKPEAFEANRFYTVINKKSGEIVPMEVNFNFDDPNLIILPLAFGKRQGREFIWNDLLSLETGSLKLANGRVIEKTLYNRRTRQDEPALFVALTFERREVLDSSNIKPMNLIGVDRGENIPAVIALTDPEGCPLSRFKDSLGNPTHILRIGESYKEKQRTIQAKKEVEQRRAGGYSRKYASKAKNLADDMVRNTARDLLYYAVTQDAMLIFENLSRGFGRQGKRTFMAERQYTRMEDWLTAKLAYEGLPSQTYLSKTLAQYTSKTCSNCGFTITSADYDRVLEKLKKTATGWMTTINGKELKVEGQITYYNRYKRQNVVKDLSVELDRLSEESVNNDISSWTKGRSGEALSLLKKRFSHRPVQEKFVCLNCGFETHADEQAALNIARSWLFLRSQEYKKYQTNKTTGNTDKRAFVETWQSFYRKKLKEVWKPAV

SEQ ID NO: 41917 - protein, 978 aa, synthetic construct
  REGION 1..978: note = engineered CasX variant
QEIKRISKIRRRLVKDSNTKKAGKTGPMKTLLVRVMTPDLRERLENLRKKPENIPQPISNTSRANLNKLLTDYTEMKKAILHVYWEEFQKDPVGLMSRVAQPASKKIDQNKLKPEMDEKGNLTTAGFACSQCGQPLFVYKLEQVSEKGKAYTNYFGRCNVAEHEKLILLAQLKPEKDSDEAVTYSLGKFGQRALDFYSIHVTKESTHPVKPLAQIAGNRYASTPVGKALSDACMGTIASFLSKYQDIIIEHQKVVKGNQKRLESLRELAGKENLEYPSVTLPPQPHTKEGVDAYNEVIARVRMWVNLNLWQKLKLSRDDAKPLLRLKGFPSFPLVERQANEVDWWDMVCNVKKLINEKKEDGKVFWQNLAGYKRQEALRPYLSSEEDRKKGKKFARYQLGDLLLHLEKKHGEDWGKVYDEAWERIDKKVEGLSKHIKLEEERRSEDAQSKAALTDWLRAKASFVIEGLKEADKDEFCRCELKLQKWYGDLRGKPFAIEAENSILDISGFSKQYNCAFIWQKDGVKKLNLYLIINYFKGGKLRFKKIKPEAFEANRFYTVINKKSGEIVPMEVNFNFDDPNLIILPLAFGKRQGREFIWNDLLSLETGSLKLANGRVIEKTLYNRRTRQDEPALFVALTFERREVLDSSNIKPMNLIGVDRGENIPAVIALTDPEGCPLSRFKDSLGNPTHILRIGESYKEKQRTIQAKKEVEQRRAGGYSRKYASKAKNLADDMVRNTARDLLYYAVTQDAMLIFENLSRGFGRQGKRTFMAERQYTRMEDWLTAKLAYEGLPSQTYLSKTLAQYTSKTCSNCGFTITSADYDRVLEKLKKTATGWMTTINGKELKVEGQITYYNRYKRQNVVKDLSVELDRLSEESVNNDISSWTKGRSGEALSLLKKRFSHRPVQEKFVCLNCGFETHADEQAALNIARSWLFLRSQEYKKYQTNKTTGNTDKRAFVETWQSFYRKKLKEVWKPAV

SEQ ID NO: 41918 - protein, 978 aa, synthetic construct
  REGION 1..978: note = engineered CasX variant
QEIKRISKIRRRLVKDSNTKKAGKTGPMKTLLVRVMTPDLRERLENLRKKPENIPQPISNTSRANLNKLLTDYTEMKKAILHVYWEEFQKDPVGLMSRVAQPASKKIDQNKLKPEMDEKGNLTTAGFACSQCGQPLFVYKLEQVSEKGKAYTNYFGRCNVAEHEKLILLAQLKPEKDSDEAVTYSLGKFGQRALDFYSIHVTKESTHPVKPLAQIAGNRYASAPVGKALSDACMGTIASFLSKYQDIIIEHQKVVKGNQKRLESLRELAGKENLEYPSVTLPPQPHTKEGVDAYNEVIARVRMWVNLNLWQKLKLSRDDAKPLLRLKGFPSFPLVERQANEVDWWDMVCNVKKLINEKKEDGKVFWQNLAGYKRQEALRPYLSSEEDRKKGKKFARYQLGDLLLHLEKKHGEDWGKVYDEAWERIDKKVEGLSKHIKLEEERRSEDAQSKAALTDWLRAKASFVIEGLKEADKDEFCRCELKLQKWYGDLRGKPFAIEAENSILDISGFSKQYNCAFIWQKDGVKKLNLYLIINYFKGGKLRFKKIKPEAFEANRFYTVINKKSGEIVPMEVNFNFDDPNLIILPLAFGKRQGREFIWNDLLSLETGSLKLANGRVIEKTLYNRRTRQDEPALFVALTFERREVLDSSNIKPMNLIGVDRGENIPAVIALTDPEGCPLSRFKDSLGNPTHILRIGESYKEKQRTIQAKKEVEQRRAGGYSRKYASKAKNLADDMVRNTARDLLYYAVTQDAMLIFENLSRGFGRQGKRTFMAERQYTRMEDWLTAKLAYEGLPSQTYLSKTLAQYTSKTCSNCGFTITSADYDRVLEKLKKTATGWMTTINGKELKVEGQITYYNRYKRQNVVKDLSVELDRLSEESVNNDISSWTKGRSGEALSLLKKRFSHRPVQEKFVCLNCGFETHADEQAALNIARSWLFLRSQEYKKYQTNKTTGNTDKRAFVETWQSFYRKKLKEVWKPAV

SEQ ID NO: 41919 - protein, 978 aa, synthetic construct
  REGION 1..978: note = engineered CasX variant
QEIKRISKIRRRLVKDSNTKKAGKTGPMKTLLVRVMTPDLRERLENLRKKPENIPQPISNTSRANLNKLLTDYTEMKKAILHVYWEEFQKDPVGLMSRVAQPASKKIDQNKLKPEMDEKGNLTTAGFACSQCGQPLFVYKLEQVSEKGKAYTNYFGRCNVAEHEKLILLAQLKPEKDSDEAVTYSLGKFGQRALDFYSIHVTKESTHPVKPLAQIAGNRYASVPVGKALSDACMGTIASFLSKYQDIIIEHQKVVKGNQKRLESLRELAGKENLEYPSVTLPPQPHTKEGVDAYNEVIARVRMWVNLNLWQKLKLSRDDAKPLLRLKGFPSFPLVERQANEVDWWDMVCNVKKLINEKKEDGKVFWQNLAGYKRQEALRPYLSSEEDRKKGKKFARYQLGDLLLHLEKKHGEDWGKVYDEAWERIDKKVEGLSKHIKLEEERRSEDAQSKAALTDWLRAKASFVIEGLKEADKDEFCRCELKLQKWYGDLRGKPFAIEAENSILDISGFSKQYNCAFIWQKDGVKKLNLYLIINYFKGGKLRFKKIKPEAFEANRFYTVINKKSGEIVPMEVNFNFDDPNLIILPLAFGKRQGREFIWNDLLSLETGSLKLANGRVIEKTLYNRRTRQDEPALFVALTFERREVLDSSNIKPMNLIGVDRGENIPAVIALTDPEGCPLSRFKDSLGNPTHILRIGESYKEKQRTIQAKKEVEQRRAGGYSRKYASKAKNLADDMVRNTARDLLYYAVTQDAMLIFENLSRGFGRQGKRTFMAERQYTRMEDWLTAKLAYEGLPSQTYLSKTLAQYTSKTCSNCGFTITSADYDRVLEKLKKTATGWMTTINGKELKVEGQITYYNRYKRQNVVKDLSVELDRLSEESVNNDISSWTKGRSGEALSLLKKRFSHRPVQEKFVCLNCGFETHADEQAALNIARSWLFLRSQEYKKYQTNKTTGNTDKRAFVETWQSFYRKKLKEVWKPAV

SEQ ID NO: 41920 - protein, 978 aa, synthetic construct
  REGION 1..978: note = engineered CasX variant
QEIKRISKIRRRLVKDSNTKKAGKTGPMKTLLVRVMTPDLRERLENLRKKPENIPQPISNTSRANLNKLLTDYTEMKKAILHVYWEEFQKDPVGLMSRVAQPASKKIDQNKLKPEMDEKGNLTTAGFACSQCGQPLFVYKLEQVSEKGKAYTNYFGRCNVAEHEKLIKLAQLKPEKDSDEAVTYSLGKFGQRALDFYSIHVTKESTHPVKPLAQIAGNRYASGPVGKALSDACMGTIASFLSKYQDIIIEHQKVVKGNQKRLESLRELAGKENLEYPSVTLPPQPHTKEGVDAYNEVIARVRMWVNLNLWQKLKLSRDDAKPLLRLKGFPSFPLVERQANEVDWWDMVCNVKKLINEKKEDGKVFWQNLAGYKRQEALRPYLSSEEDRKKGKKFARYQLGDLLLHLEKKHGEDWGKVYDEAWERIDKKVEGLSKHIKLEEERRSEDAQSKAALTDWLRAKASFVIEGLKEADKDEFCRCELKLQKWYGDLRGKPFAIEAENSILDISGFSKQYNCAFIWQKDGVKKLNLYLIINYFKGGKLRFKKIKPEAFEANRFYTVINKKSGEIVPMEVNFNFDDPNLIILPLAFGKRQGREFIWNDLLSLETGSLKLANGRVIEKTLYNRRTRQDEPALFVALTFERREVLDSSNIKPMNLIGVDRGENIPAVIALTDPEGCPLSRFKDSLGNPTHILRIGESYKEKQRTIQAKKEVEQRRAGGYSRKYASKAKNLADDMVRNTARDLLYYAVTQDAMLIFENLSRGFGRQGKRTFMAERQYTRMEDWLTAKLAYEGLPSQTYLSKTLAQYTSKTCSNCGFTITSADYDRVLEKLKKTATGWMTTINGKELKVEGQITYYNRYKRQNVVKDLSVELDRLSEESVNNDISSWTKGRSGEALSLLKKRFSHRPVQEKFVCLNCGFETHADEQAALNIARSWLFLRSQEYKKYQTNKTTGNTDKRAFVETWQSFYRKKLKEVWKPAV

SEQ ID NO: 41921 - protein, 977 aa, synthetic construct
  REGION 1..977: note = engineered CasX variant
QEIKRISKIRRRLVKDSNTKKAGKTGPMKTLLVRVMTPDLRERLENLRKKPENIPQPISNTSRANLNKLLTDYTEMKKAILHVYWEEFQKDPVGLMSRVAQPASKKIDQNKLKPEMDEKGNLTTAGFACSQCGQPLFVYKLEQVSEKGKAYTNYFGRCNVAEHEKLILLAQLKPEKDSDEAVTYSLGKFGQRALDFYSIHVTKESTHPVKPLAQIAGNRYASPVGKALSDACMGTIASFLSKYQDIIIEHQKVVKGNQKRLESLRELAGKENLEYPSVTLPPQPHTKEGVDAYNEVIARVRMWVNLNLWQKLKLSRDDAKPLLRLKGFPSFPLVERQANEVDWWDMVCNVKKLINEKKEDGKVFWQNLAGYKRQEALRPYLSSEEDRKKGKKFARYQLGDLLLHLEKKHGEDWGKVYDEAWERIDKKVEGLSKHIKLEEERRSEDAQSKAALTDWLRAKASFVIEGLKEADKDEFCRCELKLQKWYGDLRGKPFAIEAENSILDISGFSKQYNCAFIWQKDGVKKLNLYLIINYFKGGKLRFKKIKPEAFEANRFYTVINKKSGEIVPMEVNFNFDDPNLIILPLAFGKRQGREFIWNDLLSLETGSLKLANGRVIEKTLYNRRTRQDEPALFVALTFERREVLDSSNIKPMNLIGVDRGENIPAVIALTDPEGCPLSRFKDSLGNPTHILRIGESYKEKQRTIQAKKEVEQRRAGGYSRKYASKAKNLADDMVRNTARDLLYYAVTQDAMLIFENLSRGFGRQGKRTFMAERQYTRMEDWLTAKLAYEGLPSQTYLSKTLAQYTSKTCSNCGFTITSADYDRVLEKLKKTATGWMTTINGKELKVEGQITYYNRYKRQNVVKDLSVELDRLSEESVNNDISSWTKGRSGEALSLLKKRFSHRPVQEKFVCLNCGFETHADEQAALNIARSWLFLRSQEYKKYQTNKTTGNTDKRAFVETWQSFYRKKLKEVWKPAV

SEQ ID NO: 41922 - protein, 978 aa, synthetic construct
  REGION 1..978: note = engineered CasX variant
QEIKRISKIRRRLVKDSNTKKAGKTGPMKTLLVRVMTPDLRERLENLRKKPENIPQPISNTSRANLNKLLTDYTEMKKAILHVYWEEFQKDPVGLMSRVAQPASKKIDQNKLKPEMDEKGNLTTAGFACSQCGQPLFVYKLEQVSEKGKAYTNYFGRCNVAEHEKLILLAQLKPEKDSDEAVTYSLGKFGQRALDFYSIHVTKESTHPVKPLAQIAGNRYASYPVGKALSDACMGTIASFLSKYQDIIIEHQKVVKGNQKRLESLRELAGKENLEYPSVTLPPQPHTKEGVDAYNEVIARVRMWVNLNLWQKLKLSRDDAKPLLRLKGFPSFPLVERQANEVDWWDMVCNVKKLINEKKEDGKVFWQNLAGYKRQEALRPYLSSEEDRKKGKKFARYQLGDLLLHLEKKHGEDWGKVYDEAWERIDKKVEGLSKHIKLEEERRSEDAQSKAALTDWLRAKASFVIEGLKEADKDEFCRCELKLQKWYGDLRGKPFAIEAENSILDISGFSKQYNCAFIWQKDGVKKLNLYLIINYFKGGKLRFKKIKPEAFEANRFYTVINKKSGEIVPMEVNFNFDDPNLIILPLAFGKRQGREFIWNDLLSLETGSLKLANGRVIEKTLYNRRTRQDEPALFVALTFERREVLDSSNIKPMNLIGVDRGENIPAVIALTDPEGCPLSRFKDSLGNPTHILRIGESYKEKQRTIQAKKEVEQRRAGGYSRKYASKAKNLADDMVRNTARDLLYYAVTQDAMLIFENLSRGFGRQGKRTFMAERQYTRMEDWLTAKLAYNGLPSKTYLSKTLAQYTSKTCSNCGFTITSADYDRVLEKLKKTATGWMTTINGKELKVEGQITYYNRYKRQNVVKDLSVELDRLSEESVNNDISSWTKGRSGEALSLLKKRFSHRPVQEKFVCLNCGFETHADEQAALNIARSWLFLRSQEYKKYQTNKTTGNTDKRAFVETWQSFYRKKLKEVWKPAV

SEQ ID NO: 41923 - protein, 978 aa, synthetic construct
  REGION 1..978: note = engineered CasX variant
QEIKRISKIRRRLVKDSNTKKAGKTGPMKTLLVRVMTPDLRERLENLRKKPENIPQPISNTSRANLNKLLTDYTEMKKAILHVYWEEFQKDPVGLMSRVAQPASKKIDQNKLKPEMDEKGNLTTAGFACSQCGQPLFVYKLEQVSEKGKAYTNYFGRCNVAEHEKLILLAQLKPEKDSDEAVTYSLGKFGQRALDFYSIHVTKESTHPVKPLAQIAGNRYASHPVGKALSDACMGTIASFLSKYQDIIIEHQKVVKGNQKRLESLRELAGKENLEYPSVTLPPQPHTKEGVDAYNEVIARVRMWVNLNLWQKLKLSRDDAKPLLRLKGFPSFPLVERQANEVDWWDMVCNVKKLINEKKEDGKVFWQNLAGYKRQEALRPYLSSEEDRKKGKKFARYQLGDLLLHLEKKHGEDWGKVYDEAWERIDKKVEGLSKHIKLEEERRSEDAQSKAALTDWLRAKASFVIEGLKEADKDEFCRCELKLQKWYGDLRGKPFAIEAENSILDISGFSKQYNCAFIWQKDGVKKLNLYLIINYFKGGKLRFKKIKPEAFEANRFYTVINKKSGEIVPMEVNFNFDDPNLIILPLAFGKRQGREFIWNDLLSLETGSLKLANGRVIEKTLYNRRTRQDEPALFVALTFERREVLDSSNIKPMNLIGVDRGENIPAVIALTDPEGCPLSRFKDSLGNPTHILRIGESYKEKQRTIQAKKEVEQRRAGGYSRKYASKAKNLADDMVRNTARDLLYYAVTQDAMLIFENLSRGFGRQGKRTFMAERQYTRMEDWLTAKLAYNGLPSKTYLSKTLAQYTSKTCSNCGFTITSADYDRVLEKLKKTATGWMTTINGKELKVEGQITYYNRYKRQNVVKDLSVELDRLSEESVNNDISSWTKGRSGEALSLLKKRFSHRPVQEKFVCLNCGFETHADEQAALNIARSWLFLRSQEYKKYQTNKTTGNTDKRAFVETWQSFYRKKLKEVWKPAV

SEQ ID NO: 41924 - protein, 978 aa, synthetic construct
  REGION 1..978: note = engineered CasX variant
QEIKRISKIRRRLVKDSNTKKAGKTGPMKTLLVRVMTPDLRERLENLRKKPENIPQPISNTSRANLNKLLTDYTEMKKAILHVYWEEFQKDPVGLMSRVAQPASKKIDQNKLKPEMDEKGNLTTAGFACSQCGQPLFVYKLEQVSEKGKAYTNYFGRCNVAEHEKLILLAQLKPEKDSDEAVTYSLGKFGQRALDFYSIHVTKESTHPVKPLAQIAGNRYASSPVGKALSDACMGTIASFLSKYQDIIIEHQKVVKGNQKRLESLRELAGKENLEYPSVTLPPQPHTKEGVDAYNEVIARVRMWVNLNLWQKLKLSRDDAKPLLRLKGFPSFPLVERQANEVDWWDMVCNVKKLINEKKEDGKVFWQNLAGYKRQEALRPYLSSEEDRKKGKKFARYQLGDLLLHLEKKHGEDWGKVYDEAWERIDKKVEGLSKHIKLEEERRSEDAQSKAALTDWLRAKASFVIEGLKEADKDEFCRCELKLQKWYGDLRGKPFAIEAENSILDISGFSKQYNCAFIWQKDGVKKLNLYLIINYFKGGKLRFKKIKPEAFEANRFYTVINKKSGEIVPMEVNFNFDDPNLIILPLAFGKRQGREFIWNDLLSLETGSLKLANGRVIEKTLYNRRTRQDEPALFVALTFERREVLDSSNIKPMNLIGVDRGENIPAVIALTDPEGCPLSRFKDSLGNPTHILRIGESYKEKQRTIQAKKEVEQRRAGGYSRKYASKAKNLADDMVRNTARDLLYYAVTQDAMLIFENLSRGFGRQGKRTFMAERQYTRMEDWLTAKLAYNGLPSKTYLSKTLAQYTSKTCSNCGFTITSADYDRVLEKLKKTATGWMTTINGKELKVEGQITYYNRYKRQNVVKDLSVELDRLSEESVNNDISSWTKGRSGEALSLLKKRFSHRPVQEKFVCLNCGFETHADEQAALNIARSWLFLRSQEYKKYQTNKTTGNTDKRAFVETWQSFYRKKLKEVWKPAV

SEQ ID NO: 41925 - protein, 978 aa, synthetic construct
  REGION 1..978: note = engineered CasX variant
QEIKRISKIRRRLVKDSNTKKAGKTGPMKTLLVRVMTPDLRERLENLRKKPENIPQPISNTSRANLNKLLTDYTEMKKAILHVYWEEFQKDPVGLMSRVAQPASKKIDQNKLKPEMDEKGNLTTAGFACSQCGQPLFVYKLEQVSEKGKAYTNYFGRCNVAEHEKLILLAQLKPEKDSDEAVTYSLGKFGQRALDFYSIHVTKESTHPVKPLAQIAGNRYASTPVGKALSDACMGTIASFLSKYQDIIIEHQKVVKGNQKRLESLRELAGKENLEYPSVTLPPQPHTKEGVDAYNEVIARVRMWVNLNLWQKLKLSRDDAKPLLRLKGFPSFPLVERQANEVDWWDMVCNVKKLINEKKEDGKVFWQNLAGYKRQEALRPYLSSEEDRKKGKKFARYQLGDLLLHLEKKHGEDWGKVYDEAWERIDKKVEGLSKHIKLEEERRSEDAQSKAALTDWLRAKASFVIEGLKEADKDEFCRCELKLQKWYGDLRGKPFAIEAENSILDISGFSKQYNCAFIWQKDGVKKLNLYLIINYFKGGKLRFKKIKPEAFEANRFYTVINKKSGEIVPMEVNFNFDDPNLIILPLAFGKRQGREFIWNDLLSLETGSLKLANGRVIEKTLYNRRTRQDEPALFVALTFERREVLDSSNIKPMNLIGVDRGENIPAVIALTDPEGCPLSRFKDSLGNPTHILRIGESYKEKQRTIQAKKEVEQRRAGGYSRKYASKAKNLADDMVRNTARDLLYYAVTQDAMLIFENLSRGFGRQGKRTFMAERQYTRMEDWLTAKLAYNGLPSKTYLSKTLAQYTSKTCSNCGFTITSADYDRVLEKLKKTATGWMTTINGKELKVEGQITYYNRYKRQNVVKDLSVELDRLSEESVNNDISSWTKGRSGEALSLLKKRFSHRPVQEKFVCLNCGFETHADEQAALNIARSWLFLRSQEYKKYQTNKTTGNTDKRAFVETWQSFYRKKLKEVWKPAV

SEQ ID NO: 41926 - protein, 978 aa, synthetic construct
  REGION 1..978: note = engineered CasX variant
QEIKRISKIRRRLVKDSNTKKAGKTGPMKTLLVRVMTPDLRERLENLRKKPENIPQPISNTSRANLNKLLTDYTEMKKAILHVYWEEFQKDPVGLMSRVAQPASKKIDQNKLKPEMDEKGNLTTAGFACSQCGQPLFVYKLEQVSEKGKAYTNYFGRCNVAEHEKLILLAQLKPEKDSDEAVTYSLGKFGQRALDFYSIHVTKESTHPVKPLAQIAGNRYASAPVGKALSDACMGTIASFLSKYQDIIIEHQKVVKGNQKRLESLRELAGKENLEYPSVTLPPQPHTKEGVDAYNEVIARVRMWVNLNLWQKLKLSRDDAKPLLRLKGFPSFPLVERQANEVDWWDMVCNVKKLINEKKEDGKVFWQNLAGYKRQEALRPYLSSEEDRKKGKKFARYQLGDLLLHLEKKHGEDWGKVYDEAWERIDKKVEGLSKHIKLEEERRSEDAQSKAALTDWLRAKASFVIEGLKEADKDEFCRCELKLQKWYGDLRGKPFAIEAENSILDISGFSKQYNCAFIWQKDGVKKLNLYLIINYFKGGKLRFKKIKPEAFEANRFYTVINKKSGEIVPMEVNFNFDDPNLIILPLAFGKRQGREFIWNDLLSLETGSLKLANGRVIEKTLYNRRTRQDEPALFVALTFERREVLDSSNIKPMNLIGVDRGENIPAVIALTDPEGCPLSRFKDSLGNPTHILRIGESYKEKQRTIQAKKEVEQRRAGGYSRKYASKAKNLADDMVRNTARDLLYYAVTQDAMLIFENLSRGFGRQGKRTFMAERQYTRMEDWLTAKLAYNGLPSKTYLSKTLAQYTSKTCSNCGFTITSADYDRVLEKLKKTATGWMTTINGKELKVEGQITYYNRYKRQNVVKDLSVELDRLSEESVNNDISSWTKGRSGEALSLLKKRFSHRPVQEKFVCLNCGFETHADEQAALNIARSWLFLRSQEYKKYQTNKTTGNTDKRAFVETWQSFYRKKLKEVWKPAV

SEQ ID NO: 41927 - protein, 978 aa, synthetic construct
  REGION 1..978: note = engineered CasX variant
QEIKRISKIRRRLVKDSNTKKAGKTGPMKTLLVRVMTPDLRERLENLRKKPENIPQPISNTSRANLNKLLTDYTEMKKAILHVYWEEFQKDPVGLMSRVAQPASKKIDQNKLKPEMDEKGNLTTAGFACSQCGQPLFVYKLEQVSEKGKAYTNYFGRCNVAEHEKLILLAQLKPEKDSDEAVTYSLGKFGQRALDFYSIHVTKESTHPVKPLAQIAGNRYASVPVGKALSDACMGTIASFLSKYQDIIIEHQKVVKGNQKRLESLRELAGKENLEYPSVTLPPQPHTKEGVDAYNEVIARVRMWVNLNLWQKLKLSRDDAKPLLRLKGFPSFPLVERQANEVDWWDMVCNVKKLINEKKEDGKVFWQNLAGYKRQEALRPYLSSEEDRKKGKKFARYQLGDLLLHLEKKHGEDWGKVYDEAWERIDKKVEGLSKHIKLEEERRSEDAQSKAALTDWLRAKASFVIEGLKEADKDEFCRCELKLQKWYGDLRGKPFAIEAENSILDISGFSKQYNCAFIWQKDGVKKLNLYLIINYFKGGKLRFKKIKPEAFEANRFYTVINKKSGEIVPMEVNFNFDDPNLIILPLAFGKRQGREFIWNDLLSLETGSLKLANGRVIEKTLYNRRTRQDEPALFVALTFERREVLDSSNIKPMNLIGVDRGENIPAVIALTDPEGCPLSRFKDSLGNPTHILRIGESYKEKQRTIQAKKEVEQRRAGGYSRKYASKAKNLADDMVRNTARDLLYYAVTQDAMLIFENLSRGFGRQGKRTFMAERQYTRMEDWLTAKLAYNGLPSKTYLSKTLAQYTSKTCSNCGFTITSADYDRVLEKLKKTATGWMTTINGKELKVEGQITYYNRYKRQNVVKDLSVELDRLSEESVNNDISSWTKGRSGEALSLLKKRFSHRPVQEKFVCLNCGFETHADEQAALNIARSWLFLRSQEYKKYQTNKTTGNTDKRAFVETWQSFYRKKLKEVWKPAV

SEQ ID NO: 41928 - protein, 978 aa, synthetic construct
  REGION 1..978: note = engineered CasX variant
QEIKRISKIRRRLVKDSNTKKAGKTGPMKTLLVRVMTPDLRERLENLRKKPENIPQPISNTSRANLNKLLTDYTEMKKAILHVYWEEFQKDPVGLMSRVAQPASKKIDQNKLKPEMDEKGNLTTAGFACSQCGQPLFVYKLEQVSEKGKAYTNYFGRCNVAEHEKLIKLAQLKPEKDSDEAVTYSLGKFGQRALDFYSIHVTKESTHPVKPLAQIAGNRYASGPVGKALSDACMGTIASFLSKYQDIIIEHQKVVKGNQKRLESLRELAGKENLEYPSVTLPPQPHTKEGVDAYNEVIARVRMWVNLNLWQKLKLSRDDAKPLLRLKGFPSFPLVERQANEVDWWDMVCNVKKLINEKKEDGKVFWQNLAGYKRQEALRPYLSSEEDRKKGKKFARYQLGDLLLHLEKKHGEDWGKVYDEAWERIDKKVEGLSKHIKLEEERRSEDAQSKAALTDWLRAKASFVIEGLKEADKDEFCRCELKLQKWYGDLRGKPFAIEAENSILDISGFSKQYNCAFIWQKDGVKKLNLYLIINYFKGGKLRFKKIKPEAFEANRFYTVINKKSGEIVPMEVNFNFDDPNLIILPLAFGKRQGREFIWNDLLSLETGSLKLANGRVIEKTLYNRRTRQDEPALFVALTFERREVLDSSNIKPMNLIGVDRGENIPAVIALTDPEGCPLSRFKDSLGNPTHILRIGESYKEKQRTIQAKKEVEQRRAGGYSRKYASKAKNLADDMVRNTARDLLYYAVTQDAMLIFENLSRGFGRQGKRTFMAERQYTRMEDWLTAKLAYNGLPSKTYLSKTLAQYTSKTCSNCGFTITSADYDRVLEKLKKTATGWMTTINGKELKVEGQITYYNRYKRQNVVKDLSVELDRLSEESVNNDISSWTKGRSGEALSLLKKRFSHRPVQEKFVCLNCGFETHADEQAALNIARSWLFLRSQEYKKYQTNKTTGNTDKRAFVETWQSFYRKKLKEVWKPAV

SEQ ID NO: 41929 - protein, 977 aa, synthetic construct
  REGION 1..977: note = engineered CasX variant
QEIKRISKIRRRLVKDSNTKKAGKTGPMKTLLVRVMTPDLRERLENLRKKPENIPQPISNTSRANLNKLLTDYTEMKKAILHVYWEEFQKDPVGLMSRVAQPASKKIDQNKLKPEMDEKGNLTTAGFACSQCGQPLFVYKLEQVSEKGKAYTNYFGRCNVAEHEKLILLAQLKPEKDSDEAVTYSLGKFGQRALDFYSIHVTKESTHPVKPLAQIAGNRYASPVGKALSDACMGTIASFLSKYQDIIIEHQKVVKGNQKRLESLRELAGKENLEYPSVTLPPQPHTKEGVDAYNEVIARVRMWVNLNLWQKLKLSRDDAKPLLRLKGFPSFPLVERQANEVDWWDMVCNVKKLINEKKEDGKVFWQNLAGYKRQEALRPYLSSEEDRKKGKKFARYQLGDLLLHLEKKHGEDWGKVYDEAWERIDKKVEGLSKHIKLEEERRSEDAQSKAALTDWLRAKASFVIEGLKEADKDEFCRCELKLQKWYGDLRGKPFAIEAENSILDISGFSKQYNCAFIWQKDGVKKLNLYLIINYFKGGKLRFKKIKPEAFEANRFYTVINKKSGEIVPMEVNFNFDDPNLIILPLAFGKRQGREFIWNDLLSLETGSLKLANGRVIEKTLYNRRTRQDEPALFVALTFERREVLDSSNIKPMNLIGVDRGENIPAVIALTDPEGCPLSRFKDSLGNPTHILRIGESYKEKQRTIQAKKEVEQRRAGGYSRKYASKAKNLADDMVRNTARDLLYYAVTQDAMLIFENLSRGFGRQGKRTFMAERQYTRMEDWLTAKLAYNGLPSKTYLSKTLAQYTSKTCSNCGFTITSADYDRVLEKLKKTATGWMTTINGKELKVEGQITYYNRYKRQNVVKDLSVELDRLSEESVNNDISSWTKGRSGEALSLLKKRFSHRPVQEKFVCLNCGFETHADEQAALNIARSWLFLRSQEYKKYQTNKTTGNTDKRAFVETWQSFYRKKLKEVWKPAV

SEQ ID NO: 41930 - protein, 978 aa, synthetic construct
  REGION 1..978: note = engineered CasX variant
QEIKRISKIRRRLVKDSNTKKAGKTGPMKTLLVRVMTPDLRERLENLRKKPENIPQPISNTSRANLNKLLTDYTEMKKAILHVYWEEFQKDPVGLMSRVAQPASKKIDQNKLKPEMDEKGNLTTAGFACSQCGQPLFVYKLEQVSEKGKAYTNYFGRCNVAEHEKLIQLAQLKPEKDSDEAVTYSLGKFGQRALDFYSIHVTKESTHPVKPLAQIAGNRYASYPVGKALSDACMGTIASFLSKYQDIIIEHQKVVKGNQKRLESLRELAGKENLEYPSVTLPPQPHTKEGVDAYNEVIARVRMWVNLNLWQKLKLSRDDAKPLLRLKGFPSFPLVERQANEVDWWDMVCNVKKLINEKKEDGKVFWQNLAGYKRQEALRPYLSSEEDRKKGKKFARYQLGDLLLHLEKKHGEDWGKVYDEAWERIDKKVEGLSKHIKLEEERRSEDAQSKAALTDWLRAKASFVIEGLKEADKDEFCRCELKLQKWYGDLRGKPFAIEAENSILDISGFSKQYNCAFIWQKDGVKKLNLYLIINYFKGGKLRFKKIKPEAFEANRFYTVINKKSGEIVPMEVNFNFDDPNLIILPLAFGKRQGREFIWNDLLSLETGSLKLANGRVIEKTLYNRRTRQDEPALFVALTFERREVLDSSNIKPMNLIGVDRGENIPAVIALTDPEGCPLSRFKDSLGNPTHILRIGESYKEKQRTIQAKKEVEQRRAGGYSRKYASKAKNLADDMVRNTARDLLYYAVTQDAMLIFENLSRGFGRQGKRTFMAERQYTRMEDWLTAKLAYEGLPSKTYLSKTLAQYTSKTCSNCGFTITSADYDRVLEKLKKTATGWMTTINGKELKVEGQITYYNRYKRQNVVKDLSVELDRLSEESVNNDISSWTKGRSGEALSLLKKRFSHRPVQEKFVCLNCGFETHADEQAALNIARSWLFLRSQEYKKYQTNKTTGNTDKRAFVETWQSFYRKKLKEVWKPAV

SEQ ID NO: 41931 - protein, 978 aa, synthetic construct
  REGION 1..978: note = engineered CasX variant
QEIKRISKIRRRLVKDSNTKKAGKTGPMKTLLVRVMTPDLRERLENLRKKPENIPQPISNTSRANLNKLLTDYTEMKKAILHVYWEEFQKDPVGLMSRVAQPASKKIDQNKLKPEMDEKGNLTTAGFACSQCGQPLFVYKLEQVSEKGKAYTNYFGRCNVAEHEKLIQLAQLKPEKDSDEAVTYSLGKFGQRALDFYSIHVTKESTHPVKPLAQIAGNRYASHPVGKALSDACMGTIASFLSKYQDIIIEHQKVVKGNQKRLESLRELAGKENLEYPSVTLPPQPHTKEGVDAYNEVIARVRMWVNLNLWQKLKLSRDDAKPLLRLKGFPSFPLVERQANEVDWWDMVCNVKKLINEKKEDGKVFWQNLAGYKRQEALRPYLSSEEDRKKGKKFARYQLGDLLLHLEKKHGEDWGKVYDEAWERIDKKVEGLSKHIKLEEERRSEDAQSKAALTDWLRAKASFVIEGLKEADKDEFCRCELKLQKWYGDLRGKPFAIEAENSILDISGFSKQYNCAFIWQKDGVKKLNLYLIINYFKGGKLRFKKIKPEAFEANRFYTVINKKSGEIVPMEVNFNFDDPNLIILPLAFGKRQGREFIWNDLLSLETGSLKLANGRVIEKTLYNRRTRQDEPALFVALTFERREVLDSSNIKPMNLIGVDRGENIPAVIALTDPEGCPLSRFKDSLGNPTHILRIGESYKEKQRTIQAKKEVEQRRAGGYSRKYASKAKNLADDMVRNTARDLLYYAVTQDAMLIFENLSRGFGRQGKRTFMAERQYTRMEDWLTAKLAYEGLPSKTYLSKTLAQYTSKTCSNCGFTITSADYDRVLEKLKKTATGWMTTINGKELKVEGQITYYNRYKRQNVVKDLSVELDRLSEESVNNDISSWTKGRSGEALSLLKKRFSHRPVQEKFVCLNCGFETHADEQAALNIARSWLFLRSQEYKKYQTNKTTGNTDKRAFVETWQSFYRKKLKEVWKPAV

SEQ ID NO: 41932 - protein, 978 aa, synthetic construct
  REGION 1..978: note = engineered CasX variant
QEIKRISKIRRRLVKDSNTKKAGKTGPMKTLLVRVMTPDLRERLENLRKKPENIPQPISNTSRANLNKLLTDYTEMKKAILHVYWEEFQKDPVGLMSRVAQPASKKIDQNKLKPEMDEKGNLTTAGFACSQCGQPLFVYKLEQVSEKGKAYTNYFGRCNVAEHEKLIQLAQLKPEKDSDEAVTYSLGKFGQRALDFYSIHVTKESTHPVKPLAQIAGNRYASSPVGKALSDACMGTIASFLSKYQDIIIEHQKVVKGNQKRLESLRELAGKENLEYPSVTLPPQPHTKEGVDAYNEVIARVRMWVNLNLWQKLKLSRDDAKPLLRLKGFPSFPLVERQANEVDWWDMVCNVKKLINEKKEDGKVFWQNLAGYKRQEALRPYLSSEEDRKKGKKFARYQLGDLLLHLEKKHGEDWGKVYDEAWERIDKKVEGLSKHIKLEEERRSEDAQSKAALTDWLRAKASFVIEGLKEADKDEFCRCELKLQKWYGDLRGKPFAIEAENSILDISGFSKQYNCAFIWQKDGVKKLNLYLIINYFKGGKLRFKKIKPEAFEANRFYTVINKKSGEIVPMEVNFNFDDPNLIILPLAFGKRQGREFIWNDLLSLETGSLKLANGRVIEKTLYNRRTRQDEPALFVALTFERREVLDSSNIKPMNLIGVDRGENIPAVIALTDPEGCPLSRFKDSLGNPTHILRIGESYKEKQRTIQAKKEVEQRRAGGYSRKYASKAKNLADDMVRNTARDLLYYAVTQDAMLIFENLSRGFGRQGKRTFMAERQYTRMEDWLTAKLAYEGLPSKTYLSKTLAQYTSKTCSNCGFTITSADYDRVLEKLKKTATGWMTTINGKELKVEGQITYYNRYKRQNVVKDLSVELDRLSEESVNNDISSWTKGRSGEALSLLKKRFSHRPVQEKFVCLNCGFETHADEQAALNIARSWLFLRSQEYKKYQTNKTTGNTDKRAFVETWQSFYRKKLKEVWKPAV

SEQ ID NO: 41933 - protein, 978 aa, synthetic construct
  REGION 1..978: note = engineered CasX variant
QEIKRISKIRRRLVKDSNTKKAGKTGPMKTLLVRVMTPDLRERLENLRKKPENIPQPISNTSRANLNKLLTDYTEMKKAILHVYWEEFQKDPVGLMSRVAQPASKKIDQNKLKPEMDEKGNLTTAGFACSQCGQPLFVYKLEQVSEKGKAYTNYFGRCNVAEHEKLIQLAQLKPEKDSDEAVTYSLGKFGQRALDFYSIHVTKESTHPVKPLAQIAGNRYASTPVGKALSDACMGTIASFLSKYQDIIIEHQKVVKGNQKRLESLRELAGKENLEYPSVTLPPQPHTKEGVDAYNEVIARVRMWVNLNLWQKLKLSRDDAKPLLRLKGFPSFPLVERQANEVDWWDMVCNVKKLINEKKEDGKVFWQNLAGYKRQEALRPYLSSEEDRKKGKKFARYQLGDLLLHLEKKHGEDWGKVYDEAWERIDKKVEGLSKHIKLEEERRSEDAQSKAALTDWLRAKASFVIEGLKEADKDEFCRCELKLQKWYGDLRGKPFAIEAENSILDISGFSKQYNCAFIWQKDGVKKLNLYLIINYFKGGKLRFKKIKPEAFEANRFYTVINKKSGEIVPMEVNFNFDDPNLIILPLAFGKRQGREFIWNDLLSLETGSLKLANGRVIEKTLYNRRTRQDEPALFVALTFERREVLDSSNIKPMNLIGVDRGENIPAVIALTDPEGCPLSRFKDSLGNPTHILRIGESYKEKQRTIQAKKEVEQRRAGGYSRKYASKAKNLADDMVRNTARDLLYYAVTQDAMLIFENLSRGFGRQGKRTFMAERQYTRMEDWLTAKLAYEGLPSKTYLSKTLAQYTSKTCSNCGFTITSADYDRVLEKLKKTATGWMTTINGKELKVEGQITYYNRYKRQNVVKDLSVELDRLSEESVNNDISSWTKGRSGEALSLLKKRFSHRPVQEKFVCLNCGFETHADEQAALNIARSWLFLRSQEYKKYQTNKTTGNTDKRAFVETWQSFYRKKLKEVWKPAV

SEQ ID NO: 41934 - protein, 978 aa, synthetic construct
  REGION 1..978: note = engineered CasX variant
QEIKRISKIRRRLVKDSNTKKAGKTGPMKTLLVRVMTPDLRERLENLRKKPENIPQPISNTSRANLNKLLTDYTEMKKAILHVYWEEFQKDPVGLMSRVAQPASKKIDQNKLKPEMDEKGNLTTAGFACSQCGQPLFVYKLEQVSEKGKAYTNYFGRCNVAEHEKLIQLAQLKPEKDSDEAVTYSLGKFGQRALDFYSIHVTKESTHPVKPLAQIAGNRYASAPVGKALSDACMGTIASFLSKYQDIIIEHQKVVKGNQKRLESLRELAGKENLEYPSVTLPPQPHTKEGVDAYNEVIARVRMWVNLNLWQKLKLSRDDAKPLLRLKGFPSFPLVERQANEVDWWDMVCNVKKLINEKKEDGKVFWQNLAGYKRQEALRPYLSSEEDRKKGKKFARYQLGDLLLHLEKKHGEDWGKVYDEAWERIDKKVEGLSKHIKLEEERRSEDAQSKAALTDWLRAKASFVIEGLKEADKDEFCRCELKLQKWYGDLRGKPFAIEAENSILDISGFSKQYNCAFIWQKDGVKKLNLYLIINYFKGGKLRFKKIKPEAFEANRFYTVINKKSGEIVPMEVNFNFDDPNLIILPLAFGKRQGREFIWNDLLSLETGSLKLANGRVIEKTLYNRRTRQDEPALFVALTFERREVLDSSNIKPMNLIGVDRGENIPAVIALTDPEGCPLSRFKDSLGNPTHILRIGESYKEKQRTIQAKKEVEQRRAGGYSRKYASKAKNLADDMVRNTARDLLYYAVTQDAMLIFENLSRGFGRQGKRTFMAERQYTRMEDWLTAKLAYEGLPSKTYLSKTLAQYTSKTCSNCGFTITSADYDRVLEKLKKTATGWMTTINGKELKVEGQITYYNRYKRQNVVKDLSVELDRLSEESVNNDISSWTKGRSGEALSLLKKRFSHRPVQEKFVCLNCGFETHADEQAALNIARSWLFLRSQEYKKYQTNKTTGNTDKRAFVETWQSFYRKKLKEVWKPAV

SEQ ID NO: 41935 - protein, 978 aa, synthetic construct
  REGION 1..978: note = engineered CasX variant
QEIKRISKIRRRLVKDSNTKKAGKTGPMKTLLVRVMTPDLRERLENLRKKPENIPQPISNTSRANLNKLLTDYTEMKKAILHVYWEEFQKDPVGLMSRVAQPASKKIDQNKLKPEMDEKGNLTTAGFACSQCGQPLFVYKLEQVSEKGKAYTNYFGRCNVAEHEKLIQLAQLKPEKDSDEAVTYSLGKFGQRALDFYSIHVTKESTHPVKPLAQIAGNRYASVPVGKALSDACMGTIASFLSKYQDIIIEHQKVVKGNQKRLESLRELAGKENLEYPSVTLPPQPHTKEGVDAYNEVIARVRMWVNLNLWQKLKLSRDDAKPLLRLKGFPSFPLVERQANEVDWWDMVCNVKKLINEKKEDGKVFWQNLAGYKRQEALRPYLSSEEDRKKGKKFARYQLGDLLLHLEKKHGEDWGKVYDEAWERIDKKVEGLSKHIKLEEERRSEDAQSKAALTDWLRAKASFVIEGLKEADKDEFCRCELKLQKWYGDLRGKPFAIEAENSILDISGFSKQYNCAFIWQKDGVKKLNLYLIINYFKGGKLRFKKIKPEAFEANRFYTVINKKSGEIVPMEVNFNFDDPNLIILPLAFGKRQGREFIWNDLLSLETGSLKLANGRVIEKTLYNRRTRQDEPALFVALTFERREVLDSSNIKPMNLIGVDRGENIPAVIALTDPEGCPLSRFKDSLGNPTHILRIGESYKEKQRTIQAKKEVEQRRAGGYSRKYASKAKNLADDMVRNTARDLLYYAVTQDAMLIFENLSRGFGRQGKRTFMAERQYTRMEDWLTAKLAYEGLPSKTYLSKTLAQYTSKTCSNCGFTITSADYDRVLEKLKKTATGWMTTINGKELKVEGQITYYNRYKRQNVVKDLSVELDRLSEESVNNDISSWTKGRSGEALSLLKKRFSHRPVQEKFVCLNCGFETHADEQAALNIARSWLFLRSQEYKKYQTNKTTGNTDKRAFVETWQSFYRKKLKEVWKPAV

SEQ ID NO: 41936 - protein, 979 aa, synthetic construct
  REGION 1..979: note = engineered CasX variant
QEIKRISKIRRRLVKDSNTKKAGKTGPMKTLLVRVMTPDLRERLENLRKKPENIPQPISNTSRANLNKLLTDYTEMKKAILHVYWEEFQKDPVGLMSRVAQPASKKIDQNKLKPEMDEKGNLTTAGFACSQCGQPLFVYKLEQVSEKGKAYTNYFGRCNVAEHEKLIQKLAQLKPEKDSDEAVTYSLGKFGQRALDFYSIHVTKESTHPVKPLAQIAGNRYASGPVGKALSDACMGTIASFLSKYQDIIIEHQKVVKGNQKRLESLRELAGKENLEYPSVTLPPQPHTKEGVDAYNEVIARVRMWVNLNLWQKLKLSRDDAKPLLRLKGFPSFPLVERQANEVDWWDMVCNVKKLINEKKEDGKVFWQNLAGYKRQEALRPYLSSEEDRKKGKKFARYQLGDLLLHLEKKHGEDWGKVYDEAWERIDKKVEGLSKHIKLEEERRSEDAQSKAALTDWLRAKASFVIEGLKEADKDEFCRCELKLQKWYGDLRGKPFAIEAENSILDISGFSKQYNCAFIWQKDGVKKLNLYLIINYFKGGKLRFKKIKPEAFEANRFYTVINKKSGEIVPMEVNFNFDDPNLIILPLAFGKRQGREFIWNDLLSLETGSLKLANGRVIEKTLYNRRTRQDEPALFVALTFERREVLDSSNIKPMNLIGVDRGENIPAVIALTDPEGCPLSRFKDSLGNPTHILRIGESYKEKQRTIQAKKEVEQRRAGGYSRKYASKAKNLADDMVRNTARDLLYYAVTQDAMLIFENLSRGFGRQGKRTFMAERQYTRMEDWLTAKLAYEGLPSKTYLSKTLAQYTSKTCSNCGFTITSADYDRVLEKLKKTATGWMTTINGKELKVEGQITYYNRYKRQNVVKDLSVELDRLSEESVNNDISSWTKGRSGEALSLLKKRFSHRPVQEKFVCLNCGFETHADEQAALNIARSWLFLRSQEYKKYQTNKTTGNTDKRAFVETWQSFYRKKLKEVWKPAV

SEQ ID NO: 41937 - protein, 977 aa, synthetic construct
  REGION 1..977: note = engineered CasX variant
QEIKRISKIRRRLVKDSNTKKAGKTGPMKTLLVRVMTPDLRERLENLRKKPENIPQPISNTSRANLNKLLTDYTEMKKAILHVYWEEFQKDPVGLMSRVAQPASKKIDQNKLKPEMDEKGNLTTAGFACSQCGQPLFVYKLEQVSEKGKAYTNYFGRCNVAEHEKLIQLAQLKPEKDSDEAVTYSLGKFGQRALDFYSIHVTKESTHPVKPLAQIAGNRYASPVGKALSDACMGTIASFLSKYQDIIIEHQKVVKGNQKRLESLRELAGKENLEYPSVTLPPQPHTKEGVDAYNEVIARVRMWVNLNLWQKLKLSRDDAKPLLRLKGFPSFPLVERQANEVDWWDMVCNVKKLINEKKEDGKVFWQNLAGYKRQEALRPYLSSEEDRKKGKKFARYQLGDLLLHLEKKHGEDWGKVYDEAWERIDKKVEGLSKHIKLEEERRSEDAQSKAALTDWLRAKASFVIEGLKEADKDEFCRCELKLQKWYGDLRGKPFAIEAENSILDISGFSKQYNCAFIWQKDGVKKLNLYLIINYFKGGKLRFKKIKPEAFEANRFYTVINKKSGEIVPMEVNFNFDDPNLIILPLAFGKRQGREFIWNDLLSLETGSLKLANGRVIEKTLYNRRTRQDEPALFVALTFERREVLDSSNIKPMNLIGVDRGENIPAVIALTDPEGCPLSRFKDSLGNPTHILRIGESYKEKQRTIQAKKEVEQRRAGGYSRKYASKAKNLADDMVRNTARDLLYYAVTQDAMLIFENLSRGFGRQGKRTFMAERQYTRMEDWLTAKLAYEGLPSKTYLSKTLAQYTSKTCSNCGFTITSADYDRVLEKLKKTATGWMTTINGKELKVEGQITYYNRYKRQNVVKDLSVELDRLSEESVNNDISSWTKGRSGEALSLLKKRFSHRPVQEKFVCLNCGFETHADEQAALNIARSWLFLRSQEYKKYQTNKTTGNTDKRAFVETWQSFYRKKLKEVWKPAV

SEQ ID NO: 41938 - protein, 978 aa, synthetic construct
  REGION 1..978: note = engineered CasX variant
QEIKRISKIRRRLVKDSNTKKAGKTGPMKTLLVRVMTPDLRERLENLRKKPENIPQPISNTSRANLNKLLTDYTEMKKAILHVYWEEFQKDPVGLMSRVAQPASKKIDQNKLKPEMDEKGNLTTAGFACSQCGQPLFVYKLEQVSEKGKAYTNYFGRCNVAEHEKLILLAQLKPEKDSDEAVTYSLGKFGQRALDFYSIHVTKESTHPVKPLAQIAGNRYASYPVGKALSDACMGTIASFLSKYQDIIIEHQKVVKGNQKRLESLRELAGKENLEYPSVTLPPQPHTKEGVDAYNEVIARVRMWVNLNLWQKLKLSRDDAKPLLRLKGFPSFPLVERQANEVDWWDMVCNVKKLINEKKEDGKVFWQNLAIYKRQEALRPYLSSEEDRKKGKKFARYQLGDLLLHLEKKHGEDWGKVYDEAWERIDKKVEGLSKHIKLEEERRSEDAQSKAALTDWLRAKASFVIEGLKEADKDEFCRCELKLQKWYGDLRGKPFAIEAENSILDISGFSKQYNCAFIWQKDGVKKLNLYLIINYFKGGKLRFKKIKPEAFEANRFYTVINKKSGEIVPMEVNFNFDDPNLIILPLAFGKRQGREFIWNDLLSLETGSLKLANGRVIEKTLYNRRTRQDEPALFVALTFERREVLDSSNIKPMNLIGVDRGENIPAVIALTDPEGCPLSRFKDSLGNPTHILRIGESYKEKQRTIQAKKEVEQRRAGGYSRKYASKAKNLADDMVRNTARDLLYYAVTQDAMLIFENLSRGFGRQGKRTFMAERQYTRMEDWLTAKLAYEGLPSKTYLSKTLAQYTSKTCSNCGFTITSADYDRVLEKLKKTATGWMTTINGKELKVEGQITYYNRYKRQNVVKDLSVELDRLSEESVNNDISSWTKGRSGEALSLLKKRFSHRPVQEKFVCLNCGFETHADEQAALNIARSWLFLRSQEYKKYQTNKTTGNTDKRAFVETWQSFYRKKLKEVWKPAV

SEQ ID NO: 41939 - protein, 978 aa, synthetic construct
  REGION 1..978: note = engineered CasX variant
QEIKRISKIRRRLVKDSNTKKAGKTGPMKTLLVRVMTPDLRERLENLRKKPENIPQPISNTSRANLNKLLTDYTEMKKAILHVYWEEFQKDPVGLMSRVAQPASKKIDQNKLKPEMDEKGNLTTAGFACSQCGQPLFVYKLEQVSEKGKAYTNYFGRCNVAEHEKLILLAQLKPEKDSDEAVTYSLGKFGQRALDFYSIHVTKESTHPVKPLAQIAGNRYASHPVGKALSDACMGTIASFLSKYQDIIIEHQKVVKGNQKRLESLRELAGKENLEYPSVTLPPQPHTKEGVDAYNEVIARVRMWVNLNLWQKLKLSRDDAKPLLRLKGFPSFPLVERQANEVDWWDMVCNVKKLINEKKEDGKVFWQNLAIYKRQEALRPYLSSEEDRKKGKKFARYQLGDLLLHLEKKHGEDWGKVYDEAWERIDKKVEGLSKHIKLEEERRSEDAQSKAALTDWLRAKASFVIEGLKEADKDEFCRCELKLQKWYGDLRGKPFAIEAENSILDISGFSKQYNCAFIWQKDGVKKLNLYLIINYFKGGKLRFKKIKPEAFEANRFYTVINKKSGEIVPMEVNFNFDDPNLIILPLAFGKRQGREFIWNDLLSLETGSLKLANGRVIEKTLYNRRTRQDEPALFVALTFERREVLDSSNIKPMNLIGVDRGENIPAVIALTDPEGCPLSRFKDSLGNPTHILRIGESYKEKQRTIQAKKEVEQRRAGGYSRKYASKAKNLADDMVRNTARDLLYYAVTQDAMLIFENLSRGFGRQGKRTFMAERQYTRMEDWLTAKLAYEGLPSKTYLSKTLAQYTSKTCSNCGFTITSADYDRVLEKLKKTATGWMTTINGKELKVEGQITYYNRYKRQNVVKDLSVELDRLSEESVNNDISSWTKGRSGEALSLLKKRFSHRPVQEKFVCLNCGFETHADEQAALNIARSWLFLRSQEYKKYQTNKTTGNTDKRAFVETWQSFYRKKLKEVWKPAV

SEQ ID NO: 41940 - protein, 978 aa, synthetic construct
  REGION 1..978: note = engineered CasX variant
QEIKRISKIRRRLVKDSNTKKAGKTGPMKTLLVRVMTPDLRERLENLRKKPENIPQPISNTSRANLNKLLTDYTEMKKAILHVYWEEFQKDPVGLMSRVAQPASKKIDQNKLKPEMDEKGNLTTAGFACSQCGQPLFVYKLEQVSEKGKAYTNYFGRCNVAEHEKLILLAQLKPEKDSDEAVTYSLGKFGQRALDFYSIHVTKESTHPVKPLAQIAGNRYASSPVGKALSDACMGTIASFLSKYQDIIIEHQKVVKGNQKRLESLRELAGKENLEYPSVTLPPQPHTKEGVDAYNEVIARVRMWVNLNLWQKLKLSRDDAKPLLRLKGFPSFPLVERQANEVDWWDMVCNVKKLINEKKEDGKVFWQNLAIYKRQEALRPYLSSEEDRKKGKKFARYQLGDLLLHLEKKHGEDWGKVYDEAWERIDKKVEGLSKHIKLEEERRSEDAQSKAALTDWLRAKASFVIEGLKEADKDEFCRCELKLQKWYGDLRGKPFAIEAENSILDISGFSKQYNCAFIWQKDGVKKLNLYLIINYFKGGKLRFKKIKPEAFEANRFYTVINKKSGEIVPMEVNFNFDDPNLIILPLAFGKRQGREFIWNDLLSLETGSLKLANGRVIEKTLYNRRTRQDEPALFVALTFERREVLDSSNIKPMNLIGVDRGENIPAVIALTDPEGCPLSRFKDSLGNPTHILRIGESYKEKQRTIQAKKEVEQRRAGGYSRKYASKAKNLADDMVRNTARDLLYYAVTQDAMLIFENLSRGFGRQGKRTFMAERQYTRMEDWLTAKLAYEGLPSKTYLSKTLAQYTSKTCSNCGFTITSADYDRVLEKLKKTATGWMTTINGKELKVEGQITYYNRYKRQNVVKDLSVELDRLSEESVNNDISSWTKGRSGEALSLLKKRFSHRPVQEKFVCLNCGFETHADEQAALNIARSWLFLRSQEYKKYQTNKTTGNTDKRAFVETWQSFYRKKLKEVWKPAV

SEQ ID NO: 41941 - protein, 978 aa, synthetic construct
  REGION 1..978: note = engineered CasX variant
QEIKRISKIRRRLVKDSNTKKAGKTGPMKTLLVRVMTPDLRERLENLRKKPENIPQPISNTSRANLNKLLTDYTEMKKAILHVYWEEFQKDPVGLMSRVAQPASKKIDQNKLKPEMDEKGNLTTAGFACSQCGQPLFVYKLEQVSEKGKAYTNYFGRCNVAEHEKLILLAQLKPEKDSDEAVTYSLGKFGQRALDFYSIHVTKESTHPVKPLAQIAGNRYASTPVGKALSDACMGTIASFLSKYQDIIIEHQKVVKGNQKRLESLRELAGKENLEYPSVTLPPQPHTKEGVDAYNEVIARVRMWVNLNLWQKLKLSRDDAKPLLRLKGFPSFPLVERQANEVDWWDMVCNVKKLINEKKEDGKVFWQNLAIYKRQEALRPYLSSEEDRKKGKKFARYQLGDLLLHLEKKHGEDWGKVYDEAWERIDKKVEGLSKHIKLEEERRSEDAQSKAALTDWLRAKASFVIEGLKEADKDEFCRCELKLQKWYGDLRGKPFAIEAENSILDISGFSKQYNCAFIWQKDGVKKLNLYLIINYFKGGKLRFKKIKPEAFEANRFYTVINKKSGEIVPMEVNFNFDDPNLIILPLAFGKRQGREFIWNDLLSLETGSLKLANGRVIEKTLYNRRTRQDEPALFVALTFERREVLDSSNIKPMNLIGVDRGENIPAVIALTDPEGCPLSRFKDSLGNPTHILRIGESYKEKQRTIQAKKEVEQRRAGGYSRKYASKAKNLADDMVRNTARDLLYYAVTQDAMLIFENLSRGFGRQGKRTFMAERQYTRMEDWLTAKLAYEGLPSKTYLSKTLAQYTSKTCSNCGFTITSADYDRVLEKLKKTATGWMTTINGKELKVEGQITYYNRYKRQNVVKDLSVELDRLSEESVNNDISSWTKGRSGEALSLLKKRFSHRPVQEKFVCLNCGFETHADEQAALNIARSWLFLRSQEYKKYQTNKTTGNTDKRAFVETWQSFYRKKLKEVWKPAV

SEQ ID NO: 41942 - protein, 978 aa, synthetic construct
  REGION 1..978: note = engineered CasX variant
QEIKRISKIRRRLVKDSNTKKAGKTGPMKTLLVRVMTPDLRERLENLRKKPENIPQPISNTSRANLNKLLTDYTEMKKAILHVYWEEFQKDPVGLMSRVAQPASKKIDQNKLKPEMDEKGNLTTAGFACSQCGQPLFVYKLEQVSEKGKAYTNYFGRCNVAEHEKLILLAQLKPEKDSDEAVTYSLGKFGQRALDFYSIHVTKESTHPVKPLAQIAGNRYASAPVGKALSDACMGTIASFLSKYQDIIIEHQKVVKGNQKRLESLRELAGKENLEYPSVTLPPQPHTKEGVDAYNEVIARVRMWVNLNLWQKLKLSRDDAKPLLRLKGFPSFPLVERQANEVDWWDMVCNVKKLINEKKEDGKVFWQNLAIYKRQEALRPYLSSEEDRKKGKKFARYQLGDLLLHLEKKHGEDWGKVYDEAWERIDKKVEGLSKHIKLEEERRSEDAQSKAALTDWLRAKASFVIEGLKEADKDEFCRCELKLQKWYGDLRGKPFAIEAENSILDISGFSKQYNCAFIWQKDGVKKLNLYLIINYFKGGKLRFKKIKPEAFEANRFYTVINKKSGEIVPMEVNFNFDDPNLIILPLAFGKRQGREFIWNDLLSLETGSLKLANGRVIEKTLYNRRTRQDEPALFVALTFERREVLDSSNIKPMNLIGVDRGENIPAVIALTDPEGCPLSRFKDSLGNPTHILRIGESYKEKQRTIQAKKEVEQRRAGGYSRKYASKAKNLADDMVRNTARDLLYYAVTQDAMLIFENLSRGFGRQGKRTFMAERQYTRMEDWLTAKLAYEGLPSKTYLSKTLAQYTSKTCSNCGFTITSADYDRVLEKLKKTATGWMTTINGKELKVEGQITYYNRYKRQNVVKDLSVELDRLSEESVNNDISSWTKGRSGEALSLLKKRFSHRPVQEKFVCLNCGFETHADEQAALNIARSWLFLRSQEYKKYQTNKTTGNTDKRAFVETWQSFYRKKLKEVWKPAV

SEQ ID NO: 41943 - protein, 978 aa, synthetic construct
  REGION 1..978: note = engineered CasX variant
QEIKRISKIRRRLVKDSNTKKAGKTGPMKTLLVRVMTPDLRERLENLRKKPENIPQPISNTSRANLNKLLTDYTEMKKAILHVYWEEFQKDPVGLMSRVAQPASKKIDQNKLKPEMDEKGNLTTAGFACSQCGQPLFVYKLEQVSEKGKAYTNYFGRCNVAEHEKLILLAQLKPEKDSDEAVTYSLGKFGQRALDFYSIHVTKESTHPVKPLAQIAGNRYASVPVGKALSDACMGTIASFLSKYQDIIIEHQKVVKGNQKRLESLRELAGKENLEYPSVTLPPQPHTKEGVDAYNEVIARVRMWVNLNLWQKLKLSRDDAKPLLRLKGFPSFPLVERQANEVDWWDMVCNVKKLINEKKEDGKVFWQNLAIYKRQEALRPYLSSEEDRKKGKKFARYQLGDLLLHLEKKHGEDWGKVYDEAWERIDKKVEGLSKHIKLEEERRSEDAQSKAALTDWLRAKASFVIEGLKEADKDEFCRCELKLQKWYGDLRGKPFAIEAENSILDISGFSKQYNCAFIWQKDGVKKLNLYLIINYFKGGKLRFKKIKPEAFEANRFYTVINKKSGEIVPMEVNFNFDDPNLIILPLAFGKRQGREFIWNDLLSLETGSLKLANGRVIEKTLYNRRTRQDEPALFVALTFERREVLDSSNIKPMNLIGVDRGENIPAVIALTDPEGCPLSRFKDSLGNPTHILRIGESYKEKQRTIQAKKEVEQRRAGGYSRKYASKAKNLADDMVRNTARDLLYYAVTQDAMLIFENLSRGFGRQGKRTFMAERQYTRMEDWLTAKLAYEGLPSKTYLSKTLAQYTSKTCSNCGFTITSADYDRVLEKLKKTATGWMTTINGKELKVEGQITYYNRYKRQNVVKDLSVELDRLSEESVNNDISSWTKGRSGEALSLLKKRFSHRPVQEKFVCLNCGFETHADEQAALNIARSWLFLRSQEYKKYQTNKTTGNTDKRAFVETWQSFYRKKLKEVWKPAV

SEQ ID NO: 41944 - protein, 978 aa, synthetic construct
  REGION 1..978: note = engineered CasX variant
QEIKRISKIRRRLVKDSNTKKAGKTGPMKTLLVRVMTPDLRERLENLRKKPENIPQPISNTSRANLNKLLTDYTEMKKAILHVYWEEFQKDPVGLMSRVAQPASKKIDQNKLKPEMDEKGNLTTAGFACSQCGQPLFVYKLEQVSEKGKAYTNYFGRCNVAEHEKLIKLAQLKPEKDSDEAVTYSLGKFGQRALDFYSIHVTKESTHPVKPLAQIAGNRYASGPVGKALSDACMGTIASFLSKYQDIIIEHQKVVKGNQKRLESLRELAGKENLEYPSVTLPPQPHTKEGVDAYNEVIARVRMWVNLNLWQKLKLSRDDAKPLLRLKGFPSFPLVERQANEVDWWDMVCNVKKLINEKKEDGKVFWQNLAIYKRQEALRPYLSSEEDRKKGKKFARYQLGDLLLHLEKKHGEDWGKVYDEAWERIDKKVEGLSKHIKLEEERRSEDAQSKAALTDWLRAKASFVIEGLKEADKDEFCRCELKLQKWYGDLRGKPFAIEAENSILDISGFSKQYNCAFIWQKDGVKKLNLYLIINYFKGGKLRFKKIKPEAFEANRFYTVINKKSGEIVPMEVNFNFDDPNLIILPLAFGKRQGREFIWNDLLSLETGSLKLANGRVIEKTLYNRRTRQDEPALFVALTFERREVLDSSNIKPMNLIGVDRGENIPAVIALTDPEGCPLSRFKDSLGNPTHILRIGESYKEKQRTIQAKKEVEQRRAGGYSRKYASKAKNLADDMVRNTARDLLYYAVTQDAMLIFENLSRGFGRQGKRTFMAERQYTRMEDWLTAKLAYEGLPSKTYLSKTLAQYTSKTCSNCGFTITSADYDRVLEKLKKTATGWMTTINGKELKVEGQITYYNRYKRQNVVKDLSVELDRLSEESVNNDISSWTKGRSGEALSLLKKRFSHRPVQEKFVCLNCGFETHADEQAALNIARSWLFLRSQEYKKYQTNKTTGNTDKRAFVETWQSFYRKKLKEVWKPAV

SEQ ID NO: 41945 - protein, 977 aa, synthetic construct
  REGION 1..977: note = engineered CasX variant
QEIKRISKIRRRLVKDSNTKKAGKTGPMKTLLVRVMTPDLRERLENLRKKPENIPQPISNTSRANLNKLLTDYTEMKKAILHVYWEEFQKDPVGLMSRVAQPASKKIDQNKLKPEMDEKGNLTTAGFACSQCGQPLFVYKLEQVSEKGKAYTNYFGRCNVAEHEKLILLAQLKPEKDSDEAVTYSLGKFGQRALDFYSIHVTKESTHPVKPLAQIAGNRYASPVGKALSDACMGTIASFLSKYQDIIIEHQKVVKGNQKRLESLRELAGKENLEYPSVTLPPQPHTKEGVDAYNEVIARVRMWVNLNLWQKLKLSRDDAKPLLRLKGFPSFPLVERQANEVDWWDMVCNVKKLINEKKEDGKVFWQNLAIYKRQEALRPYLSSEEDRKKGKKFARYQLGDLLLHLEKKHGEDWGKVYDEAWERIDKKVEGLSKHIKLEEERRSEDAQSKAALTDWLRAKASFVIEGLKEADKDEFCRCELKLQKWYGDLRGKPFAIEAENSILDISGFSKQYNCAFIWQKDGVKKLNLYLIINYFKGGKLRFKKIKPEAFEANRFYTVINKKSGEIVPMEVNFNFDDPNLIILPLAFGKRQGREFIWNDLLSLETGSLKLANGRVIEKTLYNRRTRQDEPALFVALTFERREVLDSSNIKPMNLIGVDRGENIPAVIALTDPEGCPLSRFKDSLGNPTHILRIGESYKEKQRTIQAKKEVEQRRAGGYSRKYASKAKNLADDMVRNTARDLLYYAVTQDAMLIFENLSRGFGRQGKRTFMAERQYTRMEDWLTAKLAYEGLPSKTYLSKTLAQYTSKTCSNCGFTITSADYDRVLEKLKKTATGWMTTINGKELKVEGQITYYNRYKRQNVVKDLSVELDRLSEESVNNDISSWTKGRSGEALSLLKKRFSHRPVQEKFVCLNCGFETHADEQAALNIARSWLFLRSQEYKKYQTNKTTGNTDKRAFVETWQSFYRKKLKEVWKPAV

SEQ ID NO: 41946 - protein, 978 aa, synthetic construct
  REGION 1..978: note = engineered CasX variant
QEIKRISKIRRRLVKDSNTKKAGKTGPMKTLLVRVMTPDLRERLENLRKKPENIPQPISNTSRANLNKLLTDYTEMKKAILHVYWEEFQKDPVGLMSRVAQPASKKIDQNKLKPEMDEKGNLTTAGFACSQCGQPLFVYKLEQVSEKGKAYTNYFGRCNVAEHEKLILLAQLKPEKDSDEAVTYSLGKFGQRALDFYSIHVTKESTHPVKPLAQIAGNRYASYPVGKALSDACMGTIASFLSKYQDIIIEHQKVVKGNQKRLESLRELAGKENLEYPSVTLPPQPHTKEGVDAYNEVIARVRMWVNLNLWQKLKLSRDDAKPLLRLKGFPSFPLVERQANEVDWWDMVCNVKKLINEKKEDGKVFWQNLAGYKRQEALRPYLSSEEDREKGKKFARYQLGDLLLHLEKKHGEDWGKVYDEAWERIDKKVEGLSKHIKLEEERRSEDAQSKAALTDWLRAKASFVIEGLKEADKDEFCRCELKLQKWYGDLRGKPFAIEAENSILDISGFSKQYNCAFIWQKDGVKKLNLYLIINYFKGGKLRFKKIKPEAFEANRFYTVINKKSGEIVPMEVNFNFDDPNLIILPLAFGKRQGREFIWNDLLSLETGSLKLANGRVIEKTLYNRRTRQDEPALFVALTFERREVLDSSNIKPMNLIGVDRGENIPAVIALTDPEGCPLSRFKDSLGNPTHILRIGESYKEKQRTIQAKKEVEQRRAGGYSRKYASKAKNLADDMVRNTARDLLYYAVTQDAMLIFENLSRGFGRQGKRTFMAERQYTRMEDWLTAKLAYEGLPSKTYLSKTLAQYTSKTCSNCGFTITSADYDRVLEKLKKTATGWMTTINGKELKVEGQITYYNRYKRQNVVKDLSVELDRLSEESVNNDISSWTKGRSGEALSLLKKRFSHRPVQEKFVCLNCGFETHADEQAALNIARSWLFLRSQEYKKYQTNKTTGNTDKRAFVETWQSFYRKKLKEVWKPAV

SEQ ID NO: 41947 - protein, 978 aa, synthetic construct
  REGION 1..978: note = engineered CasX variant
QEIKRISKIRRRLVKDSNTKKAGKTGPMKTLLVRVMTPDLRERLENLRKKPENIPQPISNTSRANLNKLLTDYTEMKKAILHVYWEEFQKDPVGLMSRVAQPASKKIDQNKLKPEMDEKGNLTTAGFACSQCGQPLFVYKLEQVSEKGKAYTNYFGRCNVAEHEKLILLAQLKPEKDSDEAVTYSLGKFGQRALDFYSIHVTKESTHPVKPLAQIAGNRYASHPVGKALSDACMGTIASFLSKYQDIIIEHQKVVKGNQKRLESLRELAGKENLEYPSVTLPPQPHTKEGVDAYNEVIARVRMWVNLNLWQKLKLSRDDAKPLLRLKGFPSFPLVERQANEVDWWDMVCNVKKLINEKKEDGKVFWQNLAGYKRQEALRPYLSSEEDREKGKKFARYQLGDLLLHLEKKHGEDWGKVYDEAWERIDKKVEGLSKHIKLEEERRSEDAQSKAALTDWLRAKASFVIEGLKEADKDEFCRCELKLQKWYGDLRGKPFAIEAENSILDISGFSKQYNCAFIWQKDGVKKLNLYLIINYFKGGKLRFKKIKPEAFEANRFYTVINKKSGEIVPMEVNFNFDDPNLIILPLAFGKRQGREFIWNDLLSLETGSLKLANGRVIEKTLYNRRTRQDEPALFVALTFERREVLDSSNIKPMNLIGVDRGENIPAVIALTDPEGCPLSRFKDSLGNPTHILRIGESYKEKQRTIQAKKEVEQRRAGGYSRKYASKAKNLADDMVRNTARDLLYYAVTQDAMLIFENLSRGFGRQGKRTFMAERQYTRMEDWLTAKLAYEGLPSKTYLSKTLAQYTSKTCSNCGFTITSADYDRVLEKLKKTATGWMTTINGKELKVEGQITYYNRYKRQNVVKDLSVELDRLSEESVNNDISSWTKGRSGEALSLLKKRFSHRPVQEKFVCLNCGFETHADEQAALNIARSWLFLRSQEYKKYQTNKTTGNTDKRAFVETWQSFYRKKLKEVWKPAV

SEQ ID NO: 41948 - protein, 978 aa, synthetic construct
  REGION 1..978: note = engineered CasX variant
QEIKRISKIRRRLVKDSNTKKAGKTGPMKTLLVRVMTPDLRERLENLRKKPENIPQPISNTSRANLNKLLTDYTEMKKAILHVYWEEFQKDPVGLMSRVAQPASKKIDQNKLKPEMDEKGNLTTAGFACSQCGQPLFVYKLEQVSEKGKAYTNYFGRCNVAEHEKLILLAQLKPEKDSDEAVTYSLGKFGQRALDFYSIHVTKESTHPVKPLAQIAGNRYASSPVGKALSDACMGTIASFLSKYQDIIIEHQKVVKGNQKRLESLRELAGKENLEYPSVTLPPQPHTKEGVDAYNEVIARVRMWVNLNLWQKLKLSRDDAKPLLRLKGFPSFPLVERQANEVDWWDMVCNVKKLINEKKEDGKVFWQNLAGYKRQEALRPYLSSEEDREKGKKFARYQLGDLLLHLEKKHGEDWGKVYDEAWERIDKKVEGLSKHIKLEEERRSEDAQSKAALTDWLRAKASFVIEGLKEADKDEFCRCELKLQKWYGDLRGKPFAIEAENSILDISGFSKQYNCAFIWQKDGVKKLNLYLIINYFKGGKLRFKKIKPEAFEANRFYTVINKKSGEIVPMEVNFNFDDPNLIILPLAFGKRQGREFIWNDLLSLETGSLKLANGRVIEKTLYNRRTRQDEPALFVALTFERREVLDSSNIKPMNLIGVDRGENIPAVIALTDPEGCPLSRFKDSLGNPTHILRIGESYKEKQRTIQAKKEVEQRRAGGYSRKYASKAKNLADDMVRNTARDLLYYAVTQDAMLIFENLSRGFGRQGKRTFMAERQYTRMEDWLTAKLAYEGLPSKTYLSKTLAQYTSKTCSNCGFTITSADYDRVLEKLKKTATGWMTTINGKELKVEGQITYYNRYKRQNVVKDLSVELDRLSEESVNNDISSWTKGRSGEALSLLKKRFSHRPVQEKFVCLNCGFETHADEQAALNIARSWLFLRSQEYKKYQTNKTTGNTDKRAFVETWQSFYRKKLKEVWKPAV

SEQ ID NO: 41949 - protein, 978 aa, synthetic construct
  REGION 1..978: note = engineered CasX variant
QEIKRISKIRRRLVKDSNTKKAGKTGPMKTLLVRVMTPDLRERLENLRKKPENIPQPISNTSRANLNKLLTDYTEMKKAILHVYWEEFQKDPVGLMSRVAQPASKKIDQNKLKPEMDEKGNLTTAGFACSQCGQPLFVYKLEQVSEKGKAYTNYFGRCNVAEHEKLILLAQLKPEKDSDEAVTYSLGKFGQRALDFYSIHVTKESTHPVKPLAQIAGNRYASTPVGKALSDACMGTIASFLSKYQDIIIEHQKVVKGNQKRLESLRELAGKENLEYPSVTLPPQPHTKEGVDAYNEVIARVRMWVNLNLWQKLKLSRDDAKPLLRLKGFPSFPLVERQANEVDWWDMVCNVKKLINEKKEDGKVFWQNLAGYKRQEALRPYLSSEEDREKGKKFARYQLGDLLLHLEKKHGEDWGKVYDEAWERIDKKVEGLSKHIKLEEERRSEDAQSKAALTDWLRAKASFVIEGLKEADKDEFCRCELKLQKWYGDLRGKPFAIEAENSILDISGFSKQYNCAFIWQKDGVKKLNLYLIINYFKGGKLRFKKIKPEAFEANRFYTVINKKSGEIVPMEVNFNFDDPNLIILPLAFGKRQGREFIWNDLLSLETGSLKLANGRVIEKTLYNRRTRQDEPALFVALTFERREVLDSSNIKPMNLIGVDRGENIPAVIALTDPEGCPLSRFKDSLGNPTHILRIGESYKEKQRTIQAKKEVEQRRAGGYSRKYASKAKNLADDMVRNTARDLLYYAVTQDAMLIFENLSRGFGRQGKRTFMAERQYTRMEDWLTAKLAYEGLPSKTYLSKTLAQYTSKTCSNCGFTITSADYDRVLEKLKKTATGWMTTINGKELKVEGQITYYNRYKRQNVVKDLSVELDRLSEESVNNDISSWTKGRSGEALSLLKKRFSHRPVQEKFVCLNCGFETHADEQAALNIARSWLFLRSQEYKKYQTNKTTGNTDKRAFVETWQSFYRKKLKEVWKPAV

SEQ ID NO: 41950 - protein, 978 aa, synthetic construct
  REGION 1..978: note = engineered CasX variant
QEIKRISKIRRRLVKDSNTKKAGKTGPMKTLLVRVMTPDLRERLENLRKKPENIPQPISNTSRANLNKLLTDYTEMKKAILHVYWEEFQKDPVGLMSRVAQPASKKIDQNKLKPEMDEKGNLTTAGFACSQCGQPLFVYKLEQVSEKGKAYTNYFGRCNVAEHEKLILLAQLKPEKDSDEAVTYSLGKFGQRALDFYSIHVTKESTHPVKPLAQIAGNRYASAPVGKALSDACMGTIASFLSKYQDIIIEHQKVVKGNQKRLESLRELAGKENLEYPSVTLPPQPHTKEGVDAYNEVIARVRMWVNLNLWQKLKLSRDDAKPLLRLKGFPSFPLVERQANEVDWWDMVCNVKKLINEKKEDGKVFWQNLAGYKRQEALRPYLSSEEDREKGKKFARYQLGDLLLHLEKKHGEDWGKVYDEAWERIDKKVEGLSKHIKLEEERRSEDAQSKAALTDWLRAKASFVIEGLKEADKDEFCRCELKLQKWYGDLRGKPFAIEAENSILDISGFSKQYNCAFIWQKDGVKKLNLYLIINYFKGGKLRFKKIKPEAFEANRFYTVINKKSGEIVPMEVNFNFDDPNLIILPLAFGKRQGREFIWNDLLSLETGSLKLANGRVIEKTLYNRRTRQDEPALFVALTFERREVLDSSNIKPMNLIGVDRGENIPAVIALTDPEGCPLSRFKDSLGNPTHILRIGESYKEKQRTIQAKKEVEQRRAGGYSRKYASKAKNLADDMVRNTARDLLYYAVTQDAMLIFENLSRGFGRQGKRTFMAERQYTRMEDWLTAKLAYEGLPSKTYLSKTLAQYTSKTCSNCGFTITSADYDRVLEKLKKTATGWMTTINGKELKVEGQITYYNRYKRQNVVKDLSVELDRLSEESVNNDISSWTKGRSGEALSLLKKRFSHRPVQEKFVCLNCGFETHADEQAALNIARSWLFLRSQEYKKYQTNKTTGNTDKRAFVETWQSFYRKKLKEVWKPAV

SEQ ID NO: 41951 - protein, 978 aa, synthetic construct
  REGION 1..978: note = engineered CasX variant
QEIKRISKIRRRLVKDSNTKKAGKTGPMKTLLVRVMTPDLRERLENLRKKPENIPQPISNTSRANLNKLLTDYTEMKKAILHVYWEEFQKDPVGLMSRVAQPASKKIDQNKLKPEMDEKGNLTTAGFACSQCGQPLFVYKLEQVSEKGKAYTNYFGRCNVAEHEKLILLAQLKPEKDSDEAVTYSLGKFGQRALDFYSIHVTKESTHPVKPLAQIAGNRYASVPVGKALSDACMGTIASFLSKYQDIIIEHQKVVKGNQKRLESLRELAGKENLEYPSVTLPPQPHTKEGVDAYNEVIARVRMWVNLNLWQKLKLSRDDAKPLLRLKGFPSFPLVERQANEVDWWDMVCNVKKLINEKKEDGKVFWQNLAGYKRQEALRPYLSSEEDREKGKKFARYQLGDLLLHLEKKHGEDWGKVYDEAWERIDKKVEGLSKHIKLEEERRSEDAQSKAALTDWLRAKASFVIEGLKEADKDEFCRCELKLQKWYGDLRGKPFAIEAENSILDISGFSKQYNCAFIWQKDGVKKLNLYLIINYFKGGKLRFKKIKPEAFEANRFYTVINKKSGEIVPMEVNFNFDDPNLIILPLAFGKRQGREFIWNDLLSLETGSLKLANGRVIEKTLYNRRTRQDEPALFVALTFERREVLDSSNIKPMNLIGVDRGENIPAVIALTDPEGCPLSRFKDSLGNPTHILRIGESYKEKQRTIQAKKEVEQRRAGGYSRKYASKAKNLADDMVRNTARDLLYYAVTQDAMLIFENLSRGFGRQGKRTFMAERQYTRMEDWLTAKLAYEGLPSKTYLSKTLAQYTSKTCSNCGFTITSADYDRVLEKLKKTATGWMTTINGKELKVEGQITYYNRYKRQNVVKDLSVELDRLSEESVNNDISSWTKGRSGEALSLLKKRFSHRPVQEKFVCLNCGFETHADEQAALNIARSWLFLRSQEYKKYQTNKTTGNTDKRAFVETWQSFYRKKLKEVWKPAV

SEQ ID NO: 41952 - protein, 978 aa, synthetic construct
  REGION 1..978: note = engineered CasX variant
QEIKRISKIRRRLVKDSNTKKAGKTGPMKTLLVRVMTPDLRERLENLRKKPENIPQPISNTSRANLNKLLTDYTEMKKAILHVYWEEFQKDPVGLMSRVAQPASKKIDQNKLKPEMDEKGNLTTAGFACSQCGQPLFVYKLEQVSEKGKAYTNYFGRCNVAEHEKLIKLAQLKPEKDSDEAVTYSLGKFGQRALDFYSIHVTKESTHPVKPLAQIAGNRYASGPVGKALSDACMGTIASFLSKYQDIIIEHQKVVKGNQKRLESLRELAGKENLEYPSVTLPPQPHTKEGVDAYNEVIARVRMWVNLNLWQKLKLSRDDAKPLLRLKGFPSFPLVERQANEVDWWDMVCNVKKLINEKKEDGKVFWQNLAGYKRQEALRPYLSSEEDREKGKKFARYQLGDLLLHLEKKHGEDWGKVYDEAWERIDKKVEGLSKHIKLEEERRSEDAQSKAALTDWLRAKASFVIEGLKEADKDEFCRCELKLQKWYGDLRGKPFAIEAENSILDISGFSKQYNCAFIWQKDGVKKLNLYLIINYFKGGKLRFKKIKPEAFEANRFYTVINKKSGEIVPMEVNFNFDDPNLIILPLAFGKRQGREFIWNDLLSLETGSLKLANGRVIEKTLYNRRTRQDEPALFVALTFERREVLDSSNIKPMNLIGVDRGENIPAVIALTDPEGCPLSRFKDSLGNPTHILRIGESYKEKQRTIQAKKEVEQRRAGGYSRKYASKAKNLADDMVRNTARDLLYYAVTQDAMLIFENLSRGFGRQGKRTFMAERQYTRMEDWLTAKLAYEGLPSKTYLSKTLAQYTSKTCSNCGFTITSADYDRVLEKLKKTATGWMTTINGKELKVEGQITYYNRYKRQNVVKDLSVELDRLSEESVNNDISSWTKGRSGEALSLLKKRFSHRPVQEKFVCLNCGFETHADEQAALNIARSWLFLRSQEYKKYQTNKTTGNTDKRAFVETWQSFYRKKLKEVWKPAV

SEQ ID NO: 41953 - protein, 977 aa, synthetic construct
  REGION 1..977: note = engineered CasX variant
QEIKRISKIRRRLVKDSNTKKAGKTGPMKTLLVRVMTPDLRERLENLRKKPENIPQPISNTSRANLNKLLTDYTEMKKAILHVYWEEFQKDPVGLMSRVAQPASKKIDQNKLKPEMDEKGNLTTAGFACSQCGQPLFVYKLEQVSEKGKAYTNYFGRCNVAEHEKLILLAQLKPEKDSDEAVTYSLGKFGQRALDFYSIHVTKESTHPVKPLAQIAGNRYASPVGKALSDACMGTIASFLSKYQDIIIEHQKVVKGNQKRLESLRELAGKENLEYPSVTLPPQPHTKEGVDAYNEVIARVRMWVNLNLWQKLKLSRDDAKPLLRLKGFPSFPLVERQANEVDWWDMVCNVKKLINEKKEDGKVFWQNLAGYKRQEALRPYLSSEEDREKGKKFARYQLGDLLLHLEKKHGEDWGKVYDEAWERIDKKVEGLSKHIKLEEERRSEDAQSKAALTDWLRAKASFVIEGLKEADKDEFCRCELKLQKWYGDLRGKPFAIEAENSILDISGFSKQYNCAFIWQKDGVKKLNLYLIINYFKGGKLRFKKIKPEAFEANRFYTVINKKSGEIVPMEVNFNFDDPNLIILPLAFGKRQGREFIWNDLLSLETGSLKLANGRVIEKTLYNRRTRQDEPALFVALTFERREVLDSSNIKPMNLIGVDRGENIPAVIALTDPEGCPLSRFKDSLGNPTHILRIGESYKEKQRTIQAKKEVEQRRAGGYSRKYASKAKNLADDMVRNTARDLLYYAVTQDAMLIFENLSRGFGRQGKRTFMAERQYTRMEDWLTAKLAYEGLPSKTYLSKTLAQYTSKTCSNCGFTITSADYDRVLEKLKKTATGWMTTINGKELKVEGQITYYNRYKRQNVVKDLSVELDRLSEESVNNDISSWTKGRSGEALSLLKKRFSHRPVQEKFVCLNCGFETHADEQAALNIARSWLFLRSQEYKKYQTNKTTGNTDKRAFVETWQSFYRKKLKEVWKPAV

SEQ ID NO: 41954 - protein, 978 aa, synthetic construct
  REGION 1..978: note = engineered CasX variant
QEIKRISKIRRRLVKDSNTKKAGKTGPMKTLLVRVMTPDLRERLENLRKKPENIPQPISNTSRANLNKLLTDYTEMKKAILHVYWEEFQKDPVGLMSRVAQPASKKIDQNKLKPEMDEKGNLTTAGFACSQCGQPLFVYKLEQVSEKGKAYTNYFGRCNVAEHEKLILLAQLKPEKDSDEAVTYSLGKFGQRALDFYSIHVTKESTHPVKPLAQIAGNRYASYPVGKALSDACMGTIASFLSKYQDIIIEHQKVVKGNQKRLESLRELAGKENLEYPSVTLPPQPHTKEGVDAYNEVIARVRMWVNLNLWQKLKLSRDDAKPLLRLKGFPSFPLVERQANEVDWWDMVCNVKKLINEKKEDGKVFWQNLAGYKRQEALRPYLSSEEDRKKGKKFARYQLGDLLLHLEKKHGEDWGKVYDEAWERIDKKVEGLSKHIKLEEERRSEDAQSKAALTDWLRAKASFVIEGLKEADKDEFCRCELKLQKWYGDLRGKPFAIEAENSILDISGFSKQYNCAFIWQKDGVKKLNLYLIINYFKGGKLRFKKIKPEAFEANRFYTVINKKSGEIVIMEVNFNFDDPNLIILPLAFGKRQGREFIWNDLLSLETGSLKLANGRVIEKTLYNRRTRQDEPALFVALTFERREVLDSSNIKPMNLIGVDRGENIPAVIALTDPEGCPLSRFKDSLGNPTHILRIGESYKEKQRTIQAKKEVEQRRAGGYSRKYASKAKNLADDMVRNTARDLLYYAVTQDAMLIFENLSRGFGRQGKRTFMAERQYTRMEDWLTAKLAYEGLPSKTYLSKTLAQYTSKTCSNCGFTITSADYDRVLEKLKKTATGWMTTINGKELKVEGQITYYNRYKRQNVVKDLSVELDRLSEESVNNDISSWTKGRSGEALSLLKKRFSHRPVQEKFVCLNCGFETHADEQAALNIARSWLFLRSQEYKKYQTNKTTGNTDKRAFVETWQSFYRKKLKEVWKPAV

SEQ ID NO: 41955 - protein, 978 aa, synthetic construct
  REGION 1..978: note = engineered CasX variant
QEIKRISKIRRRLVKDSNTKKAGKTGPMKTLLVRVMTPDLRERLENLRKKPENIPQPISNTSRANLNKLLTDYTEMKKAILHVYWEEFQKDPVGLMSRVAQPASKKIDQNKLKPEMDEKGNLTTAGFACSQCGQPLFVYKLEQVSEKGKAYTNYFGRCNVAEHEKLILLAQLKPEKDSDEAVTYSLGKFGQRALDFYSIHVTKESTHPVKPLAQIAGNRYASHPVGKALSDACMGTIASFLSKYQDIIIEHQKVVKGNQKRLESLRELAGKENLEYPSVTLPPQPHTKEGVDAYNEVIARVRMWVNLNLWQKLKLSRDDAKPLLRLKGFPSFPLVERQANEVDWWDMVCNVKKLINEKKEDGKVFWQNLAGYKRQEALRPYLSSEEDRKKGKKFARYQLGDLLLHLEKKHGEDWGKVYDEAWERIDKKVEGLSKHIKLEEERRSEDAQSKAALTDWLRAKASFVIEGLKEADKDEFCRCELKLQKWYGDLRGKPFAIEAENSILDISGFSKQYNCAFIWQKDGVKKLNLYLIINYFKGGKLRFKKIKPEAFEANRFYTVINKKSGEIVIMEVNFNFDDPNLIILPLAFGKRQGREFIWNDLLSLETGSLKLANGRVIEKTLYNRRTRQDEPALFVALTFERREVLDSSNIKPMNLIGVDRGENIPAVIALTDPEGCPLSRFKDSLGNPTHILRIGESYKEKQRTIQAKKEVEQRRAGGYSRKYASKAKNLADDMVRNTARDLLYYAVTQDAMLIFENLSRGFGRQGKRTFMAERQYTRMEDWLTAKLAYEGLPSKTYLSKTLAQYTSKTCSNCGFTITSADYDRVLEKLKKTATGWMTTINGKELKVEGQITYYNRYKRQNVVKDLSVELDRLSEESVNNDISSWTKGRSGEALSLLKKRFSHRPVQEKFVCLNCGFETHADEQAALNIARSWLFLRSQEYKKYQTNKTTGNTDKRAFVETWQSFYRKKLKEVWKPAV

SEQ ID NO: 41956 - protein, 978 aa, synthetic construct
  REGION 1..978: note = engineered CasX variant
QEIKRISKIRRRLVKDSNTKKAGKTGPMKTLLVRVMTPDLRERLENLRKKPENIPQPISNTSRANLNKLLTDYTEMKKAILHVYWEEFQKDPVGLMSRVAQPASKKIDQNKLKPEMDEKGNLTTAGFACSQCGQPLFVYKLEQVSEKGKAYTNYFGRCNVAEHEKLILLAQLKPEKDSDEAVTYSLGKFGQRALDFYSIHVTKESTHPVKPLAQIAGNRYASSPVGKALSDACMGTIASFLSKYQDIIIEHQKVVKGNQKRLESLRELAGKENLEYPSVTLPPQPHTKEGVDAYNEVIARVRMWVNLNLWQKLKLSRDDAKPLLRLKGFPSFPLVERQANEVDWWDMVCNVKKLINEKKEDGKVFWQNLAGYKRQEALRPYLSSEEDRKKGKKFARYQLGDLLLHLEKKHGEDWGKVYDEAWERIDKKVEGLSKHIKLEEERRSEDAQSKAALTDWLRAKASFVIEGLKEADKDEFCRCELKLQKWYGDLRGKPFAIEAENSILDISGFSKQYNCAFIWQKDGVKKLNLYLIINYFKGGKLRFKKIKPEAFEANRFYTVINKKSGEIVIMEVNFNFDDPNLIILPLAFGKRQGREFIWNDLLSLETGSLKLANGRVIEKTLYNRRTRQDEPALFVALTFERREVLDSSNIKPMNLIGVDRGENIPAVIALTDPEGCPLSRFKDSLGNPTHILRIGESYKEKQRTIQAKKEVEQRRAGGYSRKYASKAKNLADDMVRNTARDLLYYAVTQDAMLIFENLSRGFGRQGKRTFMAERQYTRMEDWLTAKLAYEGLPSKTYLSKTLAQYTSKTCSNCGFTITSADYDRVLEKLKKTATGWMTTINGKELKVEGQITYYNRYKRQNVVKDLSVELDRLSEESVNNDISSWTKGRSGEALSLLKKRFSHRPVQEKFVCLNCGFETHADEQAALNIARSWLFLRSQEYKKYQTNKTTGNTDKRAFVETWQSFYRKKLKEVWKPAV

SEQ ID NO: 41957 - protein, 978 aa, synthetic construct
  REGION 1..978: note = engineered CasX variant
QEIKRISKIRRRLVKDSNTKKAGKTGPMKTLLVRVMTPDLRERLENLRKKPENIPQPISNTSRANLNKLLTDYTEMKKAILHVYWEEFQKDPVGLMSRVAQPASKKIDQNKLKPEMDEKGNLTTAGFACSQCGQPLFVYKLEQVSEKGKAYTNYFGRCNVAEHEKLILLAQLKPEKDSDEAVTYSLGKFGQRALDFYSIHVTKESTHPVKPLAQIAGNRYASTPVGKALSDACMGTIASFLSKYQDIIIEHQKVVKGNQKRLESLRELAGKENLEYPSVTLPPQPHTKEGVDAYNEVIARVRMWVNLNLWQKLKLSRDDAKPLLRLKGFPSFPLVERQANEVDWWDMVCNVKKLINEKKEDGKVFWQNLAGYKRQEALRPYLSSEEDRKKGKKFARYQLGDLLLHLEKKHGEDWGKVYDEAWERIDKKVEGLSKHIKLEEERRSEDAQSKAALTDWLRAKASFVIEGLKEADKDEFCRCELKLQKWYGDLRGKPFAIEAENSILDISGFSKQYNCAFIWQKDGVKKLNLYLIINYFKGGKLRFKKIKPEAFEANRFYTVINKKSGEIVIMEVNFNFDDPNLIILPLAFGKRQGREFIWNDLLSLETGSLKLANGRVIEKTLYNRRTRQDEPALFVALTFERREVLDSSNIKPMNLIGVDRGENIPAVIALTDPEGCPLSRFKDSLGNPTHILRIGESYKEKQRTIQAKKEVEQRRAGGYSRKYASKAKNLADDMVRNTARDLLYYAVTQDAMLIFENLSRGFGRQGKRTFMAERQYTRMEDWLTAKLAYEGLPSKTYLSKTLAQYTSKTCSNCGFTITSADYDRVLEKLKKTATGWMTTINGKELKVEGQITYYNRYKRQNVVKDLSVELDRLSEESVNNDISSWTKGRSGEALSLLKKRFSHRPVQEKFVCLNCGFETHADEQAALNIARSWLFLRSQEYKKYQTNKTTGNTDKRAFVETWQSFYRKKLKEVWKPAV

SEQ ID NO: 41958 - protein, 978 aa, synthetic construct
  REGION 1..978: note = engineered CasX variant
QEIKRISKIRRRLVKDSNTKKAGKTGPMKTLLVRVMTPDLRERLENLRKKPENIPQPISNTSRANLNKLLTDYTEMKKAILHVYWEEFQKDPVGLMSRVAQPASKKIDQNKLKPEMDEKGNLTTAGFACSQCGQPLFVYKLEQVSEKGKAYTNYFGRCNVAEHEKLILLAQLKPEKDSDEAVTYSLGKFGQRALDFYSIHVTKESTHPVKPLAQIAGNRYASAPVGKALSDACMGTIASFLSKYQDIIIEHQKVVKGNQKRLESLRELAGKENLEYPSVTLPPQPHTKEGVDAYNEVIARVRMWVNLNLWQKLKLSRDDAKPLLRLKGFPSFPLVERQANEVDWWDMVCNVKKLINEKKEDGKVFWQNLAGYKRQEALRPYLSSEEDRKKGKKFARYQLGDLLLHLEKKHGEDWGKVYDEAWERIDKKVEGLSKHIKLEEERRSEDAQSKAALTDWLRAKASFVIEGLKEADKDEFCRCELKLQKWYGDLRGKPFAIEAENSILDISGFSKQYNCAFIWQKDGVKKLNLYLIINYFKGGKLRFKKIKPEAFEANRFYTVINKKSGEIVIMEVNFNFDDPNLIILPLAFGKRQGREFIWNDLLSLETGSLKLANGRVIEKTLYNRRTRQDEPALFVALTFERREVLDSSNIKPMNLIGVDRGENIPAVIALTDPEGCPLSRFKDSLGNPTHILRIGESYKEKQRTIQAKKEVEQRRAGGYSRKYASKAKNLADDMVRNTARDLLYYAVTQDAMLIFENLSRGFGRQGKRTFMAERQYTRMEDWLTAKLAYEGLPSKTYLSKTLAQYTSKTCSNCGFTITSADYDRVLEKLKKTATGWMTTINGKELKVEGQITYYNRYKRQNVVKDLSVELDRLSEESVNNDISSWTKGRSGEALSLLKKRFSHRPVQEKFVCLNCGFETHADEQAALNIARSWLFLRSQEYKKYQTNKTTGNTDKRAFVETWQSFYRKKLKEVWKPAV

SEQ ID NO: 41959 - protein, 978 aa, synthetic construct
  REGION 1..978: note = engineered CasX variant
QEIKRISKIRRRLVKDSNTKKAGKTGPMKTLLVRVMTPDLRERLENLRKKPENIPQPISNTSRANLNKLLTDYTEMKKAILHVYWEEFQKDPVGLMSRVAQPASKKIDQNKLKPEMDEKGNLTTAGFACSQCGQPLFVYKLEQVSEKGKAYTNYFGRCNVAEHEKLILLAQLKPEKDSDEAVTYSLGKFGQRALDFYSIHVTKESTHPVKPLAQIAGNRYASVPVGKALSDACMGTIASFLSKYQDIIIEHQKVVKGNQKRLESLRELAGKENLEYPSVTLPPQPHTKEGVDAYNEVIARVRMWVNLNLWQKLKLSRDDAKPLLRLKGFPSFPLVERQANEVDWWDMVCNVKKLINEKKEDGKVFWQNLAGYKRQEALRPYLSSEEDRKKGKKFARYQLGDLLLHLEKKHGEDWGKVYDEAWERIDKKVEGLSKHIKLEEERRSEDAQSKAALTDWLRAKASFVIEGLKEADKDEFCRCELKLQKWYGDLRGKPFAIEAENSILDISGFSKQYNCAFIWQKDGVKKLNLYLIINYFKGGKLRFKKIKPEAFEANRFYTVINKKSGEIVIMEVNFNFDDPNLIILPLAFGKRQGREFIWNDLLSLETGSLKLANGRVIEKTLYNRRTRQDEPALFVALTFERREVLDSSNIKPMNLIGVDRGENIPAVIALTDPEGCPLSRFKDSLGNPTHILRIGESYKEKQRTIQAKKEVEQRRAGGYSRKYASKAKNLADDMVRNTARDLLYYAVTQDAMLIFENLSRGFGRQGKRTFMAERQYTRMEDWLTAKLAYEGLPSKTYLSKTLAQYTSKTCSNCGFTITSADYDRVLEKLKKTATGWMTTINGKELKVEGQITYYNRYKRQNVVKDLSVELDRLSEESVNNDISSWTKGRSGEALSLLKKRFSHRPVQEKFVCLNCGFETHADEQAALNIARSWLFLRSQEYKKYQTNKTTGNTDKRAFVETWQSFYRKKLKEVWKPAV

SEQ ID NO: 41960 - protein, 978 aa, synthetic construct
  REGION 1..978: note = engineered CasX variant
QEIKRISKIRRRLVKDSNTKKAGKTGPMKTLLVRVMTPDLRERLENLRKKPENIPQPISNTSRANLNKLLTDYTEMKKAILHVYWEEFQKDPVGLMSRVAQPASKKIDQNKLKPEMDEKGNLTTAGFACSQCGQPLFVYKLEQVSEKGKAYTNYFGRCNVAEHEKLIKLAQLKPEKDSDEAVTYSLGKFGQRALDFYSIHVTKESTHPVKPLAQIAGNRYASGPVGKALSDACMGTIASFLSKYQDIIIEHQKVVKGNQKRLESLRELAGKENLEYPSVTLPPQPHTKEGVDAYNEVIARVRMWVNLNLWQKLKLSRDDAKPLLRLKGFPSFPLVERQANEVDWWDMVCNVKKLINEKKEDGKVFWQNLAGYKRQEALRPYLSSEEDRKKGKKFARYQLGDLLLHLEKKHGEDWGKVYDEAWERIDKKVEGLSKHIKLEEERRSEDAQSKAALTDWLRAKASFVIEGLKEADKDEFCRCELKLQKWYGDLRGKPFAIEAENSILDISGFSKQYNCAFIWQKDGVKKLNLYLIINYFKGGKLRFKKIKPEAFEANRFYTVINKKSGEIVIMEVNFNFDDPNLIILPLAFGKRQGREFIWNDLLSLETGSLKLANGRVIEKTLYNRRTRQDEPALFVALTFERREVLDSSNIKPMNLIGVDRGENIPAVIALTDPEGCPLSRFKDSLGNPTHILRIGESYKEKQRTIQAKKEVEQRRAGGYSRKYASKAKNLADDMVRNTARDLLYYAVTQDAMLIFENLSRGFGRQGKRTFMAERQYTRMEDWLTAKLAYEGLPSKTYLSKTLAQYTSKTCSNCGFTITSADYDRVLEKLKKTATGWMTTINGKELKVEGQITYYNRYKRQNVVKDLSVELDRLSEESVNNDISSWTKGRSGEALSLLKKRFSHRPVQEKFVCLNCGFETHADEQAALNIARSWLFLRSQEYKKYQTNKTTGNTDKRAFVETWQSFYRKKLKEVWKPAV

SEQ ID NO: 41961 - protein, 977 aa, synthetic construct
  REGION 1..977: note = engineered CasX variant
QEIKRISKIRRRLVKDSNTKKAGKTGPMKTLLVRVMTPDLRERLENLRKKPENIPQPISNTSRANLNKLLTDYTEMKKAILHVYWEEFQKDPVGLMSRVAQPASKKIDQNKLKPEMDEKGNLTTAGFACSQCGQPLFVYKLEQVSEKGKAYTNYFGRCNVAEHEKLILLAQLKPEKDSDEAVTYSLGKFGQRALDFYSIHVTKESTHPVKPLAQIAGNRYASPVGKALSDACMGTIASFLSKYQDIIIEHQKVVKGNQKRLESLRELAGKENLEYPSVTLPPQPHTKEGVDAYNEVIARVRMWVNLNLWQKLKLSRDDAKPLLRLKGFPSFPLVERQANEVDWWDMVCNVKKLINEKKEDGKVFWQNLAGYKRQEALRPYLSSEEDRKKGKKFARYQLGDLLLHLEKKHGEDWGKVYDEAWERIDKKVEGLSKHIKLEEERRSEDAQSKAALTDWLRAKASFVIEGLKEADKDEFCRCELKLQKWYGDLRGKPFAIEAENSILDISGFSKQYNCAFIWQKDGVKKLNLYLIINYFKGGKLRFKKIKPEAFEANRFYTVINKKSGEIVIMEVNFNFDDPNLIILPLAFGKRQGREFIWNDLLSLETGSLKLANGRVIEKTLYNRRTRQDEPALFVALTFERREVLDSSNIKPMNLIGVDRGENIPAVIALTDPEGCPLSRFKDSLGNPTHILRIGESYKEKQRTIQAKKEVEQRRAGGYSRKYASKAKNLADDMVRNTARDLLYYAVTQDAMLIFENLSRGFGRQGKRTFMAERQYTRMEDWLTAKLAYEGLPSKTYLSKTLAQYTSKTCSNCGFTITSADYDRVLEKLKKTATGWMTTINGKELKVEGQITYYNRYKRQNVVKDLSVELDRLSEESVNNDISSWTKGRSGEALSLLKKRFSHRPVQEKFVCLNCGFETHADEQAALNIARSWLFLRSQEYKKYQTNKTTGNTDKRAFVETWQSFYRKKLKEVWKPAV

SEQ ID NO: 41962 - protein, 978 aa, synthetic construct
  REGION 1..978: note = engineered CasX variant
QEIKRINGIRRRLVKDSNTKKAGKTGPMKTLLVRVMTPDLRERLENLRKKPENIPQPISNTSRANLNKLLTDYTEMKKAILHVYWEEFQKDPVGLMSRVAQPASKKIDQNKLKPEMDEKGNLTTAGFACSQCGQPLFVYKLEQVSEKGKAYTNYFGRCNVAEHEKLILLAQLKPEKDSDEAVTYSLGKFGQRALDFYSIHVTKESTHPVKPLAQIAGNRYASYPVGKALSGACMGTIASFLSKYQDIIIEHQKVVKGNQKRLESLRELAGKENLEYPSVTLPPQPHTKEGVDAYNEVIARVRMWVNLNLWQKLKLSRDDAKPLLRLKGFPSFPLVERQANEVDWWDMVCNVKKLINEKKEDGKVFWQNLAGYKRQEALRPYLSSEEDRKKGKKFARYQLGDLLLHLEKKHGEDWGKVYDEAWERIDKKVEGLSKHIKLEEERRSEDAQSKAALTDWLRAKASFVIEGLKEADKDEFCRCELKLQKWYGDLRGKPFAIEAENSILDISGFSKQYNCAFIWQKDGVKKLNLYLIINYFKGGKLRFKKIKPEAFEANRFYTVINKKSGEIVPMEVNFNFDDPNLIILPLAFGKRQGREFIWNDLLSLETGSLKLANGRVIEKTLYNRRTRQDEPALFVALTFERREVLDSSNIKPMNLIGVDRGENIPAVIALTDPEGCPLSRFKDSLGNPTHILRIGESYKEKQRTIQAKKEVEQRRAGGYSRKYASKAKNLADDMVRNTARDLLYYAVTQDAMLIFENLSRGFGRQGKRTFMAERQYTRMEDWLTAKLAYEGLPSKTYLSKTLAQYTSKTCSNCGFTITSADYDRVLEKLKKTATGWMTTINGKELKVEGQITYYNRYKRQNVVKDLSVELDRLSEESVNNDISSWTKGRSGEALSLLKKRFSHRPVQEKFVCLNCGFETHADEQAALNIARSWLFLRSQEYKKYQTNKTTGNTDKRAFVETWQSFYRKKLKEVWKPAV

SEQ ID NO: 41963 - protein, 978 aa, synthetic construct
  REGION 1..978: note = engineered CasX variant
QEIKRINGIRRRLVKDSNTKKAGKTGPMKTLLVRVMTPDLRERLENLRKKPENIPQPISNTSRANLNKLLTDYTEMKKAILHVYWEEFQKDPVGLMSRVAQPASKKIDQNKLKPEMDEKGNLTTAGFACSQCGQPLFVYKLEQVSEKGKAYTNYFGRCNVAEHEKLILLAQLKPEKDSDEAVTYSLGKFGQRALDFYSIHVTKESTHPVKPLAQIAGNRYASHPVGKALSGACMGTIASFLSKYQDIIIEHQKVVKGNQKRLESLRELAGKENLEYPSVTLPPQPHTKEGVDAYNEVIARVRMWVNLNLWQKLKLSRDDAKPLLRLKGFPSFPLVERQANEVDWWDMVCNVKKLINEKKEDGKVFWQNLAGYKRQEALRPYLSSEEDRKKGKKFARYQLGDLLLHLEKKHGEDWGKVYDEAWERIDKKVEGLSKHIKLEEERRSEDAQSKAALTDWLRAKASFVIEGLKEADKDEFCRCELKLQKWYGDLRGKPFAIEAENSILDISGFSKQYNCAFIWQKDGVKKLNLYLIINYFKGGKLRFKKIKPEAFEANRFYTVINKKSGEIVPMEVNFNFDDPNLIILPLAFGKRQGREFIWNDLLSLETGSLKLANGRVIEKTLYNRRTRQDEPALFVALTFERREVLDSSNIKPMNLIGVDRGENIPAVIALTDPEGCPLSRFKDSLGNPTHILRIGESYKEKQRTIQAKKEVEQRRAGGYSRKYASKAKNLADDMVRNTARDLLYYAVTQDAMLIFENLSRGFGRQGKRTFMAERQYTRMEDWLTAKLAYEGLPSKTYLSKTLAQYTSKTCSNCGFTITSADYDRVLEKLKKTATGWMTTINGKELKVEGQITYYNRYKRQNVVKDLSVELDRLSEESVNNDISSWTKGRSGEALSLLKKRFSHRPVQEKFVCLNCGFETHADEQAALNIARSWLFLRSQEYKKYQTNKTTGNTDKRAFVETWQSFYRKKLKEVWKPAV

SEQ ID NO: 41964 - protein, 978 aa, synthetic construct
  REGION 1..978: note = engineered CasX variant
QEIKRINGIRRRLVKDSNTKKAGKTGPMKTLLVRVMTPDLRERLENLRKKPENIPQPISNTSRANLNKLLTDYTEMKKAILHVYWEEFQKDPVGLMSRVAQPASKKIDQNKLKPEMDEKGNLTTAGFACSQCGQPLFVYKLEQVSEKGKAYTNYFGRCNVAEHEKLILLAQLKPEKDSDEAVTYSLGKFGQRALDFYSIHVTKESTHPVKPLAQIAGNRYASSPVGKALSGACMGTIASFLSKYQDIIIEHQKVVKGNQKRLESLRELAGKENLEYPSVTLPPQPHTKEGVDAYNEVIARVRMWVNLNLWQKLKLSRDDAKPLLRLKGFPSFPLVERQANEVDWWDMVCNVKKLINEKKEDGKVFWQNLAGYKRQEALRPYLSSEEDRKKGKKFARYQLGDLLLHLEKKHGEDWGKVYDEAWERIDKKVEGLSKHIKLEEERRSEDAQSKAALTDWLRAKASFVIEGLKEADKDEFCRCELKLQKWYGDLRGKPFAIEAENSILDISGFSKQYNCAFIWQKDGVKKLNLYLIINYFKGGKLRFKKIKPEAFEANRFYTVINKKSGEIVPMEVNFNFDDPNLIILPLAFGKRQGREFIWNDLLSLETGSLKLANGRVIEKTLYNRRTRQDEPALFVALTFERREVLDSSNIKPMNLIGVDRGENIPAVIALTDPEGCPLSRFKDSLGNPTHILRIGESYKEKQRTIQAKKEVEQRRAGGYSRKYASKAKNLADDMVRNTARDLLYYAVTQDAMLIFENLSRGFGRQGKRTFMAERQYTRMEDWLTAKLAYEGLPSKTYLSKTLAQYTSKTCSNCGFTITSADYDRVLEKLKKTATGWMTTINGKELKVEGQITYYNRYKRQNVVKDLSVELDRLSEESVNNDISSWTKGRSGEALSLLKKRFSHRPVQEKFVCLNCGFETHADEQAALNIARSWLFLRSQEYKKYQTNKTTGNTDKRAFVETWQSFYRKKLKEVWKPAV

SEQ ID NO: 41965 - protein, 978 aa, synthetic construct
  REGION 1..978: note = engineered CasX variant
QEIKRINGIRRRLVKDSNTKKAGKTGPMKTLLVRVMTPDLRERLENLRKKPENIPQPISNTSRANLNKLLTDYTEMKKAILHVYWEEFQKDPVGLMSRVAQPASKKIDQNKLKPEMDEKGNLTTAGFACSQCGQPLFVYKLEQVSEKGKAYTNYFGRCNVAEHEKLILLAQLKPEKDSDEAVTYSLGKFGQRALDFYSIHVTKESTHPVKPLAQIAGNRYASTPVGKALSGACMGTIASFLSKYQDIIIEHQKVVKGNQKRLESLRELAGKENLEYPSVTLPPQPHTKEGVDAYNEVIARVRMWVNLNLWQKLKLSRDDAKPLLRLKGFPSFPLVERQANEVDWWDMVCNVKKLINEKKEDGKVFWQNLAGYKRQEALRPYLSSEEDRKKGKKFARYQLGDLLLHLEKKHGEDWGKVYDEAWERIDKKVEGLSKHIKLEEERRSEDAQSKAALTDWLRAKASFVIEGLKEADKDEFCRCELKLQKWYGDLRGKPFAIEAENSILDISGFSKQYNCAFIWQKDGVKKLNLYLIINYFKGGKLRFKKIKPEAFEANRFYTVINKKSGEIVPMEVNFNFDDPNLIILPLAFGKRQGREFIWNDLLSLETGSLKLANGRVIEKTLYNRRTRQDEPALFVALTFERREVLDSSNIKPMNLIGVDRGENIPAVIALTDPEGCPLSRFKDSLGNPTHILRIGESYKEKQRTIQAKKEVEQRRAGGYSRKYASKAKNLADDMVRNTARDLLYYAVTQDAMLIFENLSRGFGRQGKRTFMAERQYTRMEDWLTAKLAYEGLPSKTYLSKTLAQYTSKTCSNCGFTITSADYDRVLEKLKKTATGWMTTINGKELKVEGQITYYNRYKRQNVVKDLSVELDRLSEESVNNDISSWTKGRSGEALSLLKKRFSHRPVQEKFVCLNCGFETHADEQAALNIARSWLFLRSQEYKKYQTNKTTGNTDKRAFVETWQSFYRKKLKEVWKPAV

SEQ ID NO: 41966 - protein, 978 aa, synthetic construct
  REGION 1..978: note = engineered CasX variant
QEIKRINGIRRRLVKDSNTKKAGKTGPMKTLLVRVMTPDLRERLENLRKKPENIPQPISNTSRANLNKLLTDYTEMKKAILHVYWEEFQKDPVGLMSRVAQPASKKIDQNKLKPEMDEKGNLTTAGFACSQCGQPLFVYKLEQVSEKGKAYTNYFGRCNVAEHEKLILLAQLKPEKDSDEAVTYSLGKFGQRALDFYSIHVTKESTHPVKPLAQIAGNRYASAPVGKALSGACMGTIASFLSKYQDIIIEHQKVVKGNQKRLESLRELAGKENLEYPSVTLPPQPHTKEGVDAYNEVIARVRMWVNLNLWQKLKLSRDDAKPLLRLKGFPSFPLVERQANEVDWWDMVCNVKKLINEKKEDGKVFWQNLAGYKRQEALRPYLSSEEDRKKGKKFARYQLGDLLLHLEKKHGEDWGKVYDEAWERIDKKVEGLSKHIKLEEERRSEDAQSKAALTDWLRAKASFVIEGLKEADKDEFCRCELKLQKWYGDLRGKPFAIEAENSILDISGFSKQYNCAFIWQKDGVKKLNLYLIINYFKGGKLRFKKIKPEAFEANRFYTVINKKSGEIVPMEVNFNFDDPNLIILPLAFGKRQGREFIWNDLLSLETGSLKLANGRVIEKTLYNRRTRQDEPALFVALTFERREVLDSSNIKPMNLIGVDRGENIPAVIALTDPEGCPLSRFKDSLGNPTHILRIGESYKEKQRTIQAKKEVEQRRAGGYSRKYASKAKNLADDMVRNTARDLLYYAVTQDAMLIFENLSRGFGRQGKRTFMAERQYTRMEDWLTAKLAYEGLPSKTYLSKTLAQYTSKTCSNCGFTITSADYDRVLEKLKKTATGWMTTINGKELKVEGQITYYNRYKRQNVVKDLSVELDRLSEESVNNDISSWTKGRSGEALSLLKKRFSHRPVQEKFVCLNCGFETHADEQAALNIARSWLFLRSQEYKKYQTNKTTGNTDKRAFVETWQSFYRKKLKEVWKPAV

SEQ ID NO: 41967 - protein, 978 aa, synthetic construct
  REGION 1..978: note = engineered CasX variant
QEIKRINGIRRRLVKDSNTKKAGKTGPMKTLLVRVMTPDLRERLENLRKKPENIPQPISNTSRANLNKLLTDYTEMKKAILHVYWEEFQKDPVGLMSRVAQPASKKIDQNKLKPEMDEKGNLTTAGFACSQCGQPLFVYKLEQVSEKGKAYTNYFGRCNVAEHEKLILLAQLKPEKDSDEAVTYSLGKFGQRALDFYSIHVTKESTHPVKPLAQIAGNRYASVPVGKALSGACMGTIASFLSKYQDIIIEHQKVVKGNQKRLESLRELAGKENLEYPSVTLPPQPHTKEGVDAYNEVIARVRMWVNLNLWQKLKLSRDDAKPLLRLKGFPSFPLVERQANEVDWWDMVCNVKKLINEKKEDGKVFWQNLAGYKRQEALRPYLSSEEDRKKGKKFARYQLGDLLLHLEKKHGEDWGKVYDEAWERIDKKVEGLSKHIKLEEERRSEDAQSKAALTDWLRAKASFVIEGLKEADKDEFCRCELKLQKWYGDLRGKPFAIEAENSILDISGFSKQYNCAFIWQKDGVKKLNLYLIINYFKGGKLRFKKIKPEAFEANRFYTVINKKSGEIVPMEVNFNFDDPNLIILPLAFGKRQGREFIWNDLLSLETGSLKLANGRVIEKTLYNRRTRQDEPALFVALTFERREVLDSSNIKPMNLIGVDRGENIPAVIALTDPEGCPLSRFKDSLGNPTHILRIGESYKEKQRTIQAKKEVEQRRAGGYSRKYASKAKNLADDMVRNTARDLLYYAVTQDAMLIFENLSRGFGRQGKRTFMAERQYTRMEDWLTAKLAYEGLPSKTYLSKTLAQYTSKTCSNCGFTITSADYDRVLEKLKKTATGWMTTINGKELKVEGQITYYNRYKRQNVVKDLSVELDRLSEESVNNDISSWTKGRSGEALSLLKKRFSHRPVQEKFVCLNCGFETHADEQAALNIARSWLFLRSQEYKKYQTNKTTGNTDKRAFVETWQSFYRKKLKEVWKPAV

SEQ ID NO: 41968 - protein, 978 aa, synthetic construct
  REGION 1..978: note = engineered CasX variant
QEIKRINGIRRRLVKDSNTKKAGKTGPMKTLLVRVMTPDLRERLENLRKKPENIPQPISNTSRANLNKLLTDYTEMKKAILHVYWEEFQKDPVGLMSRVAQPASKKIDQNKLKPEMDEKGNLTTAGFACSQCGQPLFVYKLEQVSEKGKAYTNYFGRCNVAEHEKLIKLAQLKPEKDSDEAVTYSLGKFGQRALDFYSIHVTKESTHPVKPLAQIAGNRYASGPVGKALSGACMGTIASFLSKYQDIIIEHQKVVKGNQKRLESLRELAGKENLEYPSVTLPPQPHTKEGVDAYNEVIARVRMWVNLNLWQKLKLSRDDAKPLLRLKGFPSFPLVERQANEVDWWDMVCNVKKLINEKKEDGKVFWQNLAGYKRQEALRPYLSSEEDRKKGKKFARYQLGDLLLHLEKKHGEDWGKVYDEAWERIDKKVEGLSKHIKLEEERRSEDAQSKAALTDWLRAKASFVIEGLKEADKDEFCRCELKLQKWYGDLRGKPFAIEAENSILDISGFSKQYNCAFIWQKDGVKKLNLYLIINYFKGGKLRFKKIKPEAFEANRFYTVINKKSGEIVPMEVNFNFDDPNLIILPLAFGKRQGREFIWNDLLSLETGSLKLANGRVIEKTLYNRRTRQDEPALFVALTFERREVLDSSNIKPMNLIGVDRGENIPAVIALTDPEGCPLSRFKDSLGNPTHILRIGESYKEKQRTIQAKKEVEQRRAGGYSRKYASKAKNLADDMVRNTARDLLYYAVTQDAMLIFENLSRGFGRQGKRTFMAERQYTRMEDWLTAKLAYEGLPSKTYLSKTLAQYTSKTCSNCGFTITSADYDRVLEKLKKTATGWMTTINGKELKVEGQITYYNRYKRQNVVKDLSVELDRLSEESVNNDISSWTKGRSGEALSLLKKRFSHRPVQEKFVCLNCGFETHADEQAALNIARSWLFLRSQEYKKYQTNKTTGNTDKRAFVETWQSFYRKKLKEVWKPAV

SEQ ID NO: 41969 - protein, 977 aa, synthetic construct
  REGION 1..977: note = engineered CasX variant
QEIKRINGIRRRLVKDSNTKKAGKTGPMKTLLVRVMTPDLRERLENLRKKPENIPQPISNTSRANLNKLLTDYTEMKKAILHVYWEEFQKDPVGLMSRVAQPASKKIDQNKLKPEMDEKGNLTTAGFACSQCGQPLFVYKLEQVSEKGKAYTNYFGRCNVAEHEKLILLAQLKPEKDSDEAVTYSLGKFGQRALDFYSIHVTKESTHPVKPLAQIAGNRYASPVGKALSGACMGTIASFLSKYQDIIIEHQKVVKGNQKRLESLRELAGKENLEYPSVTLPPQPHTKEGVDAYNEVIARVRMWVNLNLWQKLKLSRDDAKPLLRLKGFPSFPLVERQANEVDWWDMVCNVKKLINEKKEDGKVFWQNLAGYKRQEALRPYLSSEEDRKKGKKFARYQLGDLLLHLEKKHGEDWGKVYDEAWERIDKKVEGLSKHIKLEEERRSEDAQSKAALTDWLRAKASFVIEGLKEADKDEFCRCELKLQKWYGDLRGKPFAIEAENSILDISGFSKQYNCAFIWQKDGVKKLNLYLIINYFKGGKLRFKKIKPEAFEANRFYTVINKKSGEIVPMEVNFNFDDPNLIILPLAFGKRQGREFIWNDLLSLETGSLKLANGRVIEKTLYNRRTRQDEPALFVALTFERREVLDSSNIKPMNLIGVDRGENIPAVIALTDPEGCPLSRFKDSLGNPTHILRIGESYKEKQRTIQAKKEVEQRRAGGYSRKYASKAKNLADDMVRNTARDLLYYAVTQDAMLIFENLSRGFGRQGKRTFMAERQYTRMEDWLTAKLAYEGLPSKTYLSKTLAQYTSKTCSNCGFTITSADYDRVLEKLKKTATGWMTTINGKELKVEGQITYYNRYKRQNVVKDLSVELDRLSEESVNNDISSWTKGRSGEALSLLKKRFSHRPVQEKFVCLNCGFETHADEQAALNIARSWLFLRSQEYKKYQTNKTTGNTDKRAFVETWQSFYRKKLKEVWKPAV

SEQ ID NO: 41970 - protein, 978 aa, synthetic construct
  REGION 1..978: note = engineered CasX variant
QEIKRINGIRRRLVKDSNTKKAGKTGPMKTLLVRVMTPDLRERLENLRKKPENIPQPISNTSRANLNKLLTDYTEMKKAILHVYWEEFQKDPVGLMSRVAQPASKKIDQNKLKPEMDEKGNLTTAGFACSQCGQPLFVYKLEQVSEKGKAYTNYFGRCNVAEHEKLILLAQLKPEKDSDEAVTYSLGKFGQRALDFYSIHVTKESTHPVKPLAQIAGNRYASYPVGKALSDACMGTIASFLSKYQDIIIEHQKVVKGNQKRLESLRELAGKENLEYPSVTLPPQPHTKEGVDAYNEVIARVRMWVNLNLWQKLKLSRDDAKPLLRLKNFPSFPLVERQANEVDWWDMVCNVKKLINEKKEDGKVFWQNLAGYKRQEALRPYLSSEEDRKKGKKFARYQLGDLLLHLEKKHGEDWGKVYDEAWERIDKKVEGLSKHIKLEEERRSEDAQSKAALTDWLRAKASFVIEGLKEADKDEFCRCELKLQKWYGDLRGKPFAIEAENSILDISGFSKQYNCAFIWQKDGVKKLNLYLIINYFKGGKLRFKKIKPEAFEANRFYTVINKKSGEIVPMEVNFNFDDPNLIILPLAFGKRQGREFIWNDLLSLETGSLKLANGRVIEKTLYNRRTRQDEPALFVALTFERREVLDSSNIKPMNLIGVDRGENIPAVIALTDPEGCPLSRFKDSLGNPTHILRIGESYKEKQRTIQAKKEVEQRRAGGYSRKYASKAKNLADDMVRNTARDLLYYAVTQDAMLIFENLSRGFGRQGKRTFMAERQYTRMEDWLTAKLAYEGLPSKTYLSKTLAQYTSKTCSNCGFTITSADYDRVLEKLKKTATGWMTTINGKELKVEGQITYYNRYKRQNVVKDLSVELDRLSEESVNNDISSWTKGRSGEALSLLKKRFSHRPVQEKFVCLNCGFETHADEQAALNIARSWLFLRSQEYKKYQTNKTTGNTDKRAFVETWQSFYRKKLKEVWKPAV

SEQ ID NO: 41971 - protein, 978 aa, synthetic construct
  REGION 1..978: note = engineered CasX variant
QEIKRINGIRRRLVKDSNTKKAGKTGPMKTLLVRVMTPDLRERLENLRKKPENIPQPISNTSRANLNKLLTDYTEMKKAILHVYWEEFQKDPVGLMSRVAQPASKKIDQNKLKPEMDEKGNLTTAGFACSQCGQPLFVYKLEQVSEKGKAYTNYFGRCNVAEHEKLILLAQLKPEKDSDEAVTYSLGKFGQRALDFYSIHVTKESTHPVKPLAQIAGNRYASHPVGKALSDACMGTIASFLSKYQDIIIEHQKVVKGNQKRLESLRELAGKENLEYPSVTLPPQPHTKEGVDAYNEVIARVRMWVNLNLWQKLKLSRDDAKPLLRLKNFPSFPLVERQANEVDWWDMVCNVKKLINEKKEDGKVFWQNLAGYKRQEALRPYLSSEEDRKKGKKFARYQLGDLLLHLEKKHGEDWGKVYDEAWERIDKKVEGLSKHIKLEEERRSEDAQSKAALTDWLRAKASFVIEGLKEADKDEFCRCELKLQKWYGDLRGKPFAIEAENSILDISGFSKQYNCAFIWQKDGVKKLNLYLIINYFKGGKLRFKKIKPEAFEANRFYTVINKKSGEIVPMEVNFNFDDPNLIILPLAFGKRQGREFIWNDLLSLETGSLKLANGRVIEKTLYNRRTRQDEPALFVALTFERREVLDSSNIKPMNLIGVDRGENIPAVIALTDPEGCPLSRFKDSLGNPTHILRIGESYKEKQRTIQAKKEVEQRRAGGYSRKYASKAKNLADDMVRNTARDLLYYAVTQDAMLIFENLSRGFGRQGKRTFMAERQYTRMEDWLTAKLAYEGLPSKTYLSKTLAQYTSKTCSNCGFTITSADYDRVLEKLKKTATGWMTTINGKELKVEGQITYYNRYKRQNVVKDLSVELDRLSEESVNNDISSWTKGRSGEALSLLKKRFSHRPVQEKFVCLNCGFETHADEQAALNIARSWLFLRSQEYKKYQTNKTTGNTDKRAFVETWQSFYRKKLKEVWKPAV

SEQ ID NO: 41972 - protein, 978 aa, synthetic construct
  REGION 1..978: note = engineered CasX variant
QEIKRINGIRRRLVKDSNTKKAGKTGPMKTLLVRVMTPDLRERLENLRKKPENIPQPISNTSRANLNKLLTDYTEMKKAILHVYWEEFQKDPVGLMSRVAQPASKKIDQNKLKPEMDEKGNLTTAGFACSQCGQPLFVYKLEQVSEKGKAYTNYFGRCNVAEHEKLILLAQLKPEKDSDEAVTYSLGKFGQRALDFYSIHVTKESTHPVKPLAQIAGNRYASSPVGKALSDACMGTIASFLSKYQDIIIEHQKVVKGNQKRLESLRELAGKENLEYPSVTLPPQPHTKEGVDAYNEVIARVRMWVNLNLWQKLKLSRDDAKPLLRLKNFPSFPLVERQANEVDWWDMVCNVKKLINEKKEDGKVFWQNLAGYKRQEALRPYLSSEEDRKKGKKFARYQLGDLLLHLEKKHGEDWGKVYDEAWERIDKKVEGLSKHIKLEEERRSEDAQSKAALTDWLRAKASFVIEGLKEADKDEFCRCELKLQKWYGDLRGKPFAIEAENSILDISGFSKQYNCAFIWQKDGVKKLNLYLIINYFKGGKLRFKKIKPEAFEANRFYTVINKKSGEIVPMEVNFNFDDPNLIILPLAFGKRQGREFIWNDLLSLETGSLKLANGRVIEKTLYNRRTRQDEPALFVALTFERREVLDSSNIKPMNLIGVDRGENIPAVIALTDPEGCPLSRFKDSLGNPTHILRIGESYKEKQRTIQAKKEVEQRRAGGYSRKYASKAKNLADDMVRNTARDLLYYAVTQDAMLIFENLSRGFGRQGKRTFMAERQYTRMEDWLTAKLAYEGLPSKTYLSKTLAQYTSKTCSNCGFTITSADYDRVLEKLKKTATGWMTTINGKELKVEGQITYYNRYKRQNVVKDLSVELDRLSEESVNNDISSWTKGRSGEALSLLKKRFSHRPVQEKFVCLNCGFETHADEQAALNIARSWLFLRSQEYKKYQTNKTTGNTDKRAFVETWQSFYRKKLKEVWKPAV

SEQ ID NO: 41973 - protein, 978 aa, synthetic construct
  REGION 1..978: note = engineered CasX variant
QEIKRINGIRRRLVKDSNTKKAGKTGPMKTLLVRVMTPDLRERLENLRKKPENIPQPISNTSRANLNKLLTDYTEMKKAILHVYWEEFQKDPVGLMSRVAQPASKKIDQNKLKPEMDEKGNLTTAGFACSQCGQPLFVYKLEQVSEKGKAYTNYFGRCNVAEHEKLILLAQLKPEKDSDEAVTYSLGKFGQRALDFYSIHVTKESTHPVKPLAQIAGNRYASTPVGKALSDACMGTIASFLSKYQDIIIEHQKVVKGNQKRLESLRELAGKENLEYPSVTLPPQPHTKEGVDAYNEVIARVRMWVNLNLWQKLKLSRDDAKPLLRLKNFPSFPLVERQANEVDWWDMVCNVKKLINEKKEDGKVFWQNLAGYKRQEALRPYLSSEEDRKKGKKFARYQLGDLLLHLEKKHGEDWGKVYDEAWERIDKKVEGLSKHIKLEEERRSEDAQSKAALTDWLRAKASFVIEGLKEADKDEFCRCELKLQKWYGDLRGKPFAIEAENSILDISGFSKQYNCAFIWQKDGVKKLNLYLIINYFKGGKLRFKKIKPEAFEANRFYTVINKKSGEIVPMEVNFNFDDPNLIILPLAFGKRQGREFIWNDLLSLETGSLKLANGRVIEKTLYNRRTRQDEPALFVALTFERREVLDSSNIKPMNLIGVDRGENIPAVIALTDPEGCPLSRFKDSLGNPTHILRIGESYKEKQRTIQAKKEVEQRRAGGYSRKYASKAKNLADDMVRNTARDLLYYAVTQDAMLIFENLSRGFGRQGKRTFMAERQYTRMEDWLTAKLAYEGLPSKTYLSKTLAQYTSKTCSNCGFTITSADYDRVLEKLKKTATGWMTTINGKELKVEGQITYYNRYKRQNVVKDLSVELDRLSEESVNNDISSWTKGRSGEALSLLKKRFSHRPVQEKFVCLNCGFETHADEQAALNIARSWLFLRSQEYKKYQTNKTTGNTDKRAFVETWQSFYRKKLKEVWKPAV

SEQ ID NO: 41974 - protein, 978 aa, synthetic construct
  REGION 1..978: note = engineered CasX variant
QEIKRINGIRRRLVKDSNTKKAGKTGPMKTLLVRVMTPDLRERLENLRKKPENIPQPISNTSRANLNKLLTDYTEMKKAILHVYWEEFQKDPVGLMSRVAQPASKKIDQNKLKPEMDEKGNLTTAGFACSQCGQPLFVYKLEQVSEKGKAYTNYFGRCNVAEHEKLILLAQLKPEKDSDEAVTYSLGKFGQRALDFYSIHVTKESTHPVKPLAQIAGNRYASAPVGKALSDACMGTIASFLSKYQDIIIEHQKVVKGNQKRLESLRELAGKENLEYPSVTLPPQPHTKEGVDAYNEVIARVRMWVNLNLWQKLKLSRDDAKPLLRLKNFPSFPLVERQANEVDWWDMVCNVKKLINEKKEDGKVFWQNLAGYKRQEALRPYLSSEEDRKKGKKFARYQLGDLLLHLEKKHGEDWGKVYDEAWERIDKKVEGLSKHIKLEEERRSEDAQSKAALTDWLRAKASFVIEGLKEADKDEFCRCELKLQKWYGDLRGKPFAIEAENSILDISGFSKQYNCAFIWQKDGVKKLNLYLIINYFKGGKLRFKKIKPEAFEANRFYTVINKKSGEIVPMEVNFNFDDPNLIILPLAFGKRQGREFIWNDLLSLETGSLKLANGRVIEKTLYNRRTRQDEPALFVALTFERREVLDSSNIKPMNLIGVDRGENIPAVIALTDPEGCPLSRFKDSLGNPTHILRIGESYKEKQRTIQAKKEVEQRRAGGYSRKYASKAKNLADDMVRNTARDLLYYAVTQDAMLIFENLSRGFGRQGKRTFMAERQYTRMEDWLTAKLAYEGLPSKTYLSKTLAQYTSKTCSNCGFTITSADYDRVLEKLKKTATGWMTTINGKELKVEGQITYYNRYKRQNVVKDLSVELDRLSEESVNNDISSWTKGRSGEALSLLKKRFSHRPVQEKFVCLNCGFETHADEQAALNIARSWLFLRSQEYKKYQTNKTTGNTDKRAFVETWQSFYRKKLKEVWKPAV

SEQ ID NO: 41975 - protein, 978 aa, synthetic construct
  REGION 1..978: note = engineered CasX variant
QEIKRINGIRRRLVKDSNTKKAGKTGPMKTLLVRVMTPDLRERLENLRKKPENIPQPISNTSRANLNKLLTDYTEMKKAILHVYWEEFQKDPVGLMSRVAQPASKKIDQNKLKPEMDEKGNLTTAGFACSQCGQPLFVYKLEQVSEKGKAYTNYFGRCNVAEHEKLILLAQLKPEKDSDEAVTYSLGKFGQRALDFYSIHVTKESTHPVKPLAQIAGNRYASVPVGKALSDACMGTIASFLSKYQDIIIEHQKVVKGNQKRLESLRELAGKENLEYPSVTLPPQPHTKEGVDAYNEVIARVRMWVNLNLWQKLKLSRDDAKPLLRLKNFPSFPLVERQANEVDWWDMVCNVKKLINEKKEDGKVFWQNLAGYKRQEALRPYLSSEEDRKKGKKFARYQLGDLLLHLEKKHGEDWGKVYDEAWERIDKKVEGLSKHIKLEEERRSEDAQSKAALTDWLRAKASFVIEGLKEADKDEFCRCELKLQKWYGDLRGKPFAIEAENSILDISGFSKQYNCAFIWQKDGVKKLNLYLIINYFKGGKLRFKKIKPEAFEANRFYTVINKKSGEIVPMEVNFNFDDPNLIILPLAFGKRQGREFIWNDLLSLETGSLKLANGRVIEKTLYNRRTRQDEPALFVALTFERREVLDSSNIKPMNLIGVDRGENIPAVIALTDPEGCPLSRFKDSLGNPTHILRIGESYKEKQRTIQAKKEVEQRRAGGYSRKYASKAKNLADDMVRNTARDLLYYAVTQDAMLIFENLSRGFGRQGKRTFMAERQYTRMEDWLTAKLAYEGLPSKTYLSKTLAQYTSKTCSNCGFTITSADYDRVLEKLKKTATGWMTTINGKELKVEGQITYYNRYKRQNVVKDLSVELDRLSEESVNNDISSWTKGRSGEALSLLKKRFSHRPVQEKFVCLNCGFETHADEQAALNIARSWLFLRSQEYKKYQTNKTTGNTDKRAFVETWQSFYRKKLKEVWKPAV

SEQ ID NO: 41976 - protein, 978 aa, synthetic construct
  REGION 1..978: note = engineered CasX variant
QEIKRINGIRRRLVKDSNTKKAGKTGPMKTLLVRVMTPDLRERLENLRKKPENIPQPISNTSRANLNKLLTDYTEMKKAILHVYWEEFQKDPVGLMSRVAQPASKKIDQNKLKPEMDEKGNLTTAGFACSQCGQPLFVYKLEQVSEKGKAYTNYFGRCNVAEHEKLIKLAQLKPEKDSDEAVTYSLGKFGQRALDFYSIHVTKESTHPVKPLAQIAGNRYASGPVGKALSDACMGTIASFLSKYQDIIIEHQKVVKGNQKRLESLRELAGKENLEYPSVTLPPQPHTKEGVDAYNEVIARVRMWVNLNLWQKLKLSRDDAKPLLRLKNFPSFPLVERQANEVDWWDMVCNVKKLINEKKEDGKVFWQNLAGYKRQEALRPYLSSEEDRKKGKKFARYQLGDLLLHLEKKHGEDWGKVYDEAWERIDKKVEGLSKHIKLEEERRSEDAQSKAALTDWLRAKASFVIEGLKEADKDEFCRCELKLQKWYGDLRGKPFAIEAENSILDISGFSKQYNCAFIWQKDGVKKLNLYLIINYFKGGKLRFKKIKPEAFEANRFYTVINKKSGEIVPMEVNFNFDDPNLIILPLAFGKRQGREFIWNDLLSLETGSLKLANGRVIEKTLYNRRTRQDEPALFVALTFERREVLDSSNIKPMNLIGVDRGENIPAVIALTDPEGCPLSRFKDSLGNPTHILRIGESYKEKQRTIQAKKEVEQRRAGGYSRKYASKAKNLADDMVRNTARDLLYYAVTQDAMLIFENLSRGFGRQGKRTFMAERQYTRMEDWLTAKLAYEGLPSKTYLSKTLAQYTSKTCSNCGFTITSADYDRVLEKLKKTATGWMTTINGKELKVEGQITYYNRYKRQNVVKDLSVELDRLSEESVNNDISSWTKGRSGEALSLLKKRFSHRPVQEKFVCLNCGFETHADEQAALNIARSWLFLRSQEYKKYQTNKTTGNTDKRAFVETWQSFYRKKLKEVWKPAV

SEQ ID NO: 41977 - protein, 977 aa, synthetic construct
  REGION 1..977: note = engineered CasX variant
QEIKRINGIRRRLVKDSNTKKAGKTGPMKTLLVRVMTPDLRERLENLRKKPENIPQPISNTSRANLNKLLTDYTEMKKAILHVYWEEFQKDPVGLMSRVAQPASKKIDQNKLKPEMDEKGNLTTAGFACSQCGQPLFVYKLEQVSEKGKAYTNYFGRCNVAEHEKLILLAQLKPEKDSDEAVTYSLGKFGQRALDFYSIHVTKESTHPVKPLAQIAGNRYASPVGKALSDACMGTIASFLSKYQDIIIEHQKVVKGNQKRLESLRELAGKENLEYPSVTLPPQPHTKEGVDAYNEVIARVRMWVNLNLWQKLKLSRDDAKPLLRLKNFPSFPLVERQANEVDWWDMVCNVKKLINEKKEDGKVFWQNLAGYKRQEALRPYLSSEEDRKKGKKFARYQLGDLLLHLEKKHGEDWGKVYDEAWERIDKKVEGLSKHIKLEEERRSEDAQSKAALTDWLRAKASFVIEGLKEADKDEFCRCELKLQKWYGDLRGKPFAIEAENSILDISGFSKQYNCAFIWQKDGVKKLNLYLIINYFKGGKLRFKKIKPEAFEANRFYTVINKKSGEIVPMEVNFNFDDPNLIILPLAFGKRQGREFIWNDLLSLETGSLKLANGRVIEKTLYNRRTRQDEPALFVALTFERREVLDSSNIKPMNLIGVDRGENIPAVIALTDPEGCPLSRFKDSLGNPTHILRIGESYKEKQRTIQAKKEVEQRRAGGYSRKYASKAKNLADDMVRNTARDLLYYAVTQDAMLIFENLSRGFGRQGKRTFMAERQYTRMEDWLTAKLAYEGLPSKTYLSKTLAQYTSKTCSNCGFTITSADYDRVLEKLKKTATGWMTTINGKELKVEGQITYYNRYKRQNVVKDLSVELDRLSEESVNNDISSWTKGRSGEALSLLKKRFSHRPVQEKFVCLNCGFETHADEQAALNIARSWLFLRSQEYKKYQTNKTTGNTDKRAFVETWQSFYRKKLKEVWKPAV

SEQ ID NO: 41978 - protein, 978 aa, synthetic construct
  REGION 1..978: note = engineered CasX variant
QEIKRINGIRRRLVKDSNTKKAGKTGPMKTLLVRVMTPDLRERLENLRKKPENIPQPISNTSRANLNKLLTDYTEMKKAILHVYWEEFQKDPVGLMSRVAQPASKKIDQNKLKPEMDEKGNLTTAGFACSQCGQPLFVYKLEQVSEKGKAYTNYFGRCNVAEHEKLILLAQLKPEKDSDEAVTYSLGKFGQRALDFYSIHVTKESTHPVKPLAQIAGNRYASYPVGKALSDACMGTIASFLSKYQDIIIEHQKVVKGNQKRLESLRELAGKENLEYPSVTLPPQPHTKEGVDAYNEVIARVRMWVNLNLWQKLKLSRDDAKPLLRLKGFPSFPLVERQANEVDWWDMVCNVKKLINEKKEDGKVFWQNLAGYKRQEALRPYLSSEEDRKKGKKFARYQLGDLLNHLEKKHGEDWGKVYDEAWERIDKKVEGLSKHIKLEEERRSEDAQSKAALTDWLRAKASFVIEGLKEADKDEFCRCELKLQKWYGDLRGKPFAIEAENSILDISGFSKQYNCAFIWQKDGVKKLNLYLIINYFKGGKLRFKKIKPEAFEANRFYTVINKKSGEIVPMEVNFNFDDPNLIILPLAFGKRQGREFIWNDLLSLETGSLKLANGRVIEKTLYNRRTRQDEPALFVALTFERREVLDSSNIKPMNLIGVDRGENIPAVIALTDPEGCPLSRFKDSLGNPTHILRIGESYKEKQRTIQAKKEVEQRRAGGYSRKYASKAKNLADDMVRNTARDLLYYAVTQDAMLIFENLSRGFGRQGKRTFMAERQYTRMEDWLTAKLAYEGLPSKTYLSKTLAQYTSKTCSNCGFTITSADYDRVLEKLKKTATGWMTTINGKELKVEGQITYYNRYKRQNVVKDLSVELDRLSEESVNNDISSWTKGRSGEALSLLKKRFSHRPVQEKFVCLNCGFETHADEQAALNIARSWLFLRSQEYKKYQTNKTTGNTDKRAFVETWQSFYRKKLKEVWKPAV

SEQ ID NO: 41979 - protein, 978 aa, synthetic construct
  REGION 1..978: note = engineered CasX variant
QEIKRINGIRRRLVKDSNTKKAGKTGPMKTLLVRVMTPDLRERLENLRKKPENIPQPISNTSRANLNKLLTDYTEMKKAILHVYWEEFQKDPVGLMSRVAQPASKKIDQNKLKPEMDEKGNLTTAGFACSQCGQPLFVYKLEQVSEKGKAYTNYFGRCNVAEHEKLILLAQLKPEKDSDEAVTYSLGKFGQRALDFYSIHVTKESTHPVKPLAQIAGNRYASHPVGKALSDACMGTIASFLSKYQDIIIEHQKVVKGNQKRLESLRELAGKENLEYPSVTLPPQPHTKEGVDAYNEVIARVRMWVNLNLWQKLKLSRDDAKPLLRLKGFPSFPLVERQANEVDWWDMVCNVKKLINEKKEDGKVFWQNLAGYKRQEALRPYLSSEEDRKKGKKFARYQLGDLLNHLEKKHGEDWGKVYDEAWERIDKKVEGLSKHIKLEEERRSEDAQSKAALTDWLRAKASFVIEGLKEADKDEFCRCELKLQKWYGDLRGKPFAIEAENSILDISGFSKQYNCAFIWQKDGVKKLNLYLIINYFKGGKLRFKKIKPEAFEANRFYTVINKKSGEIVPMEVNFNFDDPNLIILPLAFGKRQGREFIWNDLLSLETGSLKLANGRVIEKTLYNRRTRQDEPALFVALTFERREVLDSSNIKPMNLIGVDRGENIPAVIALTDPEGCPLSRFKDSLGNPTHILRIGESYKEKQRTIQAKKEVEQRRAGGYSRKYASKAKNLADDMVRNTARDLLYYAVTQDAMLIFENLSRGFGRQGKRTFMAERQYTRMEDWLTAKLAYEGLPSKTYLSKTLAQYTSKTCSNCGFTITSADYDRVLEKLKKTATGWMTTINGKELKVEGQITYYNRYKRQNVVKDLSVELDRLSEESVNNDISSWTKGRSGEALSLLKKRFSHRPVQEKFVCLNCGFETHADEQAALNIARSWLFLRSQEYKKYQTNKTTGNTDKRAFVETWQSFYRKKLKEVWKPAV

SEQ ID NO: 41980 - protein, 978 aa, synthetic construct
  REGION 1..978: note = engineered CasX variant
QEIKRINGIRRRLVKDSNTKKAGKTGPMKTLLVRVMTPDLRERLENLRKKPENIPQPISNTSRANLNKLLTDYTEMKKAILHVYWEEFQKDPVGLMSRVAQPASKKIDQNKLKPEMDEKGNLTTAGFACSQCGQPLFVYKLEQVSEKGKAYTNYFGRCNVAEHEKLILLAQLKPEKDSDEAVTYSLGKFGQRALDFYSIHVTKESTHPVKPLAQIAGNRYASSPVGKALSDACMGTIASFLSKYQDIIIEHQKVVKGNQKRLESLRELAGKENLEYPSVTLPPQPHTKEGVDAYNEVIARVRMWVNLNLWQKLKLSRDDAKPLLRLKGFPSFPLVERQANEVDWWDMVCNVKKLINEKKEDGKVFWQNLAGYKRQEALRPYLSSEEDRKKGKKFARYQLGDLLNHLEKKHGEDWGKVYDEAWERIDKKVEGLSKHIKLEEERRSEDAQSKAALTDWLRAKASFVIEGLKEADKDEFCRCELKLQKWYGDLRGKPFAIEAENSILDISGFSKQYNCAFIWQKDGVKKLNLYLIINYFKGGKLRFKKIKPEAFEANRFYTVINKKSGEIVPMEVNFNFDDPNLIILPLAFGKRQGREFIWNDLLSLETGSLKLANGRVIEKTLYNRRTRQDEPALFVALTFERREVLDSSNIKPMNLIGVDRGENIPAVIALTDPEGCPLSRFKDSLGNPTHILRIGESYKEKQRTIQAKKEVEQRRAGGYSRKYASKAKNLADDMVRNTARDLLYYAVTQDAMLIFENLSRGFGRQGKRTFMAERQYTRMEDWLTAKLAYEGLPSKTYLSKTLAQYTSKTCSNCGFTITSADYDRVLEKLKKTATGWMTTINGKELKVEGQITYYNRYKRQNVVKDLSVELDRLSEESVNNDISSWTKGRSGEALSLLKKRFSHRPVQEKFVCLNCGFETHADEQAALNIARSWLFLRSQEYKKYQTNKTTGNTDKRAFVETWQSFYRKKLKEVWKPAV

SEQ ID NO: 41981 - protein, 978 aa, synthetic construct
  REGION 1..978: note = engineered CasX variant
QEIKRINGIRRRLVKDSNTKKAGKTGPMKTLLVRVMTPDLRERLENLRKKPENIPQPISNTSRANLNKLLTDYTEMKKAILHVYWEEFQKDPVGLMSRVAQPASKKIDQNKLKPEMDEKGNLTTAGFACSQCGQPLFVYKLEQVSEKGKAYTNYFGRCNVAEHEKLILLAQLKPEKDSDEAVTYSLGKFGQRALDFYSIHVTKESTHPVKPLAQIAGNRYASTPVGKALSDACMGTIASFLSKYQDIIIEHQKVVKGNQKRLESLRELAGKENLEYPSVTLPPQPHTKEGVDAYNEVIARVRMWVNLNLWQKLKLSRDDAKPLLRLKGFPSFPLVERQANEVDWWDMVCNVKKLINEKKEDGKVFWQNLAGYKRQEALRPYLSSEEDRKKGKKFARYQLGDLLNHLEKKHGEDWGKVYDEAWERIDKKVEGLSKHIKLEEERRSEDAQSKAALTDWLRAKASFVIEGLKEADKDEFCRCELKLQKWYGDLRGKPFAIEAENSILDISGFSKQYNCAFIWQKDGVKKLNLYLIINYFKGGKLRFKKIKPEAFEANRFYTVINKKSGEIVPMEVNFNFDDPNLIILPLAFGKRQGREFIWNDLLSLETGSLKLANGRVIEKTLYNRRTRQDEPALFVALTFERREVLDSSNIKPMNLIGVDRGENIPAVIALTDPEGCPLSRFKDSLGNPTHILRIGESYKEKQRTIQAKKEVEQRRAGGYSRKYASKAKNLADDMVRNTARDLLYYAVTQDAMLIFENLSRGFGRQGKRTFMAERQYTRMEDWLTAKLAYEGLPSKTYLSKTLAQYTSKTCSNCGFTITSADYDRVLEKLKKTATGWMTTINGKELKVEGQITYYNRYKRQNVVKDLSVELDRLSEESVNNDISSWTKGRSGEALSLLKKRFSHRPVQEKFVCLNCGFETHADEQAALNIARSWLFLRSQEYKKYQTNKTTGNTDKRAFVETWQSFYRKKLKEVWKPAV

SEQ ID NO: 41982 - protein, 978 aa, synthetic construct
  REGION 1..978: note = engineered CasX variant
QEIKRINGIRRRLVKDSNTKKAGKTGPMKTLLVRVMTPDLRERLENLRKKPENIPQPISNTSRANLNKLLTDYTEMKKAILHVYWEEFQKDPVGLMSRVAQPASKKIDQNKLKPEMDEKGNLTTAGFACSQCGQPLFVYKLEQVSEKGKAYTNYFGRCNVAEHEKLILLAQLKPEKDSDEAVTYSLGKFGQRALDFYSIHVTKESTHPVKPLAQIAGNRYASAPVGKALSDACMGTIASFLSKYQDIIIEHQKVVKGNQKRLESLRELAGKENLEYPSVTLPPQPHTKEGVDAYNEVIARVRMWVNLNLWQKLKLSRDDAKPLLRLKGFPSFPLVERQANEVDWWDMVCNVKKLINEKKEDGKVFWQNLAGYKRQEALRPYLSSEEDRKKGKKFARYQLGDLLNHLEKKHGEDWGKVYDEAWERIDKKVEGLSKHIKLEEERRSEDAQSKAALTDWLRAKASFVIEGLKEADKDEFCRCELKLQKWYGDLRGKPFAIEAENSILDISGFSKQYNCAFIWQKDGVKKLNLYLIINYFKGGKLRFKKIKPEAFEANRFYTVINKKSGEIVPMEVNFNFDDPNLIILPLAFGKRQGREFIWNDLLSLETGSLKLANGRVIEKTLYNRRTRQDEPALFVALTFERREVLDSSNIKPMNLIGVDRGENIPAVIALTDPEGCPLSRFKDSLGNPTHILRIGESYKEKQRTIQAKKEVEQRRAGGYSRKYASKAKNLADDMVRNTARDLLYYAVTQDAMLIFENLSRGFGRQGKRTFMAERQYTRMEDWLTAKLAYEGLPSKTYLSKTLAQYTSKTCSNCGFTITSADYDRVLEKLKKTATGWMTTINGKELKVEGQITYYNRYKRQNVVKDLSVELDRLSEESVNNDISSWTKGRSGEALSLLKKRFSHRPVQEKFVCLNCGFETHADEQAALNIARSWLFLRSQEYKKYQTNKTTGNTDKRAFVETWQSFYRKKLKEVWKPAV

SEQ ID NO: 41983 - protein, 978 aa, synthetic construct
  REGION 1..978: note = engineered CasX variant
QEIKRINGIRRRLVKDSNTKKAGKTGPMKTLLVRVMTPDLRERLENLRKKPENIPQPISNTSRANLNKLLTDYTEMKKAILHVYWEEFQKDPVGLMSRVAQPASKKIDQNKLKPEMDEKGNLTTAGFACSQCGQPLFVYKLEQVSEKGKAYTNYFGRCNVAEHEKLILLAQLKPEKDSDEAVTYSLGKFGQRALDFYSIHVTKESTHPVKPLAQIAGNRYASVPVGKALSDACMGTIASFLSKYQDIIIEHQKVVKGNQKRLESLRELAGKENLEYPSVTLPPQPHTKEGVDAYNEVIARVRMWVNLNLWQKLKLSRDDAKPLLRLKGFPSFPLVERQANEVDWWDMVCNVKKLINEKKEDGKVFWQNLAGYKRQEALRPYLSSEEDRKKGKKFARYQLGDLLNHLEKKHGEDWGKVYDEAWERIDKKVEGLSKHIKLEEERRSEDAQSKAALTDWLRAKASFVIEGLKEADKDEFCRCELKLQKWYGDLRGKPFAIEAENSILDISGFSKQYNCAFIWQKDGVKKLNLYLIINYFKGGKLRFKKIKPEAFEANRFYTVINKKSGEIVPMEVNFNFDDPNLIILPLAFGKRQGREFIWNDLLSLETGSLKLANGRVIEKTLYNRRTRQDEPALFVALTFERREVLDSSNIKPMNLIGVDRGENIPAVIALTDPEGCPLSRFKDSLGNPTHILRIGESYKEKQRTIQAKKEVEQRRAGGYSRKYASKAKNLADDMVRNTARDLLYYAVTQDAMLIFENLSRGFGRQGKRTFMAERQYTRMEDWLTAKLAYEGLPSKTYLSKTLAQYTSKTCSNCGFTITSADYDRVLEKLKKTATGWMTTINGKELKVEGQITYYNRYKRQNVVKDLSVELDRLSEESVNNDISSWTKGRSGEALSLLKKRFSHRPVQEKFVCLNCGFETHADEQAALNIARSWLFLRSQEYKKYQTNKTTGNTDKRAFVETWQSFYRKKLKEVWKPAV

SEQ ID NO: 41984 - protein, 978 aa, synthetic construct
  REGION 1..978: note = engineered CasX variant
QEIKRINGIRRRLVKDSNTKKAGKTGPMKTLLVRVMTPDLRERLENLRKKPENIPQPISNTSRANLNKLLTDYTEMKKAILHVYWEEFQKDPVGLMSRVAQPASKKIDQNKLKPEMDEKGNLTTAGFACSQCGQPLFVYKLEQVSEKGKAYTNYFGRCNVAEHEKLIKLAQLKPEKDSDEAVTYSLGKFGQRALDFYSIHVTKESTHPVKPLAQIAGNRYASGPVGKALSDACMGTIASFLSKYQDIIIEHQKVVKGNQKRLESLRELAGKENLEYPSVTLPPQPHTKEGVDAYNEVIARVRMWVNLNLWQKLKLSRDDAKPLLRLKGFPSFPLVERQANEVDWWDMVCNVKKLINEKKEDGKVFWQNLAGYKRQEALRPYLSSEEDRKKGKKFARYQLGDLLNHLEKKHGEDWGKVYDEAWERIDKKVEGLSKHIKLEEERRSEDAQSKAALTDWLRAKASFVIEGLKEADKDEFCRCELKLQKWYGDLRGKPFAIEAENSILDISGFSKQYNCAFIWQKDGVKKLNLYLIINYFKGGKLRFKKIKPEAFEANRFYTVINKKSGEIVPMEVNFNFDDPNLIILPLAFGKRQGREFIWNDLLSLETGSLKLANGRVIEKTLYNRRTRQDEPALFVALTFERREVLDSSNIKPMNLIGVDRGENIPAVIALTDPEGCPLSRFKDSLGNPTHILRIGESYKEKQRTIQAKKEVEQRRAGGYSRKYASKAKNLADDMVRNTARDLLYYAVTQDAMLIFENLSRGFGRQGKRTFMAERQYTRMEDWLTAKLAYEGLPSKTYLSKTLAQYTSKTCSNCGFTITSADYDRVLEKLKKTATGWMTTINGKELKVEGQITYYNRYKRQNVVKDLSVELDRLSEESVNNDISSWTKGRSGEALSLLKKRFSHRPVQEKFVCLNCGFETHADEQAALNIARSWLFLRSQEYKKYQTNKTTGNTDKRAFVETWQSFYRKKLKEVWKPAV

SEQ ID NO: 41985 - protein, 977 aa, synthetic construct
  REGION 1..977: note = engineered CasX variant
QEIKRINGIRRRLVKDSNTKKAGKTGPMKTLLVRVMTPDLRERLENLRKKPENIPQPISNTSRANLNKLLTDYTEMKKAILHVYWEEFQKDPVGLMSRVAQPASKKIDQNKLKPEMDEKGNLTTAGFACSQCGQPLFVYKLEQVSEKGKAYTNYFGRCNVAEHEKLILLAQLKPEKDSDEAVTYSLGKFGQRALDFYSIHVTKESTHPVKPLAQIAGNRYASPVGKALSDACMGTIASFLSKYQDIIIEHQKVVKGNQKRLESLRELAGKENLEYPSVTLPPQPHTKEGVDAYNEVIARVRMWVNLNLWQKLKLSRDDAKPLLRLKGFPSFPLVERQANEVDWWDMVCNVKKLINEKKEDGKVFWQNLAGYKRQEALRPYLSSEEDRKKGKKFARYQLGDLLNHLEKKHGEDWGKVYDEAWERIDKKVEGLSKHIKLEEERRSEDAQSKAALTDWLRAKASFVIEGLKEADKDEFCRCELKLQKWYGDLRGKPFAIEAENSILDISGFSKQYNCAFIWQKDGVKKLNLYLIINYFKGGKLRFKKIKPEAFEANRFYTVINKKSGEIVPMEVNFNFDDPNLIILPLAFGKRQGREFIWNDLLSLETGSLKLANGRVIEKTLYNRRTRQDEPALFVALTFERREVLDSSNIKPMNLIGVDRGENIPAVIALTDPEGCPLSRFKDSLGNPTHILRIGESYKEKQRTIQAKKEVEQRRAGGYSRKYASKAKNLADDMVRNTARDLLYYAVTQDAMLIFENLSRGFGRQGKRTFMAERQYTRMEDWLTAKLAYEGLPSKTYLSKTLAQYTSKTCSNCGFTITSADYDRVLEKLKKTATGWMTTINGKELKVEGQITYYNRYKRQNVVKDLSVELDRLSEESVNNDISSWTKGRSGEALSLLKKRFSHRPVQEKFVCLNCGFETHADEQAALNIARSWLFLRSQEYKKYQTNKTTGNTDKRAFVETWQSFYRKKLKEVWKPAV

SEQ ID NO: 41986 - protein, 978 aa, synthetic construct
  REGION 1..978: note = engineered CasX variant
QEIKRINGIRRRLVKDSNTKKAGKTGPMKTLLVRVMTPDLRERLENLRKKPENIPQPISNTSRANLNKLLTDYTEMKKAILHVYWEEFQKDPVGLMSRVAQPASKKIDQNKLKPEMDEKGNLTTAGFACSQCGQPLFVYKLEQVSEKGKAYTNYFGRCNVAEHEKLILLAQLKPEKDSDEAVTYSLGKFGQRALDFYSIHVTKESTHPVKPLAQIAGNRYASYPVGKALSDACMGTIASFLSKYQDIIIEHQKVVKGNQKRLESLRELAGKENLEYPSVTLPPQPHTKEGVDAYNEVIARVRMWVNLNLWQKLKLSRDDAKPLLRLKGFPSFPLVERQANEVDWWDMVCNVKKLINEKKEDGKVFWQNLAGYKRQEALRPYLSSEEDRKKGKKFARYQLGDLLWHLEKKHGEDWGKVYDEAWERIDKKVEGLSKHIKLEEERRSEDAQSKAALTDWLRAKASFVIEGLKEADKDEFCRCELKLQKWYGDLRGKPFAIEAENSILDISGFSKQYNCAFIWQKDGVKKLNLYLIINYFKGGKLRFKKIKPEAFEANRFYTVINKKSGEIVPMEVNFNFDDPNLIILPLAFGKRQGREFIWNDLLSLETGSLKLANGRVIEKTLYNRRTRQDEPALFVALTFERREVLDSSNIKPMNLIGVDRGENIPAVIALTDPEGCPLSRFKDSLGNPTHILRIGESYKEKQRTIQAKKEVEQRRAGGYSRKYASKAKNLADDMVRNTARDLLYYAVTQDAMLIFENLSRGFGRQGKRTFMAERQYTRMEDWLTAKLAYEGLPSKTYLSKTLAQYTSKTCSNCGFTITSADYDRVLEKLKKTATGWMTTINGKELKVEGQITYYNRYKRQNVVKDLSVELDRLSEESVNNDISSWTKGRSGEALSLLKKRFSHRPVQEKFVCLNCGFETHADEQAALNIARSWLFLRSQEYKKYQTNKTTGNTDKRAFVETWQSFYRKKLKEVWKPAV

SEQ ID NO: 41987 - protein, 978 aa, synthetic construct
  REGION 1..978: note = engineered CasX variant
QEIKRINGIRRRLVKDSNTKKAGKTGPMKTLLVRVMTPDLRERLENLRKKPENIPQPISNTSRANLNKLLTDYTEMKKAILHVYWEEFQKDPVGLMSRVAQPASKKIDQNKLKPEMDEKGNLTTAGFACSQCGQPLFVYKLEQVSEKGKAYTNYFGRCNVAEHEKLILLAQLKPEKDSDEAVTYSLGKFGQRALDFYSIHVTKESTHPVKPLAQIAGNRYASHPVGKALSDACMGTIASFLSKYQDIIIEHQKVVKGNQKRLESLRELAGKENLEYPSVTLPPQPHTKEGVDAYNEVIARVRMWVNLNLWQKLKLSRDDAKPLLRLKGFPSFPLVERQANEVDWWDMVCNVKKLINEKKEDGKVFWQNLAGYKRQEALRPYLSSEEDRKKGKKFARYQLGDLLWHLEKKHGEDWGKVYDEAWERIDKKVEGLSKHIKLEEERRSEDAQSKAALTDWLRAKASFVIEGLKEADKDEFCRCELKLQKWYGDLRGKPFAIEAENSILDISGFSKQYNCAFIWQKDGVKKLNLYLIINYFKGGKLRFKKIKPEAFEANRFYTVINKKSGEIVPMEVNFNFDDPNLIILPLAFGKRQGREFIWNDLLSLETGSLKLANGRVIEKTLYNRRTRQDEPALFVALTFERREVLDSSNIKPMNLIGVDRGENIPAVIALTDPEGCPLSRFKDSLGNPTHILRIGESYKEKQRTIQAKKEVEQRRAGGYSRKYASKAKNLADDMVRNTARDLLYYAVTQDAMLIFENLSRGFGRQGKRTFMAERQYTRMEDWLTAKLAYEGLPSKTYLSKTLAQYTSKTCSNCGFTITSADYDRVLEKLKKTATGWMTTINGKELKVEGQITYYNRYKRQNVVKDLSVELDRLSEESVNNDISSWTKGRSGEALSLLKKRFSHRPVQEKFVCLNCGFETHADEQAALNIARSWLFLRSQEYKKYQTNKTTGNTDKRAFVETWQSFYRKKLKEVWKPAV

SEQ ID NO: 41988 - protein, 978 aa, synthetic construct
  REGION 1..978: note = engineered CasX variant
QEIKRINGIRRRLVKDSNTKKAGKTGPMKTLLVRVMTPDLRERLENLRKKPENIPQPISNTSRANLNKLLTDYTEMKKAILHVYWEEFQKDPVGLMSRVAQPASKKIDQNKLKPEMDEKGNLTTAGFACSQCGQPLFVYKLEQVSEKGKAYTNYFGRCNVAEHEKLILLAQLKPEKDSDEAVTYSLGKFGQRALDFYSIHVTKESTHPVKPLAQIAGNRYASSPVGKALSDACMGTIASFLSKYQDIIIEHQKVVKGNQKRLESLRELAGKENLEYPSVTLPPQPHTKEGVDAYNEVIARVRMWVNLNLWQKLKLSRDDAKPLLRLKGFPSFPLVERQANEVDWWDMVCNVKKLINEKKEDGKVFWQNLAGYKRQEALRPYLSSEEDRKKGKKFARYQLGDLLWHLEKKHGEDWGKVYDEAWERIDKKVEGLSKHIKLEEERRSEDAQSKAALTDWLRAKASFVIEGLKEADKDEFCRCELKLQKWYGDLRGKPFAIEAENSILDISGFSKQYNCAFIWQKDGVKKLNLYLIINYFKGGKLRFKKIKPEAFEANRFYTVINKKSGEIVPMEVNFNFDDPNLIILPLAFGKRQGREFIWNDLLSLETGSLKLANGRVIEKTLYNRRTRQDEPALFVALTFERREVLDSSNIKPMNLIGVDRGENIPAVIALTDPEGCPLSRFKDSLGNPTHILRIGESYKEKQRTIQAKKEVEQRRAGGYSRKYASKAKNLADDMVRNTARDLLYYAVTQDAMLIFENLSRGFGRQGKRTFMAERQYTRMEDWLTAKLAYEGLPSKTYLSKTLAQYTSKTCSNCGFTITSADYDRVLEKLKKTATGWMTTINGKELKVEGQITYYNRYKRQNVVKDLSVELDRLSEESVNNDISSWTKGRSGEALSLLKKRFSHRPVQEKFVCLNCGFETHADEQAALNIARSWLFLRSQEYKKYQTNKTTGNTDKRAFVETWQSFYRKKLKEVWKPAV

SEQ ID NO: 41989 - protein, 978 aa, synthetic construct
  REGION 1..978: note = engineered CasX variant
QEIKRINGIRRRLVKDSNTKKAGKTGPMKTLLVRVMTPDLRERLENLRKKPENIPQPISNTSRANLNKLLTDYTEMKKAILHVYWEEFQKDPVGLMSRVAQPASKKIDQNKLKPEMDEKGNLTTAGFACSQCGQPLFVYKLEQVSEKGKAYTNYFGRCNVAEHEKLILLAQLKPEKDSDEAVTYSLGKFGQRALDFYSIHVTKESTHPVKPLAQIAGNRYASTPVGKALSDACMGTIASFLSKYQDIIIEHQKVVKGNQKRLESLRELAGKENLEYPSVTLPPQPHTKEGVDAYNEVIARVRMWVNLNLWQKLKLSRDDAKPLLRLKGFPSFPLVERQANEVDWWDMVCNVKKLINEKKEDGKVFWQNLAGYKRQEALRPYLSSEEDRKKGKKFARYQLGDLLWHLEKKHGEDWGKVYDEAWERIDKKVEGLSKHIKLEEERRSEDAQSKAALTDWLRAKASFVIEGLKEADKDEFCRCELKLQKWYGDLRGKPFAIEAENSILDISGFSKQYNCAFIWQKDGVKKLNLYLIINYFKGGKLRFKKIKPEAFEANRFYTVINKKSGEIVPMEVNFNFDDPNLIILPLAFGKRQGREFIWNDLLSLETGSLKLANGRVIEKTLYNRRTRQDEPALFVALTFERREVLDSSNIKPMNLIGVDRGENIPAVIALTDPEGCPLSRFKDSLGNPTHILRIGESYKEKQRTIQAKKEVEQRRAGGYSRKYASKAKNLADDMVRNTARDLLYYAVTQDAMLIFENLSRGFGRQGKRTFMAERQYTRMEDWLTAKLAYEGLPSKTYLSKTLAQYTSKTCSNCGFTITSADYDRVLEKLKKTATGWMTTINGKELKVEGQITYYNRYKRQNVVKDLSVELDRLSEESVNNDISSWTKGRSGEALSLLKKRFSHRPVQEKFVCLNCGFETHADEQAALNIARSWLFLRSQEYKKYQTNKTTGNTDKRAFVETWQSFYRKKLKEVWKPAV

SEQ ID NO: 41990 - protein, 978 aa, synthetic construct
  REGION 1..978: note = engineered CasX variant
QEIKRINGIRRRLVKDSNTKKAGKTGPMKTLLVRVMTPDLRERLENLRKKPENIPQPISNTSRANLNKLLTDYTEMKKAILHVYWEEFQKDPVGLMSRVAQPASKKIDQNKLKPEMDEKGNLTTAGFACSQCGQPLFVYKLEQVSEKGKAYTNYFGRCNVAEHEKLILLAQLKPEKDSDEAVTYSLGKFGQRALDFYSIHVTKESTHPVKPLAQIAGNRYASAPVGKALSDACMGTIASFLSKYQDIIIEHQKVVKGNQKRLESLRELAGKENLEYPSVTLPPQPHTKEGVDAYNEVIARVRMWVNLNLWQKLKLSRDDAKPLLRLKGFPSFPLVERQANEVDWWDMVCNVKKLINEKKEDGKVFWQNLAGYKRQEALRPYLSSEEDRKKGKKFARYQLGDLLWHLEKKHGEDWGKVYDEAWERIDKKVEGLSKHIKLEEERRSEDAQSKAALTDWLRAKASFVIEGLKEADKDEFCRCELKLQKWYGDLRGKPFAIEAENSILDISGFSKQYNCAFIWQKDGVKKLNLYLIINYFKGGKLRFKKIKPEAFEANRFYTVINKKSGEIVPMEVNFNFDDPNLIILPLAFGKRQGREFIWNDLLSLETGSLKLANGRVIEKTLYNRRTRQDEPALFVALTFERREVLDSSNIKPMNLIGVDRGENIPAVIALTDPEGCPLSRFKDSLGNPTHILRIGESYKEKQRTIQAKKEVEQRRAGGYSRKYASKAKNLADDMVRNTARDLLYYAVTQDAMLIFENLSRGFGRQGKRTFMAERQYTRMEDWLTAKLAYEGLPSKTYLSKTLAQYTSKTCSNCGFTITSADYDRVLEKLKKTATGWMTTINGKELKVEGQITYYNRYKRQNVVKDLSVELDRLSEESVNNDISSWTKGRSGEALSLLKKRFSHRPVQEKFVCLNCGFETHADEQAALNIARSWLFLRSQEYKKYQTNKTTGNTDKRAFVETWQSFYRKKLKEVWKPAV

SEQ ID NO: 41991 - protein, 978 aa, synthetic construct
  REGION 1..978: note = engineered CasX variant
QEIKRINGIRRRLVKDSNTKKAGKTGPMKTLLVRVMTPDLRERLENLRKKPENIPQPISNTSRANLNKLLTDYTEMKKAILHVYWEEFQKDPVGLMSRVAQPASKKIDQNKLKPEMDEKGNLTTAGFACSQCGQPLFVYKLEQVSEKGKAYTNYFGRCNVAEHEKLILLAQLKPEKDSDEAVTYSLGKFGQRALDFYSIHVTKESTHPVKPLAQIAGNRYASVPVGKALSDACMGTIASFLSKYQDIIIEHQKVVKGNQKRLESLRELAGKENLEYPSVTLPPQPHTKEGVDAYNEVIARVRMWVNLNLWQKLKLSRDDAKPLLRLKGFPSFPLVERQANEVDWWDMVCNVKKLINEKKEDGKVFWQNLAGYKRQEALRPYLSSEEDRKKGKKFARYQLGDLLWHLEKKHGEDWGKVYDEAWERIDKKVEGLSKHIKLEEERRSEDAQSKAALTDWLRAKASFVIEGLKEADKDEFCRCELKLQKWYGDLRGKPFAIEAENSILDISGFSKQYNCAFIWQKDGVKKLNLYLIINYFKGGKLRFKKIKPEAFEANRFYTVINKKSGEIVPMEVNFNFDDPNLIILPLAFGKRQGREFIWNDLLSLETGSLKLANGRVIEKTLYNRRTRQDEPALFVALTFERREVLDSSNIKPMNLIGVDRGENIPAVIALTDPEGCPLSRFKDSLGNPTHILRIGESYKEKQRTIQAKKEVEQRRAGGYSRKYASKAKNLADDMVRNTARDLLYYAVTQDAMLIFENLSRGFGRQGKRTFMAERQYTRMEDWLTAKLAYEGLPSKTYLSKTLAQYTSKTCSNCGFTITSADYDRVLEKLKKTATGWMTTINGKELKVEGQITYYNRYKRQNVVKDLSVELDRLSEESVNNDISSWTKGRSGEALSLLKKRFSHRPVQEKFVCLNCGFETHADEQAALNIARSWLFLRSQEYKKYQTNKTTGNTDKRAFVETWQSFYRKKLKEVWKPAV

SEQ ID NO: 41992 - protein, 978 aa, synthetic construct
  REGION 1..978: note = engineered CasX variant
QEIKRINGIRRRLVKDSNTKKAGKTGPMKTLLVRVMTPDLRERLENLRKKPENIPQPISNTSRANLNKLLTDYTEMKKAILHVYWEEFQKDPVGLMSRVAQPASKKIDQNKLKPEMDEKGNLTTAGFACSQCGQPLFVYKLEQVSEKGKAYTNYFGRCNVAEHEKLIKLAQLKPEKDSDEAVTYSLGKFGQRALDFYSIHVTKESTHPVKPLAQIAGNRYASGPVGKALSDACMGTIASFLSKYQDIIIEHQKVVKGNQKRLESLRELAGKENLEYPSVTLPPQPHTKEGVDAYNEVIARVRMWVNLNLWQKLKLSRDDAKPLLRLKGFPSFPLVERQANEVDWWDMVCNVKKLINEKKEDGKVFWQNLAGYKRQEALRPYLSSEEDRKKGKKFARYQLGDLLWHLEKKHGEDWGKVYDEAWERIDKKVEGLSKHIKLEEERRSEDAQSKAALTDWLRAKASFVIEGLKEADKDEFCRCELKLQKWYGDLRGKPFAIEAENSILDISGFSKQYNCAFIWQKDGVKKLNLYLIINYFKGGKLRFKKIKPEAFEANRFYTVINKKSGEIVPMEVNFNFDDPNLIILPLAFGKRQGREFIWNDLLSLETGSLKLANGRVIEKTLYNRRTRQDEPALFVALTFERREVLDSSNIKPMNLIGVDRGENIPAVIALTDPEGCPLSRFKDSLGNPTHILRIGESYKEKQRTIQAKKEVEQRRAGGYSRKYASKAKNLADDMVRNTARDLLYYAVTQDAMLIFENLSRGFGRQGKRTFMAERQYTRMEDWLTAKLAYEGLPSKTYLSKTLAQYTSKTCSNCGFTITSADYDRVLEKLKKTATGWMTTINGKELKVEGQITYYNRYKRQNVVKDLSVELDRLSEESVNNDISSWTKGRSGEALSLLKKRFSHRPVQEKFVCLNCGFETHADEQAALNIARSWLFLRSQEYKKYQTNKTTGNTDKRAFVETWQSFYRKKLKEVWKPAV

SEQ ID NO: 41993 - protein, 977 aa, synthetic construct
  REGION 1..977: note = engineered CasX variant
QEIKRINGIRRRLVKDSNTKKAGKTGPMKTLLVRVMTPDLRERLENLRKKPENIPQPISNTSRANLNKLLTDYTEMKKAILHVYWEEFQKDPVGLMSRVAQPASKKIDQNKLKPEMDEKGNLTTAGFACSQCGQPLFVYKLEQVSEKGKAYTNYFGRCNVAEHEKLILLAQLKPEKDSDEAVTYSLGKFGQRALDFYSIHVTKESTHPVKPLAQIAGNRYASPVGKALSDACMGTIASFLSKYQDIIIEHQKVVKGNQKRLESLRELAGKENLEYPSVTLPPQPHTKEGVDAYNEVIARVRMWVNLNLWQKLKLSRDDAKPLLRLKGFPSFPLVERQANEVDWWDMVCNVKKLINEKKEDGKVFWQNLAGYKRQEALRPYLSSEEDRKKGKKFARYQLGDLLWHLEKKHGEDWGKVYDEAWERIDKKVEGLSKHIKLEEERRSEDAQSKAALTDWLRAKASFVIEGLKEADKDEFCRCELKLQKWYGDLRGKPFAIEAENSILDISGFSKQYNCAFIWQKDGVKKLNLYLIINYFKGGKLRFKKIKPEAFEANRFYTVINKKSGEIVPMEVNFNFDDPNLIILPLAFGKRQGREFIWNDLLSLETGSLKLANGRVIEKTLYNRRTRQDEPALFVALTFERREVLDSSNIKPMNLIGVDRGENIPAVIALTDPEGCPLSRFKDSLGNPTHILRIGESYKEKQRTIQAKKEVEQRRAGGYSRKYASKAKNLADDMVRNTARDLLYYAVTQDAMLIFENLSRGFGRQGKRTFMAERQYTRMEDWLTAKLAYEGLPSKTYLSKTLAQYTSKTCSNCGFTITSADYDRVLEKLKKTATGWMTTINGKELKVEGQITYYNRYKRQNVVKDLSVELDRLSEESVNNDISSWTKGRSGEALSLLKKRFSHRPVQEKFVCLNCGFETHADEQAALNIARSWLFLRSQEYKKYQTNKTTGNTDKRAFVETWQSFYRKKLKEVWKPAV

SEQ ID NO: 41994 - protein, 978 aa, synthetic construct
  REGION 1..978: note = engineered CasX variant
QEIKRINGIRRRLVKDSNTKKAGKTGPMKTLLVRVMTPDLRERLENLRKKPENIPQPISNTSRANLNKLLTDYTEMKKAILHVYWEEFQKDPVGLMSRVAQPASKKIDQNKLKPEMDEKGNLTTAGFACSQCGQPLFVYKLEQVSEKGKAYTNYFGRCNVAEHEKLILLAQLKPEKDSDEAVTYSLGKFGQRALDFYSIHVTKESTHPVKPLAQIAGNRYASYPVGKALSDACMGTIASFLSKYQDIIIEHQKVVKGNQKRLESLRELAGKENLEYPSVTLPPQPHTKEGVDAYNEVIARVRMWVNLNLWQKLKLSRDDAKPLLRLKGFPSFPLVERQANEVDWWDMVCNVKKLINEKKEDGKVFWQNLAGYKRQEALRPYLSSEEDRKKGKKFARYQLGDLLLHLYKKHGEDWGKVYDEAWERIDKKVEGLSKHIKLEEERRSEDAQSKAALTDWLRAKASFVIEGLKEADKDEFCRCELKLQKWYGDLRGKPFAIEAENSILDISGFSKQYNCAFIWQKDGVKKLNLYLIINYFKGGKLRFKKIKPEAFEANRFYTVINKKSGEIVPMEVNFNFDDPNLIILPLAFGKRQGREFIWNDLLSLETGSLKLANGRVIEKTLYNRRTRQDEPALFVALTFERREVLDSSNIKPMNLIGVDRGENIPAVIALTDPEGCPLSRFKDSLGNPTHILRIGESYKEKQRTIQAKKEVEQRRAGGYSRKYASKAKNLADDMVRNTARDLLYYAVTQDAMLIFENLSRGFGRQGKRTFMAERQYTRMEDWLTAKLAYEGLPSKTYLSKTLAQYTSKTCSNCGFTITSADYDRVLEKLKKTATGWMTTINGKELKVEGQITYYNRYKRQNVVKDLSVELDRLSEESVNNDISSWTKGRSGEALSLLKKRFSHRPVQEKFVCLNCGFETHADEQAALNIARSWLFLRSQEYKKYQTNKTTGNTDKRAFVETWQSFYRKKLKEVWKPAV

SEQ ID NO: 41995 - protein, 978 aa, synthetic construct
  REGION 1..978: note = engineered CasX variant
QEIKRINGIRRRLVKDSNTKKAGKTGPMKTLLVRVMTPDLRERLENLRKKPENIPQPISNTSRANLNKLLTDYTEMKKAILHVYWEEFQKDPVGLMSRVAQPASKKIDQNKLKPEMDEKGNLTTAGFACSQCGQPLFVYKLEQVSEKGKAYTNYFGRCNVAEHEKLILLAQLKPEKDSDEAVTYSLGKFGQRALDFYSIHVTKESTHPVKPLAQIAGNRYASHPVGKALSDACMGTIASFLSKYQDIIIEHQKVVKGNQKRLESLRELAGKENLEYPSVTLPPQPHTKEGVDAYNEVIARVRMWVNLNLWQKLKLSRDDAKPLLRLKGFPSFPLVERQANEVDWWDMVCNVKKLINEKKEDGKVFWQNLAGYKRQEALRPYLSSEEDRKKGKKFARYQLGDLLLHLYKKHGEDWGKVYDEAWERIDKKVEGLSKHIKLEEERRSEDAQSKAALTDWLRAKASFVIEGLKEADKDEFCRCELKLQKWYGDLRGKPFAIEAENSILDISGFSKQYNCAFIWQKDGVKKLNLYLIINYFKGGKLRFKKIKPEAFEANRFYTVINKKSGEIVPMEVNFNFDDPNLIILPLAFGKRQGREFIWNDLLSLETGSLKLANGRVIEKTLYNRRTRQDEPALFVALTFERREVLDSSNIKPMNLIGVDRGENIPAVIALTDPEGCPLSRFKDSLGNPTHILRIGESYKEKQRTIQAKKEVEQRRAGGYSRKYASKAKNLADDMVRNTARDLLYYAVTQDAMLIFENLSRGFGRQGKRTFMAERQYTRMEDWLTAKLAYEGLPSKTYLSKTLAQYTSKTCSNCGFTITSADYDRVLEKLKKTATGWMTTINGKELKVEGQITYYNRYKRQNVVKDLSVELDRLSEESVNNDISSWTKGRSGEALSLLKKRFSHRPVQEKFVCLNCGFETHADEQAALNIARSWLFLRSQEYKKYQTNKTTGNTDKRAFVETWQSFYRKKLKEVWKPAV

SEQ ID NO: 41996 - protein, 978 aa, synthetic construct
  REGION 1..978: note = engineered CasX variant
QEIKRINGIRRRLVKDSNTKKAGKTGPMKTLLVRVMTPDLRERLENLRKKPENIPQPISNTSRANLNKLLTDYTEMKKAILHVYWEEFQKDPVGLMSRVAQPASKKIDQNKLKPEMDEKGNLTTAGFACSQCGQPLFVYKLEQVSEKGKAYTNYFGRCNVAEHEKLILLAQLKPEKDSDEAVTYSLGKFGQRALDFYSIHVTKESTHPVKPLAQIAGNRYASSPVGKALSDACMGTIASFLSKYQDIIIEHQKVVKGNQKRLESLRELAGKENLEYPSVTLPPQPHTKEGVDAYNEVIARVRMWVNLNLWQKLKLSRDDAKPLLRLKGFPSFPLVERQANEVDWWDMVCNVKKLINEKKEDGKVFWQNLAGYKRQEALRPYLSSEEDRKKGKKFARYQLGDLLLHLYKKHGEDWGKVYDEAWERIDKKVEGLSKHIKLEEERRSEDAQSKAALTDWLRAKASFVIEGLKEADKDEFCRCELKLQKWYGDLRGKPFAIEAENSILDISGFSKQYNCAFIWQKDGVKKLNLYLIINYFKGGKLRFKKIKPEAFEANRFYTVINKKSGEIVPMEVNFNFDDPNLIILPLAFGKRQGREFIWNDLLSLETGSLKLANGRVIEKTLYNRRTRQDEPALFVALTFERREVLDSSNIKPMNLIGVDRGENIPAVIALTDPEGCPLSRFKDSLGNPTHILRIGESYKEKQRTIQAKKEVEQRRAGGYSRKYASKAKNLADDMVRNTARDLLYYAVTQDAMLIFENLSRGFGRQGKRTFMAERQYTRMEDWLTAKLAYEGLPSKTYLSKTLAQYTSKTCSNCGFTITSADYDRVLEKLKKTATGWMTTINGKELKVEGQITYYNRYKRQNVVKDLSVELDRLSEESVNNDISSWTKGRSGEALSLLKKRFSHRPVQEKFVCLNCGFETHADEQAALNIARSWLFLRSQEYKKYQTNKTTGNTDKRAFVETWQSFYRKKLKEVWKPAV

SEQ ID NO: 41997 - protein, 978 aa, synthetic construct
  REGION 1..978: note = engineered CasX variant
QEIKRINGIRRRLVKDSNTKKAGKTGPMKTLLVRVMTPDLRERLENLRKKPENIPQPISNTSRANLNKLLTDYTEMKKAILHVYWEEFQKDPVGLMSRVAQPASKKIDQNKLKPEMDEKGNLTTAGFACSQCGQPLFVYKLEQVSEKGKAYTNYFGRCNVAEHEKLILLAQLKPEKDSDEAVTYSLGKFGQRALDFYSIHVTKESTHPVKPLAQIAGNRYASTPVGKALSDACMGTIASFLSKYQDIIIEHQKVVKGNQKRLESLRELAGKENLEYPSVTLPPQPHTKEGVDAYNEVIARVRMWVNLNLWQKLKLSRDDAKPLLRLKGFPSFPLVERQANEVDWWDMVCNVKKLINEKKEDGKVFWQNLAGYKRQEALRPYLSSEEDRKKGKKFARYQLGDLLLHLYKKHGEDWGKVYDEAWERIDKKVEGLSKHIKLEEERRSEDAQSKAALTDWLRAKASFVIEGLKEADKDEFCRCELKLQKWYGDLRGKPFAIEAENSILDISGFSKQYNCAFIWQKDGVKKLNLYLIINYFKGGKLRFKKIKPEAFEANRFYTVINKKSGEIVPMEVNFNFDDPNLIILPLAFGKRQGREFIWNDLLSLETGSLKLANGRVIEKTLYNRRTRQDEPALFVALTFERREVLDSSNIKPMNLIGVDRGENIPAVIALTDPEGCPLSRFKDSLGNPTHILRIGESYKEKQRTIQAKKEVEQRRAGGYSRKYASKAKNLADDMVRNTARDLLYYAVTQDAMLIFENLSRGFGRQGKRTFMAERQYTRMEDWLTAKLAYEGLPSKTYLSKTLAQYTSKTCSNCGFTITSADYDRVLEKLKKTATGWMTTINGKELKVEGQITYYNRYKRQNVVKDLSVELDRLSEESVNNDISSWTKGRSGEALSLLKKRFSHRPVQEKFVCLNCGFETHADEQAALNIARSWLFLRSQEYKKYQTNKTTGNTDKRAFVETWQSFYRKKLKEVWKPAV

SEQ ID NO: 41998 - protein, 978 aa, synthetic construct
  REGION 1..978: note = engineered CasX variant
QEIKRINGIRRRLVKDSNTKKAGKTGPMKTLLVRVMTPDLRERLENLRKKPENIPQPISNTSRANLNKLLTDYTEMKKAILHVYWEEFQKDPVGLMSRVAQPASKKIDQNKLKPEMDEKGNLTTAGFACSQCGQPLFVYKLEQVSEKGKAYTNYFGRCNVAEHEKLILLAQLKPEKDSDEAVTYSLGKFGQRALDFYSIHVTKESTHPVKPLAQIAGNRYASAPVGKALSDACMGTIASFLSKYQDIIIEHQKVVKGNQKRLESLRELAGKENLEYPSVTLPPQPHTKEGVDAYNEVIARVRMWVNLNLWQKLKLSRDDAKPLLRLKGFPSFPLVERQANEVDWWDMVCNVKKLINEKKEDGKVFWQNLAGYKRQEALRPYLSSEEDRKKGKKFARYQLGDLLLHLYKKHGEDWGKVYDEAWERIDKKVEGLSKHIKLEEERRSEDAQSKAALTDWLRAKASFVIEGLKEADKDEFCRCELKLQKWYGDLRGKPFAIEAENSILDISGFSKQYNCAFIWQKDGVKKLNLYLIINYFKGGKLRFKKIKPEAFEANRFYTVINKKSGEIVPMEVNFNFDDPNLIILPLAFGKRQGREFIWNDLLSLETGSLKLANGRVIEKTLYNRRTRQDEPALFVALTFERREVLDSSNIKPMNLIGVDRGENIPAVIALTDPEGCPLSRFKDSLGNPTHILRIGESYKEKQRTIQAKKEVEQRRAGGYSRKYASKAKNLADDMVRNTARDLLYYAVTQDAMLIFENLSRGFGRQGKRTFMAERQYTRMEDWLTAKLAYEGLPSKTYLSKTLAQYTSKTCSNCGFTITSADYDRVLEKLKKTATGWMTTINGKELKVEGQITYYNRYKRQNVVKDLSVELDRLSEESVNNDISSWTKGRSGEALSLLKKRFSHRPVQEKFVCLNCGFETHADEQAALNIARSWLFLRSQEYKKYQTNKTTGNTDKRAFVETWQSFYRKKLKEVWKPAV

SEQ ID NO: 41999 - protein, 978 aa, synthetic construct
  REGION 1..978: note = engineered CasX variant
QEIKRINGIRRRLVKDSNTKKAGKTGPMKTLLVRVMTPDLRERLENLRKKPENIPQPISNTSRANLNKLLTDYTEMKKAILHVYWEEFQKDPVGLMSRVAQPASKKIDQNKLKPEMDEKGNLTTAGFACSQCGQPLFVYKLEQVSEKGKAYTNYFGRCNVAEHEKLILLAQLKPEKDSDEAVTYSLGKFGQRALDFYSIHVTKESTHPVKPLAQIAGNRYASVPVGKALSDACMGTIASFLSKYQDIIIEHQKVVKGNQKRLESLRELAGKENLEYPSVTLPPQPHTKEGVDAYNEVIARVRMWVNLNLWQKLKLSRDDAKPLLRLKGFPSFPLVERQANEVDWWDMVCNVKKLINEKKEDGKVFWQNLAGYKRQEALRPYLSSEEDRKKGKKFARYQLGDLLLHLYKKHGEDWGKVYDEAWERIDKKVEGLSKHIKLEEERRSEDAQSKAALTDWLRAKASFVIEGLKEADKDEFCRCELKLQKWYGDLRGKPFAIEAENSILDISGFSKQYNCAFIWQKDGVKKLNLYLIINYFKGGKLRFKKIKPEAFEANRFYTVINKKSGEIVPMEVNFNFDDPNLIILPLAFGKRQGREFIWNDLLSLETGSLKLANGRVIEKTLYNRRTRQDEPALFVALTFERREVLDSSNIKPMNLIGVDRGENIPAVIALTDPEGCPLSRFKDSLGNPTHILRIGESYKEKQRTIQAKKEVEQRRAGGYSRKYASKAKNLADDMVRNTARDLLYYAVTQDAMLIFENLSRGFGRQGKRTFMAERQYTRMEDWLTAKLAYEGLPSKTYLSKTLAQYTSKTCSNCGFTITSADYDRVLEKLKKTATGWMTTINGKELKVEGQITYYNRYKRQNVVKDLSVELDRLSEESVNNDISSWTKGRSGEALSLLKKRFSHRPVQEKFVCLNCGFETHADEQAALNIARSWLFLRSQEYKKYQTNKTTGNTDKRAFVETWQSFYRKKLKEVWKPAV

SEQ ID NO: 42000 - protein, 978 aa, synthetic construct
  REGION 1..978: note = engineered CasX variant
QEIKRINGIRRRLVKDSNTKKAGKTGPMKTLLVRVMTPDLRERLENLRKKPENIPQPISNTSRANLNKLLTDYTEMKKAILHVYWEEFQKDPVGLMSRVAQPASKKIDQNKLKPEMDEKGNLTTAGFACSQCGQPLFVYKLEQVSEKGKAYTNYFGRCNVAEHEKLIKLAQLKPEKDSDEAVTYSLGKFGQRALDFYSIHVTKESTHPVKPLAQIAGNRYASGPVGKALSDACMGTIASFLSKYQDIIIEHQKVVKGNQKRLESLRELAGKENLEYPSVTLPPQPHTKEGVDAYNEVIARVRMWVNLNLWQKLKLSRDDAKPLLRLKGFPSFPLVERQANEVDWWDMVCNVKKLINEKKEDGKVFWQNLAGYKRQEALRPYLSSEEDRKKGKKFARYQLGDLLLHLYKKHGEDWGKVYDEAWERIDKKVEGLSKHIKLEEERRSEDAQSKAALTDWLRAKASFVIEGLKEADKDEFCRCELKLQKWYGDLRGKPFAIEAENSILDISGFSKQYNCAFIWQKDGVKKLNLYLIINYFKGGKLRFKKIKPEAFEANRFYTVINKKSGEIVPMEVNFNFDDPNLIILPLAFGKRQGREFIWNDLLSLETGSLKLANGRVIEKTLYNRRTRQDEPALFVALTFERREVLDSSNIKPMNLIGVDRGENIPAVIALTDPEGCPLSRFKDSLGNPTHILRIGESYKEKQRTIQAKKEVEQRRAGGYSRKYASKAKNLADDMVRNTARDLLYYAVTQDAMLIFENLSRGFGRQGKRTFMAERQYTRMEDWLTAKLAYEGLPSKTYLSKTLAQYTSKTCSNCGFTITSADYDRVLEKLKKTATGWMTTINGKELKVEGQITYYNRYKRQNVVKDLSVELDRLSEESVNNDISSWTKGRSGEALSLLKKRFSHRPVQEKFVCLNCGFETHADEQAALNIARSWLFLRSQEYKKYQTNKTTGNTDKRAFVETWQSFYRKKLKEVWKPAV

SEQ ID NO: 42001 - protein, 977 aa, synthetic construct
  REGION 1..977: note = engineered CasX variant
QEIKRINGIRRRLVKDSNTKKAGKTGPMKTLLVRVMTPDLRERLENLRKKPENIPQPISNTSRANLNKLLTDYTEMKKAILHVYWEEFQKDPVGLMSRVAQPASKKIDQNKLKPEMDEKGNLTTAGFACSQCGQPLFVYKLEQVSEKGKAYTNYFGRCNVAEHEKLILLAQLKPEKDSDEAVTYSLGKFGQRALDFYSIHVTKESTHPVKPLAQIAGNRYASPVGKALSDACMGTIASFLSKYQDIIIEHQKVVKGNQKRLESLRELAGKENLEYPSVTLPPQPHTKEGVDAYNEVIARVRMWVNLNLWQKLKLSRDDAKPLLRLKGFPSFPLVERQANEVDWWDMVCNVKKLINEKKEDGKVFWQNLAGYKRQEALRPYLSSEEDRKKGKKFARYQLGDLLLHLYKKHGEDWGKVYDEAWERIDKKVEGLSKHIKLEEERRSEDAQSKAALTDWLRAKASFVIEGLKEADKDEFCRCELKLQKWYGDLRGKPFAIEAENSILDISGFSKQYNCAFIWQKDGVKKLNLYLIINYFKGGKLRFKKIKPEAFEANRFYTVINKKSGEIVPMEVNFNFDDPNLIILPLAFGKRQGREFIWNDLLSLETGSLKLANGRVIEKTLYNRRTRQDEPALFVALTFERREVLDSSNIKPMNLIGVDRGENIPAVIALTDPEGCPLSRFKDSLGNPTHILRIGESYKEKQRTIQAKKEVEQRRAGGYSRKYASKAKNLADDMVRNTARDLLYYAVTQDAMLIFENLSRGFGRQGKRTFMAERQYTRMEDWLTAKLAYEGLPSKTYLSKTLAQYTSKTCSNCGFTITSADYDRVLEKLKKTATGWMTTINGKELKVEGQITYYNRYKRQNVVKDLSVELDRLSEESVNNDISSWTKGRSGEALSLLKKRFSHRPVQEKFVCLNCGFETHADEQAALNIARSWLFLRSQEYKKYQTNKTTGNTDKRAFVETWQSFYRKKLKEVWKPAV

SEQ ID NO: 42002 - protein, 978 aa, synthetic construct
  REGION 1..978: note = engineered CasX variant
QEIKRINGIRRRLVKDSNTKKAGKTGPMKTLLVRVMTPDLRERLENLRKKPENIPQPISNTSRANLNKLLTDYTEMKKAILHVYWEEFQKDPVGLMSRVAQPASKKIDQNKLKPEMDEKGNLTTAGFACSQCGQPLFVYKLEQVSEKGKAYTNYFGRCNVAEHEKLILLAQLKPEKDSDEAVTYSLGKFGQRALDFYSIHVTKESTHPVKPLAQIAGNRYASYPVGKALSDACMGTIASFLSKYQDIIIEHQKVVKGNQKRLESLRELAGKENLEYPSVTLPPQPHTKEGVDAYNEVIARVRMWVNLNLWQKLKLSRDDAKPLLRLKGFPSFPLVERQANEVDWWDMVCNVKKLINEKKEDGKVFWQNLAGYKRQEALRPYLSSEEDRKKGKKFARYQLGDLLLHLEKKHPEDWGKVYDEAWERIDKKVEGLSKHIKLEEERRSEDAQSKAALTDWLRAKASFVIEGLKEADKDEFCRCELKLQKWYGDLRGKPFAIEAENSILDISGFSKQYNCAFIWQKDGVKKLNLYLIINYFKGGKLRFKKIKPEAFEANRFYTVINKKSGEIVPMEVNFNFDDPNLIILPLAFGKRQGREFIWNDLLSLETGSLKLANGRVIEKTLYNRRTRQDEPALFVALTFERREVLDSSNIKPMNLIGVDRGENIPAVIALTDPEGCPLSRFKDSLGNPTHILRIGESYKEKQRTIQAKKEVEQRRAGGYSRKYASKAKNLADDMVRNTARDLLYYAVTQDAMLIFENLSRGFGRQGKRTFMAERQYTRMEDWLTAKLAYEGLPSKTYLSKTLAQYTSKTCSNCGFTITSADYDRVLEKLKKTATGWMTTINGKELKVEGQITYYNRYKRQNVVKDLSVELDRLSEESVNNDISSWTKGRSGEALSLLKKRFSHRPVQEKFVCLNCGFETHADEQAALNIARSWLFLRSQEYKKYQTNKTTGNTDKRAFVETWQSFYRKKLKEVWKPAV

SEQ ID NO: 42003 - protein, 978 aa, synthetic construct
  REGION 1..978: note = engineered CasX variant
QEIKRINGIRRRLVKDSNTKKAGKTGPMKTLLVRVMTPDLRERLENLRKKPENIPQPISNTSRANLNKLLTDYTEMKKAILHVYWEEFQKDPVGLMSRVAQPASKKIDQNKLKPEMDEKGNLTTAGFACSQCGQPLFVYKLEQVSEKGKAYTNYFGRCNVAEHEKLILLAQLKPEKDSDEAVTYSLGKFGQRALDFYSIHVTKESTHPVKPLAQIAGNRYASHPVGKALSDACMGTIASFLSKYQDIIIEHQKVVKGNQKRLESLRELAGKENLEYPSVTLPPQPHTKEGVDAYNEVIARVRMWVNLNLWQKLKLSRDDAKPLLRLKGFPSFPLVERQANEVDWWDMVCNVKKLINEKKEDGKVFWQNLAGYKRQEALRPYLSSEEDRKKGKKFARYQLGDLLLHLEKKHPEDWGKVYDEAWERIDKKVEGLSKHIKLEEERRSEDAQSKAALTDWLRAKASFVIEGLKEADKDEFCRCELKLQKWYGDLRGKPFAIEAENSILDISGFSKQYNCAFIWQKDGVKKLNLYLIINYFKGGKLRFKKIKPEAFEANRFYTVINKKSGEIVPMEVNFNFDDPNLIILPLAFGKRQGREFIWNDLLSLETGSLKLANGRVIEKTLYNRRTRQDEPALFVALTFERREVLDSSNIKPMNLIGVDRGENIPAVIALTDPEGCPLSRFKDSLGNPTHILRIGESYKEKQRTIQAKKEVEQRRAGGYSRKYASKAKNLADDMVRNTARDLLYYAVTQDAMLIFENLSRGFGRQGKRTFMAERQYTRMEDWLTAKLAYEGLPSKTYLSKTLAQYTSKTCSNCGFTITSADYDRVLEKLKKTATGWMTTINGKELKVEGQITYYNRYKRQNVVKDLSVELDRLSEESVNNDISSWTKGRSGEALSLLKKRFSHRPVQEKFVCLNCGFETHADEQAALNIARSWLFLRSQEYKKYQTNKTTGNTDKRAFVETWQSFYRKKLKEVWKPAV

SEQ ID NO: 42004 - protein, 978 aa, synthetic construct
  REGION 1..978: note = engineered CasX variant
QEIKRINGIRRRLVKDSNTKKAGKTGPMKTLLVRVMTPDLRERLENLRKKPENIPQPISNTSRANLNKLLTDYTEMKKAILHVYWEEFQKDPVGLMSRVAQPASKKIDQNKLKPEMDEKGNLTTAGFACSQCGQPLFVYKLEQVSEKGKAYTNYFGRCNVAEHEKLILLAQLKPEKDSDEAVTYSLGKFGQRALDFYSIHVTKESTHPVKPLAQIAGNRYASSPVGKALSDACMGTIASFLSKYQDIIIEHQKVVKGNQKRLESLRELAGKENLEYPSVTLPPQPHTKEGVDAYNEVIARVRMWVNLNLWQKLKLSRDDAKPLLRLKGFPSFPLVERQANEVDWWDMVCNVKKLINEKKEDGKVFWQNLAGYKRQEALRPYLSSEEDRKKGKKFARYQLGDLLLHLEKKHPEDWGKVYDEAWERIDKKVEGLSKHIKLEEERRSEDAQSKAALTDWLRAKASFVIEGLKEADKDEFCRCELKLQKWYGDLRGKPFAIEAENSILDISGFSKQYNCAFIWQKDGVKKLNLYLIINYFKGGKLRFKKIKPEAFEANRFYTVINKKSGEIVPMEVNFNFDDPNLIILPLAFGKRQGREFIWNDLLSLETGSLKLANGRVIEKTLYNRRTRQDEPALFVALTFERREVLDSSNIKPMNLIGVDRGENIPAVIALTDPEGCPLSRFKDSLGNPTHILRIGESYKEKQRTIQAKKEVEQRRAGGYSRKYASKAKNLADDMVRNTARDLLYYAVTQDAMLIFENLSRGFGRQGKRTFMAERQYTRMEDWLTAKLAYEGLPSKTYLSKTLAQYTSKTCSNCGFTITSADYDRVLEKLKKTATGWMTTINGKELKVEGQITYYNRYKRQNVVKDLSVELDRLSEESVNNDISSWTKGRSGEALSLLKKRFSHRPVQEKFVCLNCGFETHADEQAALNIARSWLFLRSQEYKKYQTNKTTGNTDKRAFVETWQSFYRKKLKEVWKPAV

SEQ ID NO: 42005 - protein, 978 aa, synthetic construct
  REGION 1..978: note = engineered CasX variant
QEIKRINGIRRRLVKDSNTKKAGKTGPMKTLLVRVMTPDLRERLENLRKKPENIPQPISNTSRANLNKLLTDYTEMKKAILHVYWEEFQKDPVGLMSRVAQPASKKIDQNKLKPEMDEKGNLTTAGFACSQCGQPLFVYKLEQVSEKGKAYTNYFGRCNVAEHEKLILLAQLKPEKDSDEAVTYSLGKFGQRALDFYSIHVTKESTHPVKPLAQIAGNRYASTPVGKALSDACMGTIASFLSKYQDIIIEHQKVVKGNQKRLESLRELAGKENLEYPSVTLPPQPHTKEGVDAYNEVIARVRMWVNLNLWQKLKLSRDDAKPLLRLKGFPSFPLVERQANEVDWWDMVCNVKKLINEKKEDGKVFWQNLAGYKRQEALRPYLSSEEDRKKGKKFARYQLGDLLLHLEKKHPEDWGKVYDEAWERIDKKVEGLSKHIKLEEERRSEDAQSKAALTDWLRAKASFVIEGLKEADKDEFCRCELKLQKWYGDLRGKPFAIEAENSILDISGFSKQYNCAFIWQKDGVKKLNLYLIINYFKGGKLRFKKIKPEAFEANRFYTVINKKSGEIVPMEVNFNFDDPNLIILPLAFGKRQGREFIWNDLLSLETGSLKLANGRVIEKTLYNRRTRQDEPALFVALTFERREVLDSSNIKPMNLIGVDRGENIPAVIALTDPEGCPLSRFKDSLGNPTHILRIGESYKEKQRTIQAKKEVEQRRAGGYSRKYASKAKNLADDMVRNTARDLLYYAVTQDAMLIFENLSRGFGRQGKRTFMAERQYTRMEDWLTAKLAYEGLPSKTYLSKTLAQYTSKTCSNCGFTITSADYDRVLEKLKKTATGWMTTINGKELKVEGQITYYNRYKRQNVVKDLSVELDRLSEESVNNDISSWTKGRSGEALSLLKKRFSHRPVQEKFVCLNCGFETHADEQAALNIARSWLFLRSQEYKKYQTNKTTGNTDKRAFVETWQSFYRKKLKEVWKPAV

SEQ ID NO: 42006 - protein, 978 aa, synthetic construct
  REGION 1..978: note = engineered CasX variant
QEIKRINGIRRRLVKDSNTKKAGKTGPMKTLLVRVMTPDLRERLENLRKKPENIPQPISNTSRANLNKLLTDYTEMKKAILHVYWEEFQKDPVGLMSRVAQPASKKIDQNKLKPEMDEKGNLTTAGFACSQCGQPLFVYKLEQVSEKGKAYTNYFGRCNVAEHEKLILLAQLKPEKDSDEAVTYSLGKFGQRALDFYSIHVTKESTHPVKPLAQIAGNRYASAPVGKALSDACMGTIASFLSKYQDIIIEHQKVVKGNQKRLESLRELAGKENLEYPSVTLPPQPHTKEGVDAYNEVIARVRMWVNLNLWQKLKLSRDDAKPLLRLKGFPSFPLVERQANEVDWWDMVCNVKKLINEKKEDGKVFWQNLAGYKRQEALRPYLSSEEDRKKGKKFARYQLGDLLLHLEKKHPEDWGKVYDEAWERIDKKVEGLSKHIKLEEERRSEDAQSKAALTDWLRAKASFVIEGLKEADKDEFCRCELKLQKWYGDLRGKPFAIEAENSILDISGFSKQYNCAFIWQKDGVKKLNLYLIINYFKGGKLRFKKIKPEAFEANRFYTVINKKSGEIVPMEVNFNFDDPNLIILPLAFGKRQGREFIWNDLLSLETGSLKLANGRVIEKTLYNRRTRQDEPALFVALTFERREVLDSSNIKPMNLIGVDRGENIPAVIALTDPEGCPLSRFKDSLGNPTHILRIGESYKEKQRTIQAKKEVEQRRAGGYSRKYASKAKNLADDMVRNTARDLLYYAVTQDAMLIFENLSRGFGRQGKRTFMAERQYTRMEDWLTAKLAYEGLPSKTYLSKTLAQYTSKTCSNCGFTITSADYDRVLEKLKKTATGWMTTINGKELKVEGQITYYNRYKRQNVVKDLSVELDRLSEESVNNDISSWTKGRSGEALSLLKKRFSHRPVQEKFVCLNCGFETHADEQAALNIARSWLFLRSQEYKKYQTNKTTGNTDKRAFVETWQSFYRKKLKEVWKPAV

SEQ ID NO: 42007 - protein, 978 aa, synthetic construct
  REGION 1..978: note = engineered CasX variant
QEIKRINGIRRRLVKDSNTKKAGKTGPMKTLLVRVMTPDLRERLENLRKKPENIPQPISNTSRANLNKLLTDYTEMKKAILHVYWEEFQKDPVGLMSRVAQPASKKIDQNKLKPEMDEKGNLTTAGFACSQCGQPLFVYKLEQVSEKGKAYTNYFGRCNVAEHEKLILLAQLKPEKDSDEAVTYSLGKFGQRALDFYSIHVTKESTHPVKPLAQIAGNRYASVPVGKALSDACMGTIASFLSKYQDIIIEHQKVVKGNQKRLESLRELAGKENLEYPSVTLPPQPHTKEGVDAYNEVIARVRMWVNLNLWQKLKLSRDDAKPLLRLKGFPSFPLVERQANEVDWWDMVCNVKKLINEKKEDGKVFWQNLAGYKRQEALRPYLSSEEDRKKGKKFARYQLGDLLLHLEKKHPEDWGKVYDEAWERIDKKVEGLSKHIKLEEERRSEDAQSKAALTDWLRAKASFVIEGLKEADKDEFCRCELKLQKWYGDLRGKPFAIEAENSILDISGFSKQYNCAFIWQKDGVKKLNLYLIINYFKGGKLRFKKIKPEAFEANRFYTVINKKSGEIVPMEVNFNFDDPNLIILPLAFGKRQGREFIWNDLLSLETGSLKLANGRVIEKTLYNRRTRQDEPALFVALTFERREVLDSSNIKPMNLIGVDRGENIPAVIALTDPEGCPLSRFKDSLGNPTHILRIGESYKEKQRTIQAKKEVEQRRAGGYSRKYASKAKNLADDMVRNTARDLLYYAVTQDAMLIFENLSRGFGRQGKRTFMAERQYTRMEDWLTAKLAYEGLPSKTYLSKTLAQYTSKTCSNCGFTITSADYDRVLEKLKKTATGWMTTINGKELKVEGQITYYNRYKRQNVVKDLSVELDRLSEESVNNDISSWTKGRSGEALSLLKKRFSHRPVQEKFVCLNCGFETHADEQAALNIARSWLFLRSQEYKKYQTNKTTGNTDKRAFVETWQSFYRKKLKEVWKPAV

SEQ ID NO: 42008 - protein, 978 aa, synthetic construct
  REGION 1..978: note = engineered CasX variant
QEIKRINGIRRRLVKDSNTKKAGKTGPMKTLLVRVMTPDLRERLENLRKKPENIPQPISNTSRANLNKLLTDYTEMKKAILHVYWEEFQKDPVGLMSRVAQPASKKIDQNKLKPEMDEKGNLTTAGFACSQCGQPLFVYKLEQVSEKGKAYTNYFGRCNVAEHEKLIKLAQLKPEKDSDEAVTYSLGKFGQRALDFYSIHVTKESTHPVKPLAQIAGNRYASGPVGKALSDACMGTIASFLSKYQDIIIEHQKVVKGNQKRLESLRELAGKENLEYPSVTLPPQPHTKEGVDAYNEVIARVRMWVNLNLWQKLKLSRDDAKPLLRLKGFPSFPLVERQANEVDWWDMVCNVKKLINEKKEDGKVFWQNLAGYKRQEALRPYLSSEEDRKKGKKFARYQLGDLLLHLEKKHPEDWGKVYDEAWERIDKKVEGLSKHIKLEEERRSEDAQSKAALTDWLRAKASFVIEGLKEADKDEFCRCELKLQKWYGDLRGKPFAIEAENSILDISGFSKQYNCAFIWQKDGVKKLNLYLIINYFKGGKLRFKKIKPEAFEANRFYTVINKKSGEIVPMEVNFNFDDPNLIILPLAFGKRQGREFIWNDLLSLETGSLKLANGRVIEKTLYNRRTRQDEPALFVALTFERREVLDSSNIKPMNLIGVDRGENIPAVIALTDPEGCPLSRFKDSLGNPTHILRIGESYKEKQRTIQAKKEVEQRRAGGYSRKYASKAKNLADDMVRNTARDLLYYAVTQDAMLIFENLSRGFGRQGKRTFMAERQYTRMEDWLTAKLAYEGLPSKTYLSKTLAQYTSKTCSNCGFTITSADYDRVLEKLKKTATGWMTTINGKELKVEGQITYYNRYKRQNVVKDLSVELDRLSEESVNNDISSWTKGRSGEALSLLKKRFSHRPVQEKFVCLNCGFETHADEQAALNIARSWLFLRSQEYKKYQTNKTTGNTDKRAFVETWQSFYRKKLKEVWKPAV

SEQ ID NO: 42009 - protein, 977 aa, synthetic construct
  REGION 1..977: note = engineered CasX variant
QEIKRINGIRRRLVKDSNTKKAGKTGPMKTLLVRVMTPDLRERLENLRKKPENIPQPISNTSRANLNKLLTDYTEMKKAILHVYWEEFQKDPVGLMSRVAQPASKKIDQNKLKPEMDEKGNLTTAGFACSQCGQPLFVYKLEQVSEKGKAYTNYFGRCNVAEHEKLILLAQLKPEKDSDEAVTYSLGKFGQRALDFYSIHVTKESTHPVKPLAQIAGNRYASPVGKALSDACMGTIASFLSKYQDIIIEHQKVVKGNQKRLESLRELAGKENLEYPSVTLPPQPHTKEGVDAYNEVIARVRMWVNLNLWQKLKLSRDDAKPLLRLKGFPSFPLVERQANEVDWWDMVCNVKKLINEKKEDGKVFWQNLAGYKRQEALRPYLSSEEDRKKGKKFARYQLGDLLLHLEKKHPEDWGKVYDEAWERIDKKVEGLSKHIKLEEERRSEDAQSKAALTDWLRAKASFVIEGLKEADKDEFCRCELKLQKWYGDLRGKPFAIEAENSILDISGFSKQYNCAFIWQKDGVKKLNLYLIINYFKGGKLRFKKIKPEAFEANRFYTVINKKSGEIVPMEVNFNFDDPNLIILPLAFGKRQGREFIWNDLLSLETGSLKLANGRVIEKTLYNRRTRQDEPALFVALTFERREVLDSSNIKPMNLIGVDRGENIPAVIALTDPEGCPLSRFKDSLGNPTHILRIGESYKEKQRTIQAKKEVEQRRAGGYSRKYASKAKNLADDMVRNTARDLLYYAVTQDAMLIFENLSRGFGRQGKRTFMAERQYTRMEDWLTAKLAYEGLPSKTYLSKTLAQYTSKTCSNCGFTITSADYDRVLEKLKKTATGWMTTINGKELKVEGQITYYNRYKRQNVVKDLSVELDRLSEESVNNDISSWTKGRSGEALSLLKKRFSHRPVQEKFVCLNCGFETHADEQAALNIARSWLFLRSQEYKKYQTNKTTGNTDKRAFVETWQSFYRKKLKEVWKPAV

SEQ ID NO: 42010 - protein, 979 aa, synthetic construct
  REGION 1..979: note = engineered CasX variant
QEIKRINGIRRRLVKDSNTKKAGKTGPMKTLLVRVMTPDLRERLENLRKKPENIPQPISNTSRANLNKLLTDYTEMKKAILHVYWEEFQKDPVGLMSRVAQPASKKIDQNKLKPEMDEKGNLTTAGFACSQCGQPLFVYKLEQVSEKGKAYTNYFGRCNVAEHEKLILLAQLKPEKDSDEAVTYSLGKFGQRALDFYSIHVTKESTHPVKPLAQIAGNRYASYPVGKALSDACMGTIASFLSKYQDIIIEHQKVVKGNQKRLESLRELAGKENLEYPSVTLPPQPHTKEGVDAYNEVIARVRMWVNLNLWQKLKLSRDDAKPLLRLKGFPSFPLVERQANEVDWWDMVCNVKKLINEKKEDGKVFWQNLAGYKRQEALRPYLSSEEDRKKGKKFARYQLGDLLLHLEKKHGERDWGKVYDEAWERIDKKVEGLSKHIKLEEERRSEDAQSKAALTDWLRAKASFVIEGLKEADKDEFCRCELKLQKWYGDLRGKPFAIEAENSILDISGFSKQYNCAFIWQKDGVKKLNLYLIINYFKGGKLRFKKIKPEAFEANRFYTVINKKSGEIVPMEVNFNFDDPNLIILPLAFGKRQGREFIWNDLLSLETGSLKLANGRVIEKTLYNRRTRQDEPALFVALTFERREVLDSSNIKPMNLIGVDRGENIPAVIALTDPEGCPLSRFKDSLGNPTHILRIGESYKEKQRTIQAKKEVEQRRAGGYSRKYASKAKNLADDMVRNTARDLLYYAVTQDAMLIFENLSRGFGRQGKRTFMAERQYTRMEDWLTAKLAYEGLPSKTYLSKTLAQYTSKTCSNCGFTITSADYDRVLEKLKKTATGWMTTINGKELKVEGQITYYNRYKRQNVVKDLSVELDRLSEESVNNDISSWTKGRSGEALSLLKKRFSHRPVQEKFVCLNCGFETHADEQAALNIARSWLFLRSQEYKKYQTNKTTGNTDKRAFVETWQSFYRKKLKEVWKPAV

SEQ ID NO: 42011 - protein, 979 aa, synthetic construct
  REGION 1..979: note = engineered CasX variant
QEIKRINGIRRRLVKDSNTKKAGKTGPMKTLLVRVMTPDLRERLENLRKKPENIPQPISNTSRANLNKLLTDYTEMKKAILHVYWEEFQKDPVGLMSRVAQPASKKIDQNKLKPEMDEKGNLTTAGFACSQCGQPLFVYKLEQVSEKGKAYTNYFGRCNVAEHEKLILLAQLKPEKDSDEAVTYSLGKFGQRALDFYSIHVTKESTHPVKPLAQIAGNRYASHPVGKALSDACMGTIASFLSKYQDIIIEHQKVVKGNQKRLESLRELAGKENLEYPSVTLPPQPHTKEGVDAYNEVIARVRMWVNLNLWQKLKLSRDDAKPLLRLKGFPSFPLVERQANEVDWWDMVCNVKKLINEKKEDGKVFWQNLAGYKRQEALRPYLSSEEDRKKGKKFARYQLGDLLLHLEKKHGERDWGKVYDEAWERIDKKVEGLSKHIKLEEERRSEDAQSKAALTDWLRAKASFVIEGLKEADKDEFCRCELKLQKWYGDLRGKPFAIEAENSILDISGFSKQYNCAFIWQKDGVKKLNLYLIINYFKGGKLRFKKIKPEAFEANRFYTVINKKSGEIVPMEVNFNFDDPNLIILPLAFGKRQGREFIWNDLLSLETGSLKLANGRVIEKTLYNRRTRQDEPALFVALTFERREVLDSSNIKPMNLIGVDRGENIPAVIALTDPEGCPLSRFKDSLGNPTHILRIGESYKEKQRTIQAKKEVEQRRAGGYSRKYASKAKNLADDMVRNTARDLLYYAVTQDAMLIFENLSRGFGRQGKRTFMAERQYTRMEDWLTAKLAYEGLPSKTYLSKTLAQYTSKTCSNCGFTITSADYDRVLEKLKKTATGWMTTINGKELKVEGQITYYNRYKRQNVVKDLSVELDRLSEESVNNDISSWTKGRSGEALSLLKKRFSHRPVQEKFVCLNCGFETHADEQAALNIARSWLFLRSQEYKKYQTNKTTGNTDKRAFVETWQSFYRKKLKEVWKPAV

SEQ ID NO: 42012 - protein, 979 aa, synthetic construct
  REGION 1..979: note = engineered CasX variant
QEIKRINGIRRRLVKDSNTKKAGKTGPMKTLLVRVMTPDLRERLENLRKKPENIPQPISNTSRANLNKLLTDYTEMKKAILHVYWEEFQKDPVGLMSRVAQPASKKIDQNKLKPEMDEKGNLTTAGFACSQCGQPLFVYKLEQVSEKGKAYTNYFGRCNVAEHEKLILLAQLKPEKDSDEAVTYSLGKFGQRALDFYSIHVTKESTHPVKPLAQIAGNRYASSPVGKALSDACMGTIASFLSKYQDIIIEHQKVVKGNQKRLESLRELAGKENLEYPSVTLPPQPHTKEGVDAYNEVIARVRMWVNLNLWQKLKLSRDDAKPLLRLKGFPSFPLVERQANEVDWWDMVCNVKKLINEKKEDGKVFWQNLAGYKRQEALRPYLSSEEDRKKGKKFARYQLGDLLLHLEKKHGERDWGKVYDEAWERIDKKVEGLSKHIKLEEERRSEDAQSKAALTDWLRAKASFVIEGLKEADKDEFCRCELKLQKWYGDLRGKPFAIEAENSILDISGFSKQYNCAFIWQKDGVKKLNLYLIINYFKGGKLRFKKIKPEAFEANRFYTVINKKSGEIVPMEVNFNFDDPNLIILPLAFGKRQGREFIWNDLLSLETGSLKLANGRVIEKTLYNRRTRQDEPALFVALTFERREVLDSSNIKPMNLIGVDRGENIPAVIALTDPEGCPLSRFKDSLGNPTHILRIGESYKEKQRTIQAKKEVEQRRAGGYSRKYASKAKNLADDMVRNTARDLLYYAVTQDAMLIFENLSRGFGRQGKRTFMAERQYTRMEDWLTAKLAYEGLPSKTYLSKTLAQYTSKTCSNCGFTITSADYDRVLEKLKKTATGWMTTINGKELKVEGQITYYNRYKRQNVVKDLSVELDRLSEESVNNDISSWTKGRSGEALSLLKKRFSHRPVQEKFVCLNCGFETHADEQAALNIARSWLFLRSQEYKKYQTNKTTGNTDKRAFVETWQSFYRKKLKEVWKPAV

SEQ ID NO: 42013 - protein, 979 aa, synthetic construct
  REGION 1..979: note = engineered CasX variant
QEIKRINGIRRRLVKDSNTKKAGKTGPMKTLLVRVMTPDLRERLENLRKKPENIPQPISNTSRANLNKLLTDYTEMKKAILHVYWEEFQKDPVGLMSRVAQPASKKIDQNKLKPEMDEKGNLTTAGFACSQCGQPLFVYKLEQVSEKGKAYTNYFGRCNVAEHEKLILLAQLKPEKDSDEAVTYSLGKFGQRALDFYSIHVTKESTHPVKPLAQIAGNRYASTPVGKALSDACMGTIASFLSKYQDIIIEHQKVVKGNQKRLESLRELAGKENLEYPSVTLPPQPHTKEGVDAYNEVIARVRMWVNLNLWQKLKLSRDDAKPLLRLKGFPSFPLVERQANEVDWWDMVCNVKKLINEKKEDGKVFWQNLAGYKRQEALRPYLSSEEDRKKGKKFARYQLGDLLLHLEKKHGERDWGKVYDEAWERIDKKVEGLSKHIKLEEERRSEDAQSKAALTDWLRAKASFVIEGLKEADKDEFCRCELKLQKWYGDLRGKPFAIEAENSILDISGFSKQYNCAFIWQKDGVKKLNLYLIINYFKGGKLRFKKIKPEAFEANRFYTVINKKSGEIVPMEVNFNFDDPNLIILPLAFGKRQGREFIWNDLLSLETGSLKLANGRVIEKTLYNRRTRQDEPALFVALTFERREVLDSSNIKPMNLIGVDRGENIPAVIALTDPEGCPLSRFKDSLGNPTHILRIGESYKEKQRTIQAKKEVEQRRAGGYSRKYASKAKNLADDMVRNTARDLLYYAVTQDAMLIFENLSRGFGRQGKRTFMAERQYTRMEDWLTAKLAYEGLPSKTYLSKTLAQYTSKTCSNCGFTITSADYDRVLEKLKKTATGWMTTINGKELKVEGQITYYNRYKRQNVVKDLSVELDRLSEESVNNDISSWTKGRSGEALSLLKKRFSHRPVQEKFVCLNCGFETHADEQAALNIARSWLFLRSQEYKKYQTNKTTGNTDKRAFVETWQSFYRKKLKEVWKPAV

SEQ ID NO: 42014 - protein, 979 aa, synthetic construct
  REGION 1..979: note = engineered CasX variant
QEIKRINGIRRRLVKDSNTKKAGKTGPMKTLLVRVMTPDLRERLENLRKKPENIPQPISNTSRANLNKLLTDYTEMKKAILHVYWEEFQKDPVGLMSRVAQPASKKIDQNKLKPEMDEKGNLTTAGFACSQCGQPLFVYKLEQVSEKGKAYTNYFGRCNVAEHEKLILLAQLKPEKDSDEAVTYSLGKFGQRALDFYSIHVTKESTHPVKPLAQIAGNRYASAPVGKALSDACMGTIASFLSKYQDIIIEHQKVVKGNQKRLESLRELAGKENLEYPSVTLPPQPHTKEGVDAYNEVIARVRMWVNLNLWQKLKLSRDDAKPLLRLKGFPSFPLVERQANEVDWWDMVCNVKKLINEKKEDGKVFWQNLAGYKRQEALRPYLSSEEDRKKGKKFARYQLGDLLLHLEKKHGERDWGKVYDEAWERIDKKVEGLSKHIKLEEERRSEDAQSKAALTDWLRAKASFVIEGLKEADKDEFCRCELKLQKWYGDLRGKPFAIEAENSILDISGFSKQYNCAFIWQKDGVKKLNLYLIINYFKGGKLRFKKIKPEAFEANRFYTVINKKSGEIVPMEVNFNFDDPNLIILPLAFGKRQGREFIWNDLLSLETGSLKLANGRVIEKTLYNRRTRQDEPALFVALTFERREVLDSSNIKPMNLIGVDRGENIPAVIALTDPEGCPLSRFKDSLGNPTHILRIGESYKEKQRTIQAKKEVEQRRAGGYSRKYASKAKNLADDMVRNTARDLLYYAVTQDAMLIFENLSRGFGRQGKRTFMAERQYTRMEDWLTAKLAYEGLPSKTYLSKTLAQYTSKTCSNCGFTITSADYDRVLEKLKKTATGWMTTINGKELKVEGQITYYNRYKRQNVVKDLSVELDRLSEESVNNDISSWTKGRSGEALSLLKKRFSHRPVQEKFVCLNCGFETHADEQAALNIARSWLFLRSQEYKKYQTNKTTGNTDKRAFVETWQSFYRKKLKEVWKPAV

SEQ ID NO: 42015 - protein, 979 aa, synthetic construct
  REGION 1..979: note = engineered CasX variant
QEIKRINGIRRRLVKDSNTKKAGKTGPMKTLLVRVMTPDLRERLENLRKKPENIPQPISNTSRANLNKLLTDYTEMKKAILHVYWEEFQKDPVGLMSRVAQPASKKIDQNKLKPEMDEKGNLTTAGFACSQCGQPLFVYKLEQVSEKGKAYTNYFGRCNVAEHEKLILLAQLKPEKDSDEAVTYSLGKFGQRALDFYSIHVTKESTHPVKPLAQIAGNRYASVPVGKALSDACMGTIASFLSKYQDIIIEHQKVVKGNQKRLESLRELAGKENLEYPSVTLPPQPHTKEGVDAYNEVIARVRMWVNLNLWQKLKLSRDDAKPLLRLKGFPSFPLVERQANEVDWWDMVCNVKKLINEKKEDGKVFWQNLAGYKRQEALRPYLSSEEDRKKGKKFARYQLGDLLLHLEKKHGERDWGKVYDEAWERIDKKVEGLSKHIKLEEERRSEDAQSKAALTDWLRAKASFVIEGLKEADKDEFCRCELKLQKWYGDLRGKPFAIEAENSILDISGFSKQYNCAFIWQKDGVKKLNLYLIINYFKGGKLRFKKIKPEAFEANRFYTVINKKSGEIVPMEVNFNFDDPNLIILPLAFGKRQGREFIWNDLLSLETGSLKLANGRVIEKTLYNRRTRQDEPALFVALTFERREVLDSSNIKPMNLIGVDRGENIPAVIALTDPEGCPLSRFKDSLGNPTHILRIGESYKEKQRTIQAKKEVEQRRAGGYSRKYASKAKNLADDMVRNTARDLLYYAVTQDAMLIFENLSRGFGRQGKRTFMAERQYTRMEDWLTAKLAYEGLPSKTYLSKTLAQYTSKTCSNCGFTITSADYDRVLEKLKKTATGWMTTINGKELKVEGQITYYNRYKRQNVVKDLSVELDRLSEESVNNDISSWTKGRSGEALSLLKKRFSHRPVQEKFVCLNCGFETHADEQAALNIARSWLFLRSQEYKKYQTNKTTGNTDKRAFVETWQSFYRKKLKEVWKPAV

SEQ ID NO: 42016 - protein, 979 aa, synthetic construct
  REGION 1..979: note = engineered CasX variant
QEIKRINGIRRRLVKDSNTKKAGKTGPMKTLLVRVMTPDLRERLENLRKKPENIPQPISNTSRANLNKLLTDYTEMKKAILHVYWEEFQKDPVGLMSRVAQPASKKIDQNKLKPEMDEKGNLTTAGFACSQCGQPLFVYKLEQVSEKGKAYTNYFGRCNVAEHEKLIKLAQLKPEKDSDEAVTYSLGKFGQRALDFYSIHVTKESTHPVKPLAQIAGNRYASGPVGKALSDACMGTIASFLSKYQDIIIEHQKVVKGNQKRLESLRELAGKENLEYPSVTLPPQPHTKEGVDAYNEVIARVRMWVNLNLWQKLKLSRDDAKPLLRLKGFPSFPLVERQANEVDWWDMVCNVKKLINEKKEDGKVFWQNLAGYKRQEALRPYLSSEEDRKKGKKFARYQLGDLLLHLEKKHGERDWGKVYDEAWERIDKKVEGLSKHIKLEEERRSEDAQSKAALTDWLRAKASFVIEGLKEADKDEFCRCELKLQKWYGDLRGKPFAIEAENSILDISGFSKQYNCAFIWQKDGVKKLNLYLIINYFKGGKLRFKKIKPEAFEANRFYTVINKKSGEIVPMEVNFNFDDPNLIILPLAFGKRQGREFIWNDLLSLETGSLKLANGRVIEKTLYNRRTRQDEPALFVALTFERREVLDSSNIKPMNLIGVDRGENIPAVIALTDPEGCPLSRFKDSLGNPTHILRIGESYKEKQRTIQAKKEVEQRRAGGYSRKYASKAKNLADDMVRNTARDLLYYAVTQDAMLIFENLSRGFGRQGKRTFMAERQYTRMEDWLTAKLAYEGLPSKTYLSKTLAQYTSKTCSNCGFTITSADYDRVLEKLKKTATGWMTTINGKELKVEGQITYYNRYKRQNVVKDLSVELDRLSEESVNNDISSWTKGRSGEALSLLKKRFSHRPVQEKFVCLNCGFETHADEQAALNIARSWLFLRSQEYKKYQTNKTTGNTDKRAFVETWQSFYRKKLKEVWKPAV

SEQ ID NO: 42017 - protein, 978 aa, synthetic construct
  REGION 1..978: note = engineered CasX variant
QEIKRINGIRRRLVKDSNTKKAGKTGPMKTLLVRVMTPDLRERLENLRKKPENIPQPISNTSRANLNKLLTDYTEMKKAILHVYWEEFQKDPVGLMSRVAQPASKKIDQNKLKPEMDEKGNLTTAGFACSQCGQPLFVYKLEQVSEKGKAYTNYFGRCNVAEHEKLILLAQLKPEKDSDEAVTYSLGKFGQRALDFYSIHVTKESTHPVKPLAQIAGNRYASPVGKALSDACMGTIASFLSKYQDIIIEHQKVVKGNQKRLESLRELAGKENLEYPSVTLPPQPHTKEGVDAYNEVIARVRMWVNLNLWQKLKLSRDDAKPLLRLKGFPSFPLVERQANEVDWWDMVCNVKKLINEKKEDGKVFWQNLAGYKRQEALRPYLSSEEDRKKGKKFARYQLGDLLLHLEKKHGERDWGKVYDEAWERIDKKVEGLSKHIKLEEERRSEDAQSKAALTDWLRAKASFVIEGLKEADKDEFCRCELKLQKWYGDLRGKPFAIEAENSILDISGFSKQYNCAFIWQKDGVKKLNLYLIINYFKGGKLRFKKIKPEAFEANRFYTVINKKSGEIVPMEVNFNFDDPNLIILPLAFGKRQGREFIWNDLLSLETGSLKLANGRVIEKTLYNRRTRQDEPALFVALTFERREVLDSSNIKPMNLIGVDRGENIPAVIALTDPEGCPLSRFKDSLGNPTHILRIGESYKEKQRTIQAKKEVEQRRAGGYSRKYASKAKNLADDMVRNTARDLLYYAVTQDAMLIFENLSRGFGRQGKRTFMAERQYTRMEDWLTAKLAYEGLPSKTYLSKTLAQYTSKTCSNCGFTITSADYDRVLEKLKKTATGWMTTINGKELKVEGQITYYNRYKRQNVVKDLSVELDRLSEESVNNDISSWTKGRSGEALSLLKKRFSHRPVQEKFVCLNCGFETHADEQAALNIARSWLFLRSQEYKKYQTNKTTGNTDKRAFVETWQSFYRKKLKEVWKPAV

SEQ ID NO: 42018 - protein, 979 aa, synthetic construct
  REGION 1..979: note = engineered CasX variant
QEIKRINGIRRRLVKDSNTKKAGKTGPMKTLLVRVMTPDLRERLENLRKKPENIPQPISNTSRANLNKLLTDYTEMKKAILHVYWEEFQKDPVGLMSRVAQPASKKIDQNKLKPEMDEKGNLTTAGFACSQCGQPLFVYKLEQVSEKGKAYTNYFGRCNVAEHEKLILLAQLKPEKDSDEAVTYSLGKFGQRALDFYSIHVTKESTHPVKPLAQIAGNRYASYPVGKALSDACMGTIASFLSKYQDIIIEHQKVVKGNQKRLESLRELAGKENLEYPSVTLPPQPHTKEGVDAYNEVIARVRMWVNLNLWQKLKLSRDDAKPLLRLKGFPSFPLVERQANEVDWWDMVCNVKKLINEKKEDGKVFWQNLAGYKRQEALRPYLSSEEDRKKGKKFARYQLGDLLLHLEKKHGEYDWGKVYDEAWERIDKKVEGLSKHIKLEEERRSEDAQSKAALTDWLRAKASFVIEGLKEADKDEFCRCELKLQKWYGDLRGKPFAIEAENSILDISGFSKQYNCAFIWQKDGVKKLNLYLIINYFKGGKLRFKKIKPEAFEANRFYTVINKKSGEIVPMEVNFNFDDPNLIILPLAFGKRQGREFIWNDLLSLETGSLKLANGRVIEKTLYNRRTRQDEPALFVALTFERREVLDSSNIKPMNLIGVDRGENIPAVIALTDPEGCPLSRFKDSLGNPTHILRIGESYKEKQRTIQAKKEVEQRRAGGYSRKYASKAKNLADDMVRNTARDLLYYAVTQDAMLIFENLSRGFGRQGKRTFMAERQYTRMEDWLTAKLAYEGLPSKTYLSKTLAQYTSKTCSNCGFTITSADYDRVLEKLKKTATGWMTTINGKELKVEGQITYYNRYKRQNVVKDLSVELDRLSEESVNNDISSWTKGRSGEALSLLKKRFSHRPVQEKFVCLNCGFETHADEQAALNIARSWLFLRSQEYKKYQTNKTTGNTDKRAFVETWQSFYRKKLKEVWKPAV

SEQ ID NO: 42019 - protein, 979 aa, synthetic construct
  REGION 1..979: note = engineered CasX variant
QEIKRINGIRRRLVKDSNTKKAGKTGPMKTLLVRVMTPDLRERLENLRKKPENIPQPISNTSRANLNKLLTDYTEMKKAILHVYWEEFQKDPVGLMSRVAQPASKKIDQNKLKPEMDEKGNLTTAGFACSQCGQPLFVYKLEQVSEKGKAYTNYFGRCNVAEHEKLILLAQLKPEKDSDEAVTYSLGKFGQRALDFYSIHVTKESTHPVKPLAQIAGNRYASHPVGKALSDACMGTIASFLSKYQDIIIEHQKVVKGNQKRLESLRELAGKENLEYPSVTLPPQPHTKEGVDAYNEVIARVRMWVNLNLWQKLKLSRDDAKPLLRLKGFPSFPLVERQANEVDWWDMVCNVKKLINEKKEDGKVFWQNLAGYKRQEALRPYLSSEEDRKKGKKFARYQLGDLLLHLEKKHGEYDWGKVYDEAWERIDKKVEGLSKHIKLEEERRSEDAQSKAALTDWLRAKASFVIEGLKEADKDEFCRCELKLQKWYGDLRGKPFAIEAENSILDISGFSKQYNCAFIWQKDGVKKLNLYLIINYFKGGKLRFKKIKPEAFEANRFYTVINKKSGEIVPMEVNFNFDDPNLIILPLAFGKRQGREFIWNDLLSLETGSLKLANGRVIEKTLYNRRTRQDEPALFVALTFERREVLDSSNIKPMNLIGVDRGENIPAVIALTDPEGCPLSRFKDSLGNPTHILRIGESYKEKQRTIQAKKEVEQRRAGGYSRKYASKAKNLADDMVRNTARDLLYYAVTQDAMLIFENLSRGFGRQGKRTFMAERQYTRMEDWLTAKLAYEGLPSKTYLSKTLAQYTSKTCSNCGFTITSADYDRVLEKLKKTATGWMTTINGKELKVEGQITYYNRYKRQNVVKDLSVELDRLSEESVNNDISSWTKGRSGEALSLLKKRFSHRPVQEKFVCLNCGFETHADEQAALNIARSWLFLRSQEYKKYQTNKTTGNTDKRAFVETWQSFYRKKLKEVWKPAV

SEQ ID NO: 42020 - protein, 979 aa, synthetic construct
  REGION 1..979: note = engineered CasX variant
QEIKRINGIRRRLVKDSNTKKAGKTGPMKTLLVRVMTPDLRERLENLRKKPENIPQPISNTSRANLNKLLTDYTEMKKAILHVYWEEFQKDPVGLMSRVAQPASKKIDQNKLKPEMDEKGNLTTAGFACSQCGQPLFVYKLEQVSEKGKAYTNYFGRCNVAEHEKLILLAQLKPEKDSDEAVTYSLGKFGQRALDFYSIHVTKESTHPVKPLAQIAGNRYASSPVGKALSDACMGTIASFLSKYQDIIIEHQKVVKGNQKRLESLRELAGKENLEYPSVTLPPQPHTKEGVDAYNEVIARVRMWVNLNLWQKLKLSRDDAKPLLRLKGFPSFPLVERQANEVDWWDMVCNVKKLINEKKEDGKVFWQNLAGYKRQEALRPYLSSEEDRKKGKKFARYQLGDLLLHLEKKHGEYDWGKVYDEAWERIDKKVEGLSKHIKLEEERRSEDAQSKAALTDWLRAKASFVIEGLKEADKDEFCRCELKLQKWYGDLRGKPFAIEAENSILDISGFSKQYNCAFIWQKDGVKKLNLYLIINYFKGGKLRFKKIKPEAFEANRFYTVINKKSGEIVPMEVNFNFDDPNLIILPLAFGKRQGREFIWNDLLSLETGSLKLANGRVIEKTLYNRRTRQDEPALFVALTFERREVLDSSNIKPMNLIGVDRGENIPAVIALTDPEGCPLSRFKDSLGNPTHILRIGESYKEKQRTIQAKKEVEQRRAGGYSRKYASKAKNLADDMVRNTARDLLYYAVTQDAMLIFENLSRGFGRQGKRTFMAERQYTRMEDWLTAKLAYEGLPSKTYLSKTLAQYTSKTCSNCGFTITSADYDRVLEKLKKTATGWMTTINGKELKVEGQITYYNRYKRQNVVKDLSVELDRLSEESVNNDISSWTKGRSGEALSLLKKRFSHRPVQEKFVCLNCGFETHADEQAALNIARSWLFLRSQEYKKYQTNKTTGNTDKRAFVETWQSFYRKKLKEVWKPAV

SEQ ID NO: 42021 - protein, 979 aa, synthetic construct
  REGION 1..979: note = engineered CasX variant
QEIKRINGIRRRLVKDSNTKKAGKTGPMKTLLVRVMTPDLRERLENLRKKPENIPQPISNTSRANLNKLLTDYTEMKKAILHVYWEEFQKDPVGLMSRVAQPASKKIDQNKLKPEMDEKGNLTTAGFACSQCGQPLFVYKLEQVSEKGKAYTNYFGRCNVAEHEKLILLAQLKPEKDSDEAVTYSLGKFGQRALDFYSIHVTKESTHPVKPLAQIAGNRYASTPVGKALSDACMGTIASFLSKYQDIIIEHQKVVKGNQKRLESLRELAGKENLEYPSVTLPPQPHTKEGVDAYNEVIARVRMWVNLNLWQKLKLSRDDAKPLLRLKGFPSFPLVERQANEVDWWDMVCNVKKLINEKKEDGKVFWQNLAGYKRQEALRPYLSSEEDRKKGKKFARYQLGDLLLHLEKKHGEYDWGKVYDEAWERIDKKVEGLSKHIKLEEERRSEDAQSKAALTDWLRAKASFVIEGLKEADKDEFCRCELKLQKWYGDLRGKPFAIEAENSILDISGFSKQYNCAFIWQKDGVKKLNLYLIINYFKGGKLRFKKIKPEAFEANRFYTVINKKSGEIVPMEVNFNFDDPNLIILPLAFGKRQGREFIWNDLLSLETGSLKLANGRVIEKTLYNRRTRQDEPALFVALTFERREVLDSSNIKPMNLIGVDRGENIPAVIALTDPEGCPLSRFKDSLGNPTHILRIGESYKEKQRTIQAKKEVEQRRAGGYSRKYASKAKNLADDMVRNTARDLLYYAVTQDAMLIFENLSRGFGRQGKRTFMAERQYTRMEDWLTAKLAYEGLPSKTYLSKTLAQYTSKTCSNCGFTITSADYDRVLEKLKKTATGWMTTINGKELKVEGQITYYNRYKRQNVVKDLSVELDRLSEESVNNDISSWTKGRSGEALSLLKKRFSHRPVQEKFVCLNCGFETHADEQAALNIARSWLFLRSQEYKKYQTNKTTGNTDKRAFVETWQSFYRKKLKEVWKPAV

SEQ ID NO: 42022 - protein, 979 aa, synthetic construct
  REGION 1..979: note = engineered CasX variant
QEIKRINGIRRRLVKDSNTKKAGKTGPMKTLLVRVMTPDLRERLENLRKKPENIPQPISNTSRANLNKLLTDYTEMKKAILHVYWEEFQKDPVGLMSRVAQPASKKIDQNKLKPEMDEKGNLTTAGFACSQCGQPLFVYKLEQVSEKGKAYTNYFGRCNVAEHEKLILLAQLKPEKDSDEAVTYSLGKFGQRALDFYSIHVTKESTHPVKPLAQIAGNRYASAPVGKALSDACMGTIASFLSKYQDIIIEHQKVVKGNQKRLESLRELAGKENLEYPSVTLPPQPHTKEGVDAYNEVIARVRMWVNLNLWQKLKLSRDDAKPLLRLKGFPSFPLVERQANEVDWWDMVCNVKKLINEKKEDGKVFWQNLAGYKRQEALRPYLSSEEDRKKGKKFARYQLGDLLLHLEKKHGEYDWGKVYDEAWERIDKKVEGLSKHIKLEEERRSEDAQSKAALTDWLRAKASFVIEGLKEADKDEFCRCELKLQKWYGDLRGKPFAIEAENSILDISGFSKQYNCAFIWQKDGVKKLNLYLIINYFKGGKLRFKKIKPEAFEANRFYTVINKKSGEIVPMEVNFNFDDPNLIILPLAFGKRQGREFIWNDLLSLETGSLKLANGRVIEKTLYNRRTRQDEPALFVALTFERREVLDSSNIKPMNLIGVDRGENIPAVIALTDPEGCPLSRFKDSLGNPTHILRIGESYKEKQRTIQAKKEVEQRRAGGYSRKYASKAKNLADDMVRNTARDLLYYAVTQDAMLIFENLSRGFGRQGKRTFMAERQYTRMEDWLTAKLAYEGLPSKTYLSKTLAQYTSKTCSNCGFTITSADYDRVLEKLKKTATGWMTTINGKELKVEGQITYYNRYKRQNVVKDLSVELDRLSEESVNNDISSWTKGRSGEALSLLKKRFSHRPVQEKFVCLNCGFETHADEQAALNIARSWLFLRSQEYKKYQTNKTTGNTDKRAFVETWQSFYRKKLKEVWKPAV

SEQ ID NO: 42023 - protein, 979 aa, synthetic construct
  REGION 1..979: note = engineered CasX variant
QEIKRINGIRRRLVKDSNTKKAGKTGPMKTLLVRVMTPDLRERLENLRKKPENIPQPISNTSRANLNKLLTDYTEMKKAILHVYWEEFQKDPVGLMSRVAQPASKKIDQNKLKPEMDEKGNLTTAGFACSQCGQPLFVYKLEQVSEKGKAYTNYFGRCNVAEHEKLILLAQLKPEKDSDEAVTYSLGKFGQRALDFYSIHVTKESTHPVKPLAQIAGNRYASVPVGKALSDACMGTIASFLSKYQDIIIEHQKVVKGNQKRLESLRELAGKENLEYPSVTLPPQPHTKEGVDAYNEVIARVRMWVNLNLWQKLKLSRDDAKPLLRLKGFPSFPLVERQANEVDWWDMVCNVKKLINEKKEDGKVFWQNLAGYKRQEALRPYLSSEEDRKKGKKFARYQLGDLLLHLEKKHGEYDWGKVYDEAWERIDKKVEGLSKHIKLEEERRSEDAQSKAALTDWLRAKASFVIEGLKEADKDEFCRCELKLQKWYGDLRGKPFAIEAENSILDISGFSKQYNCAFIWQKDGVKKLNLYLIINYFKGGKLRFKKIKPEAFEANRFYTVINKKSGEIVPMEVNFNFDDPNLIILPLAFGKRQGREFIWNDLLSLETGSLKLANGRVIEKTLYNRRTRQDEPALFVALTFERREVLDSSNIKPMNLIGVDRGENIPAVIALTDPEGCPLSRFKDSLGNPTHILRIGESYKEKQRTIQAKKEVEQRRAGGYSRKYASKAKNLADDMVRNTARDLLYYAVTQDAMLIFENLSRGFGRQGKRTFMAERQYTRMEDWLTAKLAYEGLPSKTYLSKTLAQYTSKTCSNCGFTITSADYDRVLEKLKKTATGWMTTINGKELKVEGQITYYNRYKRQNVVKDLSVELDRLSEESVNNDISSWTKGRSGEALSLLKKRFSHRPVQEKFVCLNCGFETHADEQAALNIARSWLFLRSQEYKKYQTNKTTGNTDKRAFVETWQSFYRKKLKEVWKPAV

SEQ ID NO: 42024 - protein, 979 aa, synthetic construct
  REGION 1..979: note = engineered CasX variant
QEIKRINGIRRRLVKDSNTKKAGKTGPMKTLLVRVMTPDLRERLENLRKKPENIPQPISNTSRANLNKLLTDYTEMKKAILHVYWEEFQKDPVGLMSRVAQPASKKIDQNKLKPEMDEKGNLTTAGFACSQCGQPLFVYKLEQVSEKGKAYTNYFGRCNVAEHEKLIKLAQLKPEKDSDEAVTYSLGKFGQRALDFYSIHVTKESTHPVKPLAQIAGNRYASGPVGKALSDACMGTIASFLSKYQDIIIEHQKVVKGNQKRLESLRELAGKENLEYPSVTLPPQPHTKEGVDAYNEVIARVRMWVNLNLWQKLKLSRDDAKPLLRLKGFPSFPLVERQANEVDWWDMVCNVKKLINEKKEDGKVFWQNLAGYKRQEALRPYLSSEEDRKKGKKFARYQLGDLLLHLEKKHGEYDWGKVYDEAWERIDKKVEGLSKHIKLEEERRSEDAQSKAALTDWLRAKASFVIEGLKEADKDEFCRCELKLQKWYGDLRGKPFAIEAENSILDISGFSKQYNCAFIWQKDGVKKLNLYLIINYFKGGKLRFKKIKPEAFEANRFYTVINKKSGEIVPMEVNFNFDDPNLIILPLAFGKRQGREFIWNDLLSLETGSLKLANGRVIEKTLYNRRTRQDEPALFVALTFERREVLDSSNIKPMNLIGVDRGENIPAVIALTDPEGCPLSRFKDSLGNPTHILRIGESYKEKQRTIQAKKEVEQRRAGGYSRKYASKAKNLADDMVRNTARDLLYYAVTQDAMLIFENLSRGFGRQGKRTFMAERQYTRMEDWLTAKLAYEGLPSKTYLSKTLAQYTSKTCSNCGFTITSADYDRVLEKLKKTATGWMTTINGKELKVEGQITYYNRYKRQNVVKDLSVELDRLSEESVNNDISSWTKGRSGEALSLLKKRFSHRPVQEKFVCLNCGFETHADEQAALNIARSWLFLRSQEYKKYQTNKTTGNTDKRAFVETWQSFYRKKLKEVWKPAV

SEQ ID NO: 42025 - protein, 978 aa, synthetic construct
  REGION 1..978: note = engineered CasX variant
QEIKRINGIRRRLVKDSNTKKAGKTGPMKTLLVRVMTPDLRERLENLRKKPENIPQPISNTSRANLNKLLTDYTEMKKAILHVYWEEFQKDPVGLMSRVAQPASKKIDQNKLKPEMDEKGNLTTAGFACSQCGQPLFVYKLEQVSEKGKAYTNYFGRCNVAEHEKLILLAQLKPEKDSDEAVTYSLGKFGQRALDFYSIHVTKESTHPVKPLAQIAGNRYASPVGKALSDACMGTIASFLSKYQDIIIEHQKVVKGNQKRLESLRELAGKENLEYPSVTLPPQPHTKEGVDAYNEVIARVRMWVNLNLWQKLKLSRDDAKPLLRLKGFPSFPLVERQANEVDWWDMVCNVKKLINEKKEDGKVFWQNLAGYKRQEALRPYLSSEEDRKKGKKFARYQLGDLLLHLEKKHGEYDWGKVYDEAWERIDKKVEGLSKHIKLEEERRSEDAQSKAALTDWLRAKASFVIEGLKEADKDEFCRCELKLQKWYGDLRGKPFAIEAENSILDISGFSKQYNCAFIWQKDGVKKLNLYLIINYFKGGKLRFKKIKPEAFEANRFYTVINKKSGEIVPMEVNFNFDDPNLIILPLAFGKRQGREFIWNDLLSLETGSLKLANGRVIEKTLYNRRTRQDEPALFVALTFERREVLDSSNIKPMNLIGVDRGENIPAVIALTDPEGCPLSRFKDSLGNPTHILRIGESYKEKQRTIQAKKEVEQRRAGGYSRKYASKAKNLADDMVRNTARDLLYYAVTQDAMLIFENLSRGFGRQGKRTFMAERQYTRMEDWLTAKLAYEGLPSKTYLSKTLAQYTSKTCSNCGFTITSADYDRVLEKLKKTATGWMTTINGKELKVEGQITYYNRYKRQNVVKDLSVELDRLSEESVNNDISSWTKGRSGEALSLLKKRFSHRPVQEKFVCLNCGFETHADEQAALNIARSWLFLRSQEYKKYQTNKTTGNTDKRAFVETWQSFYRKKLKEVWKPAV

SEQ ID NO: 42026 - protein, 978 aa, synthetic construct
  REGION 1..978: note = engineered CasX variant
QEIKRINGIRRRLVKDSNTKKAGKTGPMKTLLVRVMTPDLRERLENLRKKPENIPQPISNTSRANLNKLLTDYTEMKKAILHVYWEEFQKDPVGLMSRVAQPASKKIDQNKLKPEMDEKGNLTTAGFACSQCGQPLFVYKLEQVSEKGKAYTNYFGRCNVAEHEKLILLAQLKPEKDSDEAVTYSLGKFGQRALDFYSIHVTKESTHPVKPLAQIAGNRYASYPVGKALSDACMGTIASFLSKYQDIIIEHQKVVKGNQKRLESLRELAGKENLEYPSVTLPPQPHTKEGVDAYNEVIARVRMWVNLNLWQKLKLSRDDAKPLLRLKGFPSFPLVERQANEVDWWDMVCNVKKLINEKKEDGKVFWQNLAGYKRQEALRPYLSSEEDRKKGKKFARYQLGDLLLHLEKKHGEDWGDVYDEAWERIDKKVEGLSKHIKLEEERRSEDAQSKAALTDWLRAKASFVIEGLKEADKDEFCRCELKLQKWYGDLRGKPFAIEAENSILDISGFSKQYNCAFIWQKDGVKKLNLYLIINYFKGGKLRFKKIKPEAFEANRFYTVINKKSGEIVPMEVNFNFDDPNLIILPLAFGKRQGREFIWNDLLSLETGSLKLANGRVIEKTLYNRRTRQDEPALFVALTFERREVLDSSNIKPMNLIGVDRGENIPAVIALTDPEGCPLSRFKDSLGNPTHILRIGESYKEKQRTIQAKKEVEQRRAGGYSRKYASKAKNLADDMVRNTARDLLYYAVTQDAMLIFENLSRGFGRQGKRTFMAERQYTRMEDWLTAKLAYEGLPSKTYLSKTLAQYTSKTCSNCGFTITSADYDRVLEKLKKTATGWMTTINGKELKVEGQITYYNRYKRQNVVKDLSVELDRLSEESVNNDISSWTKGRSGEALSLLKKRFSHRPVQEKFVCLNCGFETHADEQAALNIARSWLFLRSQEYKKYQTNKTTGNTDKRAFVETWQSFYRKKLKEVWKPAV

SEQ ID NO: 42027 - protein, 978 aa, synthetic construct
  REGION 1..978: note = engineered CasX variant
QEIKRINGIRRRLVKDSNTKKAGKTGPMKTLLVRVMTPDLRERLENLRKKPENIPQPISNTSRANLNKLLTDYTEMKKAILHVYWEEFQKDPVGLMSRVAQPASKKIDQNKLKPEMDEKGNLTTAGFACSQCGQPLFVYKLEQVSEKGKAYTNYFGRCNVAEHEKLILLAQLKPEKDSDEAVTYSLGKFGQRALDFYSIHVTKESTHPVKPLAQIAGNRYASHPVGKALSDACMGTIASFLSKYQDIIIEHQKVVKGNQKRLESLRELAGKENLEYPSVTLPPQPHTKEGVDAYNEVIARVRMWVNLNLWQKLKLSRDDAKPLLRLKGFPSFPLVERQANEVDWWDMVCNVKKLINEKKEDGKVFWQNLAGYKRQEALRPYLSSEEDRKKGKKFARYQLGDLLLHLEKKHGEDWGDVYDEAWERIDKKVEGLSKHIKLEEERRSEDAQSKAALTDWLRAKASFVIEGLKEADKDEFCRCELKLQKWYGDLRGKPFAIEAENSILDISGFSKQYNCAFIWQKDGVKKLNLYLIINYFKGGKLRFKKIKPEAFEANRFYTVINKKSGEIVPMEVNFNFDDPNLIILPLAFGKRQGREFIWNDLLSLETGSLKLANGRVIEKTLYNRRTRQDEPALFVALTFERREVLDSSNIKPMNLIGVDRGENIPAVIALTDPEGCPLSRFKDSLGNPTHILRIGESYKEKQRTIQAKKEVEQRRAGGYSRKYASKAKNLADDMVRNTARDLLYYAVTQDAMLIFENLSRGFGRQGKRTFMAERQYTRMEDWLTAKLAYEGLPSKTYLSKTLAQYTSKTCSNCGFTITSADYDRVLEKLKKTATGWMTTINGKELKVEGQITYYNRYKRQNVVKDLSVELDRLSEESVNNDISSWTKGRSGEALSLLKKRFSHRPVQEKFVCLNCGFETHADEQAALNIARSWLFLRSQEYKKYQTNKTTGNTDKRAFVETWQSFYRKKLKEVWKPAV

SEQ ID NO: 42028 - protein, 978 aa, synthetic construct
  REGION 1..978: note = engineered CasX variant
QEIKRINGIRRRLVKDSNTKKAGKTGPMKTLLVRVMTPDLRERLENLRKKPENIPQPISNTSRANLNKLLTDYTEMKKAILHVYWEEFQKDPVGLMSRVAQPASKKIDQNKLKPEMDEKGNLTTAGFACSQCGQPLFVYKLEQVSEKGKAYTNYFGRCNVAEHEKLILLAQLKPEKDSDEAVTYSLGKFGQRALDFYSIHVTKESTHPVKPLAQIAGNRYASSPVGKALSDACMGTIASFLSKYQDIIIEHQKVVKGNQKRLESLRELAGKENLEYPSVTLPPQPHTKEGVDAYNEVIARVRMWVNLNLWQKLKLSRDDAKPLLRLKGFPSFPLVERQANEVDWWDMVCNVKKLINEKKEDGKVFWQNLAGYKRQEALRPYLSSEEDRKKGKKFARYQLGDLLLHLEKKHGEDWGDVYDEAWERIDKKVEGLSKHIKLEEERRSEDAQSKAALTDWLRAKASFVIEGLKEADKDEFCRCELKLQKWYGDLRGKPFAIEAENSILDISGFSKQYNCAFIWQKDGVKKLNLYLIINYFKGGKLRFKKIKPEAFEANRFYTVINKKSGEIVPMEVNFNFDDPNLIILPLAFGKRQGREFIWNDLLSLETGSLKLANGRVIEKTLYNRRTRQDEPALFVALTFERREVLDSSNIKPMNLIGVDRGENIPAVIALTDPEGCPLSRFKDSLGNPTHILRIGESYKEKQRTIQAKKEVEQRRAGGYSRKYASKAKNLADDMVRNTARDLLYYAVTQDAMLIFENLSRGFGRQGKRTFMAERQYTRMEDWLTAKLAYEGLPSKTYLSKTLAQYTSKTCSNCGFTITSADYDRVLEKLKKTATGWMTTINGKELKVEGQITYYNRYKRQNVVKDLSVELDRLSEESVNNDISSWTKGRSGEALSLLKKRFSHRPVQEKFVCLNCGFETHADEQAALNIARSWLFLRSQEYKKYQTNKTTGNTDKRAFVETWQSFYRKKLKEVWKPAV

SEQ ID NO: 42029 - protein, 978 aa, synthetic construct
  REGION 1..978: note = engineered CasX variant
QEIKRINGIRRRLVKDSNTKKAGKTGPMKTLLVRVMTPDLRERLENLRKKPENIPQPISNTSRANLNKLLTDYTEMKKAILHVYWEEFQKDPVGLMSRVAQPASKKIDQNKLKPEMDEKGNLTTAGFACSQCGQPLFVYKLEQVSEKGKAYTNYFGRCNVAEHEKLILLAQLKPEKDSDEAVTYSLGKFGQRALDFYSIHVTKESTHPVKPLAQIAGNRYASTPVGKALSDACMGTIASFLSKYQDIIIEHQKVVKGNQKRLESLRELAGKENLEYPSVTLPPQPHTKEGVDAYNEVIARVRMWVNLNLWQKLKLSRDDAKPLLRLKGFPSFPLVERQANEVDWWDMVCNVKKLINEKKEDGKVFWQNLAGYKRQEALRPYLSSEEDRKKGKKFARYQLGDLLLHLEKKHGEDWGDVYDEAWERIDKKVEGLSKHIKLEEERRSEDAQSKAALTDWLRAKASFVIEGLKEADKDEFCRCELKLQKWYGDLRGKPFAIEAENSILDISGFSKQYNCAFIWQKDGVKKLNLYLIINYFKGGKLRFKKIKPEAFEANRFYTVINKKSGEIVPMEVNFNFDDPNLIILPLAFGKRQGREFIWNDLLSLETGSLKLANGRVIEKTLYNRRTRQDEPALFVALTFERREVLDSSNIKPMNLIGVDRGENIPAVIALTDPEGCPLSRFKDSLGNPTHILRIGESYKEKQRTIQAKKEVEQRRAGGYSRKYASKAKNLADDMVRNTARDLLYYAVTQDAMLIFENLSRGFGRQGKRTFMAERQYTRMEDWLTAKLAYEGLPSKTYLSKTLAQYTSKTCSNCGFTITSADYDRVLEKLKKTATGWMTTINGKELKVEGQITYYNRYKRQNVVKDLSVELDRLSEESVNNDISSWTKGRSGEALSLLKKRFSHRPVQEKFVCLNCGFETHADEQAALNIARSWLFLRSQEYKKYQTNKTTGNTDKRAFVETWQSFYRKKLKEVWKPAV

SEQ ID NO: 42030 - protein, 978 aa, synthetic construct
  REGION 1..978: note = engineered CasX variant
QEIKRINGIRRRLVKDSNTKKAGKTGPMKTLLVRVMTPDLRERLENLRKKPENIPQPISNTSRANLNKLLTDYTEMKKAILHVYWEEFQKDPVGLMSRVAQPASKKIDQNKLKPEMDEKGNLTTAGFACSQCGQPLFVYKLEQVSEKGKAYTNYFGRCNVAEHEKLILLAQLKPEKDSDEAVTYSLGKFGQRALDFYSIHVTKESTHPVKPLAQIAGNRYASAPVGKALSDACMGTIASFLSKYQDIIIEHQKVVKGNQKRLESLRELAGKENLEYPSVTLPPQPHTKEGVDAYNEVIARVRMWVNLNLWQKLKLSRDDAKPLLRLKGFPSFPLVERQANEVDWWDMVCNVKKLINEKKEDGKVFWQNLAGYKRQEALRPYLSSEEDRKKGKKFARYQLGDLLLHLEKKHGEDWGDVYDEAWERIDKKVEGLSKHIKLEEERRSEDAQSKAALTDWLRAKASFVIEGLKEADKDEFCRCELKLQKWYGDLRGKPFAIEAENSILDISGFSKQYNCAFIWQKDGVKKLNLYLIINYFKGGKLRFKKIKPEAFEANRFYTVINKKSGEIVPMEVNFNFDDPNLIILPLAFGKRQGREFIWNDLLSLETGSLKLANGRVIEKTLYNRRTRQDEPALFVALTFERREVLDSSNIKPMNLIGVDRGENIPAVIALTDPEGCPLSRFKDSLGNPTHILRIGESYKEKQRTIQAKKEVEQRRAGGYSRKYASKAKNLADDMVRNTARDLLYYAVTQDAMLIFENLSRGFGRQGKRTFMAERQYTRMEDWLTAKLAYEGLPSKTYLSKTLAQYTSKTCSNCGFTITSADYDRVLEKLKKTATGWMTTINGKELKVEGQITYYNRYKRQNVVKDLSVELDRLSEESVNNDISSWTKGRSGEALSLLKKRFSHRPVQEKFVCLNCGFETHADEQAALNIARSWLFLRSQEYKKYQTNKTTGNTDKRAFVETWQSFYRKKLKEVWKPAV

SEQ ID NO: 42031 - protein, 978 aa, synthetic construct
  REGION 1..978: note = engineered CasX variant
QEIKRINGIRRRLVKDSNTKKAGKTGPMKTLLVRVMTPDLRERLENLRKKPENIPQPISNTSRANLNKLLTDYTEMKKAILHVYWEEFQKDPVGLMSRVAQPASKKIDQNKLKPEMDEKGNLTTAGFACSQCGQPLFVYKLEQVSEKGKAYTNYFGRCNVAEHEKLILLAQLKPEKDSDEAVTYSLGKFGQRALDFYSIHVTKESTHPVKPLAQIAGNRYASVPVGKALSDACMGTIASFLSKYQDIIIEHQKVVKGNQKRLESLRELAGKENLEYPSVTLPPQPHTKEGVDAYNEVIARVRMWVNLNLWQKLKLSRDDAKPLLRLKGFPSFPLVERQANEVDWWDMVCNVKKLINEKKEDGKVFWQNLAGYKRQEALRPYLSSEEDRKKGKKFARYQLGDLLLHLEKKHGEDWGDVYDEAWERIDKKVEGLSKHIKLEEERRSEDAQSKAALTDWLRAKASFVIEGLKEADKDEFCRCELKLQKWYGDLRGKPFAIEAENSILDISGFSKQYNCAFIWQKDGVKKLNLYLIINYFKGGKLRFKKIKPEAFEANRFYTVINKKSGEIVPMEVNFNFDDPNLIILPLAFGKRQGREFIWNDLLSLETGSLKLANGRVIEKTLYNRRTRQDEPALFVALTFERREVLDSSNIKPMNLIGVDRGENIPAVIALTDPEGCPLSRFKDSLGNPTHILRIGESYKEKQRTIQAKKEVEQRRAGGYSRKYASKAKNLADDMVRNTARDLLYYAVTQDAMLIFENLSRGFGRQGKRTFMAERQYTRMEDWLTAKLAYEGLPSKTYLSKTLAQYTSKTCSNCGFTITSADYDRVLEKLKKTATGWMTTINGKELKVEGQITYYNRYKRQNVVKDLSVELDRLSEESVNNDISSWTKGRSGEALSLLKKRFSHRPVQEKFVCLNCGFETHADEQAALNIARSWLFLRSQEYKKYQTNKTTGNTDKRAFVETWQSFYRKKLKEVWKPAV

SEQ ID NO: 42032 - protein, 978 aa, synthetic construct
  REGION 1..978: note = engineered CasX variant
QEIKRINGIRRRLVKDSNTKKAGKTGPMKTLLVRVMTPDLRERLENLRKKPENIPQPISNTSRANLNKLLTDYTEMKKAILHVYWEEFQKDPVGLMSRVAQPASKKIDQNKLKPEMDEKGNLTTAGFACSQCGQPLFVYKLEQVSEKGKAYTNYFGRCNVAEHEKLIKLAQLKPEKDSDEAVTYSLGKFGQRALDFYSIHVTKESTHPVKPLAQIAGNRYASGPVGKALSDACMGTIASFLSKYQDIIIEHQKVVKGNQKRLESLRELAGKENLEYPSVTLPPQPHTKEGVDAYNEVIARVRMWVNLNLWQKLKLSRDDAKPLLRLKGFPSFPLVERQANEVDWWDMVCNVKKLINEKKEDGKVFWQNLAGYKRQEALRPYLSSEEDRKKGKKFARYQLGDLLLHLEKKHGEDWGDVYDEAWERIDKKVEGLSKHIKLEEERRSEDAQSKAALTDWLRAKASFVIEGLKEADKDEFCRCELKLQKWYGDLRGKPFAIEAENSILDISGFSKQYNCAFIWQKDGVKKLNLYLIINYFKGGKLRFKKIKPEAFEANRFYTVINKKSGEIVPMEVNFNFDDPNLIILPLAFGKRQGREFIWNDLLSLETGSLKLANGRVIEKTLYNRRTRQDEPALFVALTFERREVLDSSNIKPMNLIGVDRGENIPAVIALTDPEGCPLSRFKDSLGNPTHILRIGESYKEKQRTIQAKKEVEQRRAGGYSRKYASKAKNLADDMVRNTARDLLYYAVTQDAMLIFENLSRGFGRQGKRTFMAERQYTRMEDWLTAKLAYEGLPSKTYLSKTLAQYTSKTCSNCGFTITSADYDRVLEKLKKTATGWMTTINGKELKVEGQITYYNRYKRQNVVKDLSVELDRLSEESVNNDISSWTKGRSGEALSLLKKRFSHRPVQEKFVCLNCGFETHADEQAALNIARSWLFLRSQEYKKYQTNKTTGNTDKRAFVETWQSFYRKKLKEVWKPAV

SEQ ID NO: 42033 - protein, 977 aa, synthetic construct
  REGION 1..977: note = engineered CasX variant
QEIKRINGIRRRLVKDSNTKKAGKTGPMKTLLVRVMTPDLRERLENLRKKPENIPQPISNTSRANLNKLLTDYTEMKKAILHVYWEEFQKDPVGLMSRVAQPASKKIDQNKLKPEMDEKGNLTTAGFACSQCGQPLFVYKLEQVSEKGKAYTNYFGRCNVAEHEKLILLAQLKPEKDSDEAVTYSLGKFGQRALDFYSIHVTKESTHPVKPLAQIAGNRYASPVGKALSDACMGTIASFLSKYQDIIIEHQKVVKGNQKRLESLRELAGKENLEYPSVTLPPQPHTKEGVDAYNEVIARVRMWVNLNLWQKLKLSRDDAKPLLRLKGFPSFPLVERQANEVDWWDMVCNVKKLINEKKEDGKVFWQNLAGYKRQEALRPYLSSEEDRKKGKKFARYQLGDLLLHLEKKHGEDWGDVYDEAWERIDKKVEGLSKHIKLEEERRSEDAQSKAALTDWLRAKASFVIEGLKEADKDEFCRCELKLQKWYGDLRGKPFAIEAENSILDISGFSKQYNCAFIWQKDGVKKLNLYLIINYFKGGKLRFKKIKPEAFEANRFYTVINKKSGEIVPMEVNFNFDDPNLIILPLAFGKRQGREFIWNDLLSLETGSLKLANGRVIEKTLYNRRTRQDEPALFVALTFERREVLDSSNIKPMNLIGVDRGENIPAVIALTDPEGCPLSRFKDSLGNPTHILRIGESYKEKQRTIQAKKEVEQRRAGGYSRKYASKAKNLADDMVRNTARDLLYYAVTQDAMLIFENLSRGFGRQGKRTFMAERQYTRMEDWLTAKLAYEGLPSKTYLSKTLAQYTSKTCSNCGFTITSADYDRVLEKLKKTATGWMTTINGKELKVEGQITYYNRYKRQNVVKDLSVELDRLSEESVNNDISSWTKGRSGEALSLLKKRFSHRPVQEKFVCLNCGFETHADEQAALNIARSWLFLRSQEYKKYQTNKTTGNTDKRAFVETWQSFYRKKLKEVWKPAV

SEQ ID NO: 42034 - protein, 978 aa, synthetic construct
  REGION 1..978: note = engineered CasX variant
QEIKRINGIRRRLVKDSNTKKAGKTGPMKTLLVRVMTPDLRERLENLRKKPENIPQPISNTSRANLNKLLTDYTEMKKAILHVYWEEFQKDPVGLMSRVAQPASKKIDQNKLKPEMDEKGNLTTAGFACSQCGQPLFVYKLEQVSEKGKAYTNYFGRCNVAEHEKLILLAQLKPEKDSDEAVTYSLGKFGQRALDFYSIHVTKESTHPVKPLAQIAGNRYASYPVGKALSDACMGTIASFLSKYQDIIIEHQKVVKGNQKRLESLRELAGKENLEYPSVTLPPQPHTKEGVDAYNEVIARVRMWVNLNLWQKLKLSRDDAKPLLRLKGFPSFPLVERQANEVDWWDMVCNVKKLINEKKEDGKVFWQNLAGYKRQEALRPYLSSEEDRKKGKKFARYQLGDLLLHLEKKHGEDWGKVYGEAWERIDKKVEGLSKHIKLEEERRSEDAQSKAALTDWLRAKASFVIEGLKEADKDEFCRCELKLQKWYGDLRGKPFAIEAENSILDISGFSKQYNCAFIWQKDGVKKLNLYLIINYFKGGKLRFKKIKPEAFEANRFYTVINKKSGEIVPMEVNFNFDDPNLIILPLAFGKRQGREFIWNDLLSLETGSLKLANGRVIEKTLYNRRTRQDEPALFVALTFERREVLDSSNIKPMNLIGVDRGENIPAVIALTDPEGCPLSRFKDSLGNPTHILRIGESYKEKQRTIQAKKEVEQRRAGGYSRKYASKAKNLADDMVRNTARDLLYYAVTQDAMLIFENLSRGFGRQGKRTFMAERQYTRMEDWLTAKLAYEGLPSKTYLSKTLAQYTSKTCSNCGFTITSADYDRVLEKLKKTATGWMTTINGKELKVEGQITYYNRYKRQNVVKDLSVELDRLSEESVNNDISSWTKGRSGEALSLLKKRFSHRPVQEKFVCLNCGFETHADEQAALNIARSWLFLRSQEYKKYQTNKTTGNTDKRAFVETWQSFYRKKLKEVWKPAV

SEQ ID NO: 42035 - protein, 978 aa, synthetic construct
  REGION 1..978: note = engineered CasX variant
QEIKRINGIRRRLVKDSNTKKAGKTGPMKTLLVRVMTPDLRERLENLRKKPENIPQPISNTSRANLNKLLTDYTEMKKAILHVYWEEFQKDPVGLMSRVAQPASKKIDQNKLKPEMDEKGNLTTAGFACSQCGQPLFVYKLEQVSEKGKAYTNYFGRCNVAEHEKLILLAQLKPEKDSDEAVTYSLGKFGQRALDFYSIHVTKESTHPVKPLAQIAGNRYASHPVGKALSDACMGTIASFLSKYQDIIIEHQKVVKGNQKRLESLRELAGKENLEYPSVTLPPQPHTKEGVDAYNEVIARVRMWVNLNLWQKLKLSRDDAKPLLRLKGFPSFPLVERQANEVDWWDMVCNVKKLINEKKEDGKVFWQNLAGYKRQEALRPYLSSEEDRKKGKKFARYQLGDLLLHLEKKHGEDWGKVYGEAWERIDKKVEGLSKHIKLEEERRSEDAQSKAALTDWLRAKASFVIEGLKEADKDEFCRCELKLQKWYGDLRGKPFAIEAENSILDISGFSKQYNCAFIWQKDGVKKLNLYLIINYFKGGKLRFKKIKPEAFEANRFYTVINKKSGEIVPMEVNFNFDDPNLIILPLAFGKRQGREFIWNDLLSLETGSLKLANGRVIEKTLYNRRTRQDEPALFVALTFERREVLDSSNIKPMNLIGVDRGENIPAVIALTDPEGCPLSRFKDSLGNPTHILRIGESYKEKQRTIQAKKEVEQRRAGGYSRKYASKAKNLADDMVRNTARDLLYYAVTQDAMLIFENLSRGFGRQGKRTFMAERQYTRMEDWLTAKLAYEGLPSKTYLSKTLAQYTSKTCSNCGFTITSADYDRVLEKLKKTATGWMTTINGKELKVEGQITYYNRYKRQNVVKDLSVELDRLSEESVNNDISSWTKGRSGEALSLLKKRFSHRPVQEKFVCLNCGFETHADEQAALNIARSWLFLRSQEYKKYQTNKTTGNTDKRAFVETWQSFYRKKLKEVWKPAV

SEQ ID NO: 42036 - protein, 978 aa, synthetic construct
  REGION 1..978: note = engineered CasX variant
QEIKRINGIRRRLVKDSNTKKAGKTGPMKTLLVRVMTPDLRERLENLRKKPENIPQPISNTSRANLNKLLTDYTEMKKAILHVYWEEFQKDPVGLMSRVAQPASKKIDQNKLKPEMDEKGNLTTAGFACSQCGQPLFVYKLEQVSEKGKAYTNYFGRCNVAEHEKLILLAQLKPEKDSDEAVTYSLGKFGQRALDFYSIHVTKESTHPVKPLAQIAGNRYASSPVGKALSDACMGTIASFLSKYQDIIIEHQKVVKGNQKRLESLRELAGKENLEYPSVTLPPQPHTKEGVDAYNEVIARVRMWVNLNLWQKLKLSRDDAKPLLRLKGFPSFPLVERQANEVDWWDMVCNVKKLINEKKEDGKVFWQNLAGYKRQEALRPYLSSEEDRKKGKKFARYQLGDLLLHLEKKHGEDWGKVYGEAWERIDKKVEGLSKHIKLEEERRSEDAQSKAALTDWLRAKASFVIEGLKEADKDEFCRCELKLQKWYGDLRGKPFAIEAENSILDISGFSKQYNCAFIWQKDGVKKLNLYLIINYFKGGKLRFKKIKPEAFEANRFYTVINKKSGEIVPMEVNFNFDDPNLIILPLAFGKRQGREFIWNDLLSLETGSLKLANGRVIEKTLYNRRTRQDEPALFVALTFERREVLDSSNIKPMNLIGVDRGENIPAVIALTDPEGCPLSRFKDSLGNPTHILRIGESYKEKQRTIQAKKEVEQRRAGGYSRKYASKAKNLADDMVRNTARDLLYYAVTQDAMLIFENLSRGFGRQGKRTFMAERQYTRMEDWLTAKLAYEGLPSKTYLSKTLAQYTSKTCSNCGFTITSADYDRVLEKLKKTATGWMTTINGKELKVEGQITYYNRYKRQNVVKDLSVELDRLSEESVNNDISSWTKGRSGEALSLLKKRFSHRPVQEKFVCLNCGFETHADEQAALNIARSWLFLRSQEYKKYQTNKTTGNTDKRAFVETWQSFYRKKLKEVWKPAV

SEQ ID NO: 42037 - protein, 978 aa, synthetic construct
  REGION 1..978: note = engineered CasX variant
QEIKRINGIRRRLVKDSNTKKAGKTGPMKTLLVRVMTPDLRERLENLRKKPENIPQPISNTSRANLNKLLTDYTEMKKAILHVYWEEFQKDPVGLMSRVAQPASKKIDQNKLKPEMDEKGNLTTAGFACSQCGQPLFVYKLEQVSEKGKAYTNYFGRCNVAEHEKLILLAQLKPEKDSDEAVTYSLGKFGQRALDFYSIHVTKESTHPVKPLAQIAGNRYASTPVGKALSDACMGTIASFLSKYQDIIIEHQKVVKGNQKRLESLRELAGKENLEYPSVTLPPQPHTKEGVDAYNEVIARVRMWVNLNLWQKLKLSRDDAKPLLRLKGFPSFPLVERQANEVDWWDMVCNVKKLINEKKEDGKVFWQNLAGYKRQEALRPYLSSEEDRKKGKKFARYQLGDLLLHLEKKHGEDWGKVYGEAWERIDKKVEGLSKHIKLEEERRSEDAQSKAALTDWLRAKASFVIEGLKEADKDEFCRCELKLQKWYGDLRGKPFAIEAENSILDISGFSKQYNCAFIWQKDGVKKLNLYLIINYFKGGKLRFKKIKPEAFEANRFYTVINKKSGEIVPMEVNFNFDDPNLIILPLAFGKRQGREFIWNDLLSLETGSLKLANGRVIEKTLYNRRTRQDEPALFVALTFERREVLDSSNIKPMNLIGVDRGENIPAVIALTDPEGCPLSRFKDSLGNPTHILRIGESYKEKQRTIQAKKEVEQRRAGGYSRKYASKAKNLADDMVRNTARDLLYYAVTQDAMLIFENLSRGFGRQGKRTFMAERQYTRMEDWLTAKLAYEGLPSKTYLSKTLAQYTSKTCSNCGFTITSADYDRVLEKLKKTATGWMTTINGKELKVEGQITYYNRYKRQNVVKDLSVELDRLSEESVNNDISSWTKGRSGEALSLLKKRFSHRPVQEKFVCLNCGFETHADEQAALNIARSWLFLRSQEYKKYQTNKTTGNTDKRAFVETWQSFYRKKLKEVWKPAV

SEQ ID NO: 42038 - protein, 978 aa, synthetic construct
  REGION 1..978: note = engineered CasX variant
QEIKRINGIRRRLVKDSNTKKAGKTGPMKTLLVRVMTPDLRERLENLRKKPENIPQPISNTSRANLNKLLTDYTEMKKAILHVYWEEFQKDPVGLMSRVAQPASKKIDQNKLKPEMDEKGNLTTAGFACSQCGQPLFVYKLEQVSEKGKAYTNYFGRCNVAEHEKLILLAQLKPEKDSDEAVTYSLGKFGQRALDFYSIHVTKESTHPVKPLAQIAGNRYASAPVGKALSDACMGTIASFLSKYQDIIIEHQKVVKGNQKRLESLRELAGKENLEYPSVTLPPQPHTKEGVDAYNEVIARVRMWVNLNLWQKLKLSRDDAKPLLRLKGFPSFPLVERQANEVDWWDMVCNVKKLINEKKEDGKVFWQNLAGYKRQEALRPYLSSEEDRKKGKKFARYQLGDLLLHLEKKHGEDWGKVYGEAWERIDKKVEGLSKHIKLEEERRSEDAQSKAALTDWLRAKASFVIEGLKEADKDEFCRCELKLQKWYGDLRGKPFAIEAENSILDISGFSKQYNCAFIWQKDGVKKLNLYLIINYFKGGKLRFKKIKPEAFEANRFYTVINKKSGEIVPMEVNFNFDDPNLIILPLAFGKRQGREFIWNDLLSLETGSLKLANGRVIEKTLYNRRTRQDEPALFVALTFERREVLDSSNIKPMNLIGVDRGENIPAVIALTDPEGCPLSRFKDSLGNPTHILRIGESYKEKQRTIQAKKEVEQRRAGGYSRKYASKAKNLADDMVRNTARDLLYYAVTQDAMLIFENLSRGFGRQGKRTFMAERQYTRMEDWLTAKLAYEGLPSKTYLSKTLAQYTSKTCSNCGFTITSADYDRVLEKLKKTATGWMTTINGKELKVEGQITYYNRYKRQNVVKDLSVELDRLSEESVNNDISSWTKGRSGEALSLLKKRFSHRPVQEKFVCLNCGFETHADEQAALNIARSWLFLRSQEYKKYQTNKTTGNTDKRAFVETWQSFYRKKLKEVWKPAV

SEQ ID NO: 42039 - protein, 978 aa, synthetic construct
  REGION 1..978: note = engineered CasX variant
QEIKRINGIRRRLVKDSNTKKAGKTGPMKTLLVRVMTPDLRERLENLRKKPENIPQPISNTSRANLNKLLTDYTEMKKAILHVYWEEFQKDPVGLMSRVAQPASKKIDQNKLKPEMDEKGNLTTAGFACSQCGQPLFVYKLEQVSEKGKAYTNYFGRCNVAEHEKLILLAQLKPEKDSDEAVTYSLGKFGQRALDFYSIHVTKESTHPVKPLAQIAGNRYASVPVGKALSDACMGTIASFLSKYQDIIIEHQKVVKGNQKRLESLRELAGKENLEYPSVTLPPQPHTKEGVDAYNEVIARVRMWVNLNLWQKLKLSRDDAKPLLRLKGFPSFPLVERQANEVDWWDMVCNVKKLINEKKEDGKVFWQNLAGYKRQEALRPYLSSEEDRKKGKKFARYQLGDLLLHLEKKHGEDWGKVYGEAWERIDKKVEGLSKHIKLEEERRSEDAQSKAALTDWLRAKASFVIEGLKEADKDEFCRCELKLQKWYGDLRGKPFAIEAENSILDISGFSKQYNCAFIWQKDGVKKLNLYLIINYFKGGKLRFKKIKPEAFEANRFYTVINKKSGEIVPMEVNFNFDDPNLIILPLAFGKRQGREFIWNDLLSLETGSLKLANGRVIEKTLYNRRTRQDEPALFVALTFERREVLDSSNIKPMNLIGVDRGENIPAVIALTDPEGCPLSRFKDSLGNPTHILRIGESYKEKQRTIQAKKEVEQRRAGGYSRKYASKAKNLADDMVRNTARDLLYYAVTQDAMLIFENLSRGFGRQGKRTFMAERQYTRMEDWLTAKLAYEGLPSKTYLSKTLAQYTSKTCSNCGFTITSADYDRVLEKLKKTATGWMTTINGKELKVEGQITYYNRYKRQNVVKDLSVELDRLSEESVNNDISSWTKGRSGEALSLLKKRFSHRPVQEKFVCLNCGFETHADEQAALNIARSWLFLRSQEYKKYQTNKTTGNTDKRAFVETWQSFYRKKLKEVWKPAV

SEQ ID NO: 42040 - protein, 978 aa, synthetic construct
  REGION 1..978: note = engineered CasX variant
QEIKRINGIRRRLVKDSNTKKAGKTGPMKTLLVRVMTPDLRERLENLRKKPENIPQPISNTSRANLNKLLTDYTEMKKAILHVYWEEFQKDPVGLMSRVAQPASKKIDQNKLKPEMDEKGNLTTAGFACSQCGQPLFVYKLEQVSEKGKAYTNYFGRCNVAEHEKLIKLAQLKPEKDSDEAVTYSLGKFGQRALDFYSIHVTKESTHPVKPLAQIAGNRYASGPVGKALSDACMGTIASFLSKYQDIIIEHQKVVKGNQKRLESLRELAGKENLEYPSVTLPPQPHTKEGVDAYNEVIARVRMWVNLNLWQKLKLSRDDAKPLLRLKGFPSFPLVERQANEVDWWDMVCNVKKLINEKKEDGKVFWQNLAGYKRQEALRPYLSSEEDRKKGKKFARYQLGDLLLHLEKKHGEDWGKVYGEAWERIDKKVEGLSKHIKLEEERRSEDAQSKAALTDWLRAKASFVIEGLKEADKDEFCRCELKLQKWYGDLRGKPFAIEAENSILDISGFSKQYNCAFIWQKDGVKKLNLYLIINYFKGGKLRFKKIKPEAFEANRFYTVINKKSGEIVPMEVNFNFDDPNLIILPLAFGKRQGREFIWNDLLSLETGSLKLANGRVIEKTLYNRRTRQDEPALFVALTFERREVLDSSNIKPMNLIGVDRGENIPAVIALTDPEGCPLSRFKDSLGNPTHILRIGESYKEKQRTIQAKKEVEQRRAGGYSRKYASKAKNLADDMVRNTARDLLYYAVTQDAMLIFENLSRGFGRQGKRTFMAERQYTRMEDWLTAKLAYEGLPSKTYLSKTLAQYTSKTCSNCGFTITSADYDRVLEKLKKTATGWMTTINGKELKVEGQITYYNRYKRQNVVKDLSVELDRLSEESVNNDISSWTKGRSGEALSLLKKRFSHRPVQEKFVCLNCGFETHADEQAALNIARSWLFLRSQEYKKYQTNKTTGNTDKRAFVETWQSFYRKKLKEVWKPAV

SEQ ID NO: 42041 - protein, 977 aa, synthetic construct
  REGION 1..977: note = engineered CasX variant
QEIKRINGIRRRLVKDSNTKKAGKTGPMKTLLVRVMTPDLRERLENLRKKPENIPQPISNTSRANLNKLLTDYTEMKKAILHVYWEEFQKDPVGLMSRVAQPASKKIDQNKLKPEMDEKGNLTTAGFACSQCGQPLFVYKLEQVSEKGKAYTNYFGRCNVAEHEKLILLAQLKPEKDSDEAVTYSLGKFGQRALDFYSIHVTKESTHPVKPLAQIAGNRYASPVGKALSDACMGTIASFLSKYQDIIIEHQKVVKGNQKRLESLRELAGKENLEYPSVTLPPQPHTKEGVDAYNEVIARVRMWVNLNLWQKLKLSRDDAKPLLRLKGFPSFPLVERQANEVDWWDMVCNVKKLINEKKEDGKVFWQNLAGYKRQEALRPYLSSEEDRKKGKKFARYQLGDLLLHLEKKHGEDWGKVYGEAWERIDKKVEGLSKHIKLEEERRSEDAQSKAALTDWLRAKASFVIEGLKEADKDEFCRCELKLQKWYGDLRGKPFAIEAENSILDISGFSKQYNCAFIWQKDGVKKLNLYLIINYFKGGKLRFKKIKPEAFEANRFYTVINKKSGEIVPMEVNFNFDDPNLIILPLAFGKRQGREFIWNDLLSLETGSLKLANGRVIEKTLYNRRTRQDEPALFVALTFERREVLDSSNIKPMNLIGVDRGENIPAVIALTDPEGCPLSRFKDSLGNPTHILRIGESYKEKQRTIQAKKEVEQRRAGGYSRKYASKAKNLADDMVRNTARDLLYYAVTQDAMLIFENLSRGFGRQGKRTFMAERQYTRMEDWLTAKLAYEGLPSKTYLSKTLAQYTSKTCSNCGFTITSADYDRVLEKLKKTATGWMTTINGKELKVEGQITYYNRYKRQNVVKDLSVELDRLSEESVNNDISSWTKGRSGEALSLLKKRFSHRPVQEKFVCLNCGFETHADEQAALNIARSWLFLRSQEYKKYQTNKTTGNTDKRAFVETWQSFYRKKLKEVWKPAV

SEQ ID NO: 42042 - protein, 978 aa, synthetic construct
  REGION 1..978: note = engineered CasX variant
QEIKRINGIRRRLVKDSNTKKAGKTGPMKTLLVRVMTPDLRERLENLRKKPENIPQPISNTSRANLNKLLTDYTEMKKAILHVYWEEFQKDPVGLMSRVAQPASKKIDQNKLKPEMDEKGNLTTAGFACSQCGQPLFVYKLEQVSEKGKAYTNYFGRCNVAEHEKLILLAQLKPEKDSDEAVTYSLGKFGQRALDFYSIHVTKESTHPVKPLAQIAGNRYASYPVGKALSDACMGTIASFLSKYQDIIIEHQKVVKGNQKRLESLRELAGKENLEYPSVTLPPQPHTKEGVDAYNEVIARVRMWVNLNLWQKLKLSRDDAKPLLRLKGFPSFPLVERQANEVDWWDMVCNVKKLINEKKEDGKVFWQNLAGYKRQEALRPYLSSEEDRKKGKKFARYQLGDLLLHLEKKHGEDWGKVYDEAWERIDKKVEGLSKHIKLEEERRSEDAQSKAALTDWLRAKASFVIEGKKEADKDEFCRCELKLQKWYGDLRGKPFAIEAENSILDISGFSKQYNCAFIWQKDGVKKLNLYLIINYFKGGKLRFKKIKPEAFEANRFYTVINKKSGEIVPMEVNFNFDDPNLIILPLAFGKRQGREFIWNDLLSLETGSLKLANGRVIEKTLYNRRTRQDEPALFVALTFERREVLDSSNIKPMNLIGVDRGENIPAVIALTDPEGCPLSRFKDSLGNPTHILRIGESYKEKQRTIQAKKEVEQRRAGGYSRKYASKAKNLADDMVRNTARDLLYYAVTQDAMLIFENLSRGFGRQGKRTFMAERQYTRMEDWLTAKLAYEGLPSKTYLSKTLAQYTSKTCSNCGFTITSADYDRVLEKLKKTATGWMTTINGKELKVEGQITYYNRYKRQNVVKDLSVELDRLSEESVNNDISSWTKGRSGEALSLLKKRFSHRPVQEKFVCLNCGFETHADEQAALNIARSWLFLRSQEYKKYQTNKTTGNTDKRAFVETWQSFYRKKLKEVWKPAV

SEQ ID NO: 42043 - protein, 978 aa, synthetic construct
  REGION 1..978: note = engineered CasX variant
QEIKRINGIRRRLVKDSNTKKAGKTGPMKTLLVRVMTPDLRERLENLRKKPENIPQPISNTSRANLNKLLTDYTEMKKAILHVYWEEFQKDPVGLMSRVAQPASKKIDQNKLKPEMDEKGNLTTAGFACSQCGQPLFVYKLEQVSEKGKAYTNYFGRCNVAEHEKLILLAQLKPEKDSDEAVTYSLGKFGQRALDFYSIHVTKESTHPVKPLAQIAGNRYASHPVGKALSDACMGTIASFLSKYQDIIIEHQKVVKGNQKRLESLRELAGKENLEYPSVTLPPQPHTKEGVDAYNEVIARVRMWVNLNLWQKLKLSRDDAKPLLRLKGFPSFPLVERQANEVDWWDMVCNVKKLINEKKEDGKVFWQNLAGYKRQEALRPYLSSEEDRKKGKKFARYQLGDLLLHLEKKHGEDWGKVYDEAWERIDKKVEGLSKHIKLEEERRSEDAQSKAALTDWLRAKASFVIEGKKEADKDEFCRCELKLQKWYGDLRGKPFAIEAENSILDISGFSKQYNCAFIWQKDGVKKLNLYLIINYFKGGKLRFKKIKPEAFEANRFYTVINKKSGEIVPMEVNFNFDDPNLIILPLAFGKRQGREFIWNDLLSLETGSLKLANGRVIEKTLYNRRTRQDEPALFVALTFERREVLDSSNIKPMNLIGVDRGENIPAVIALTDPEGCPLSRFKDSLGNPTHILRIGESYKEKQRTIQAKKEVEQRRAGGYSRKYASKAKNLADDMVRNTARDLLYYAVTQDAMLIFENLSRGFGRQGKRTFMAERQYTRMEDWLTAKLAYEGLPSKTYLSKTLAQYTSKTCSNCGFTITSADYDRVLEKLKKTATGWMTTINGKELKVEGQITYYNRYKRQNVVKDLSVELDRLSEESVNNDISSWTKGRSGEALSLLKKRFSHRPVQEKFVCLNCGFETHADEQAALNIARSWLFLRSQEYKKYQTNKTTGNTDKRAFVETWQSFYRKKLKEVWKPAV

SEQ ID NO: 42044 - protein, 978 aa, synthetic construct
  REGION 1..978: note = engineered CasX variant
QEIKRINGIRRRLVKDSNTKKAGKTGPMKTLLVRVMTPDLRERLENLRKKPENIPQPISNTSRANLNKLLTDYTEMKKAILHVYWEEFQKDPVGLMSRVAQPASKKIDQNKLKPEMDEKGNLTTAGFACSQCGQPLFVYKLEQVSEKGKAYTNYFGRCNVAEHEKLILLAQLKPEKDSDEAVTYSLGKFGQRALDFYSIHVTKESTHPVKPLAQIAGNRYASSPVGKALSDACMGTIASFLSKYQDIIIEHQKVVKGNQKRLESLRELAGKENLEYPSVTLPPQPHTKEGVDAYNEVIARVRMWVNLNLWQKLKLSRDDAKPLLRLKGFPSFPLVERQANEVDWWDMVCNVKKLINEKKEDGKVFWQNLAGYKRQEALRPYLSSEEDRKKGKKFARYQLGDLLLHLEKKHGEDWGKVYDEAWERIDKKVEGLSKHIKLEEERRSEDAQSKAALTDWLRAKASFVIEGKKEADKDEFCRCELKLQKWYGDLRGKPFAIEAENSILDISGFSKQYNCAFIWQKDGVKKLNLYLIINYFKGGKLRFKKIKPEAFEANRFYTVINKKSGEIVPMEVNFNFDDPNLIILPLAFGKRQGREFIWNDLLSLETGSLKLANGRVIEKTLYNRRTRQDEPALFVALTFERREVLDSSNIKPMNLIGVDRGENIPAVIALTDPEGCPLSRFKDSLGNPTHILRIGESYKEKQRTIQAKKEVEQRRAGGYSRKYASKAKNLADDMVRNTARDLLYYAVTQDAMLIFENLSRGFGRQGKRTFMAERQYTRMEDWLTAKLAYEGLPSKTYLSKTLAQYTSKTCSNCGFTITSADYDRVLEKLKKTATGWMTTINGKELKVEGQITYYNRYKRQNVVKDLSVELDRLSEESVNNDISSWTKGRSGEALSLLKKRFSHRPVQEKFVCLNCGFETHADEQAALNIARSWLFLRSQEYKKYQTNKTTGNTDKRAFVETWQSFYRKKLKEVWKPAV

SEQ ID NO: 42045 - protein, 978 aa, synthetic construct
  REGION 1..978: note = engineered CasX variant
QEIKRINGIRRRLVKDSNTKKAGKTGPMKTLLVRVMTPDLRERLENLRKKPENIPQPISNTSRANLNKLLTDYTEMKKAILHVYWEEFQKDPVGLMSRVAQPASKKIDQNKLKPEMDEKGNLTTAGFACSQCGQPLFVYKLEQVSEKGKAYTNYFGRCNVAEHEKLILLAQLKPEKDSDEAVTYSLGKFGQRALDFYSIHVTKESTHPVKPLAQIAGNRYASTPVGKALSDACMGTIASFLSKYQDIIIEHQKVVKGNQKRLESLRELAGKENLEYPSVTLPPQPHTKEGVDAYNEVIARVRMWVNLNLWQKLKLSRDDAKPLLRLKGFPSFPLVERQANEVDWWDMVCNVKKLINEKKEDGKVFWQNLAGYKRQEALRPYLSSEEDRKKGKKFARYQLGDLLLHLEKKHGEDWGKVYDEAWERIDKKVEGLSKHIKLEEERRSEDAQSKAALTDWLRAKASFVIEGKKEADKDEFCRCELKLQKWYGDLRGKPFAIEAENSILDISGFSKQYNCAFIWQKDGVKKLNLYLIINYFKGGKLRFKKIKPEAFEANRFYTVINKKSGEIVPMEVNFNFDDPNLIILPLAFGKRQGREFIWNDLLSLETGSLKLANGRVIEKTLYNRRTRQDEPALFVALTFERREVLDSSNIKPMNLIGVDRGENIPAVIALTDPEGCPLSRFKDSLGNPTHILRIGESYKEKQRTIQAKKEVEQRRAGGYSRKYASKAKNLADDMVRNTARDLLYYAVTQDAMLIFENLSRGFGRQGKRTFMAERQYTRMEDWLTAKLAYEGLPSKTYLSKTLAQYTSKTCSNCGFTITSADYDRVLEKLKKTATGWMTTINGKELKVEGQITYYNRYKRQNVVKDLSVELDRLSEESVNNDISSWTKGRSGEALSLLKKRFSHRPVQEKFVCLNCGFETHADEQAALNIARSWLFLRSQEYKKYQTNKTTGNTDKRAFVETWQSFYRKKLKEVWKPAV

SEQ ID NO: 42046 - protein, 978 aa, synthetic construct
  REGION 1..978: note = engineered CasX variant
QEIKRINGIRRRLVKDSNTKKAGKTGPMKTLLVRVMTPDLRERLENLRKKPENIPQPISNTSRANLNKLLTDYTEMKKAILHVYWEEFQKDPVGLMSRVAQPASKKIDQNKLKPEMDEKGNLTTAGFACSQCGQPLFVYKLEQVSEKGKAYTNYFGRCNVAEHEKLILLAQLKPEKDSDEAVTYSLGKFGQRALDFYSIHVTKESTHPVKPLAQIAGNRYASAPVGKALSDACMGTIASFLSKYQDIIIEHQKVVKGNQKRLESLRELAGKENLEYPSVTLPPQPHTKEGVDAYNEVIARVRMWVNLNLWQKLKLSRDDAKPLLRLKGFPSFPLVERQANEVDWWDMVCNVKKLINEKKEDGKVFWQNLAGYKRQEALRPYLSSEEDRKKGKKFARYQLGDLLLHLEKKHGEDWGKVYDEAWERIDKKVEGLSKHIKLEEERRSEDAQSKAALTDWLRAKASFVIEGKKEADKDEFCRCELKLQKWYGDLRGKPFAIEAENSILDISGFSKQYNCAFIWQKDGVKKLNLYLIINYFKGGKLRFKKIKPEAFEANRFYTVINKKSGEIVPMEVNFNFDDPNLIILPLAFGKRQGREFIWNDLLSLETGSLKLANGRVIEKTLYNRRTRQDEPALFVALTFERREVLDSSNIKPMNLIGVDRGENIPAVIALTDPEGCPLSRFKDSLGNPTHILRIGESYKEKQRTIQAKKEVEQRRAGGYSRKYASKAKNLADDMVRNTARDLLYYAVTQDAMLIFENLSRGFGRQGKRTFMAERQYTRMEDWLTAKLAYEGLPSKTYLSKTLAQYTSKTCSNCGFTITSADYDRVLEKLKKTATGWMTTINGKELKVEGQITYYNRYKRQNVVKDLSVELDRLSEESVNNDISSWTKGRSGEALSLLKKRFSHRPVQEKFVCLNCGFETHADEQAALNIARSWLFLRSQEYKKYQTNKTTGNTDKRAFVETWQSFYRKKLKEVWKPAV

SEQ ID NO: 42047 - protein, 978 aa, synthetic construct
  REGION 1..978: note = engineered CasX variant
QEIKRINGIRRRLVKDSNTKKAGKTGPMKTLLVRVMTPDLRERLENLRKKPENIPQPISNTSRANLNKLLTDYTEMKKAILHVYWEEFQKDPVGLMSRVAQPASKKIDQNKLKPEMDEKGNLTTAGFACSQCGQPLFVYKLEQVSEKGKAYTNYFGRCNVAEHEKLILLAQLKPEKDSDEAVTYSLGKFGQRALDFYSIHVTKESTHPVKPLAQIAGNRYASVPVGKALSDACMGTIASFLSKYQDIIIEHQKVVKGNQKRLESLRELAGKENLEYPSVTLPPQPHTKEGVDAYNEVIARVRMWVNLNLWQKLKLSRDDAKPLLRLKGFPSFPLVERQANEVDWWDMVCNVKKLINEKKEDGKVFWQNLAGYKRQEALRPYLSSEEDRKKGKKFARYQLGDLLLHLEKKHGEDWGKVYDEAWERIDKKVEGLSKHIKLEEERRSEDAQSKAALTDWLRAKASFVIEGKKEADKDEFCRCELKLQKWYGDLRGKPFAIEAENSILDISGFSKQYNCAFIWQKDGVKKLNLYLIINYFKGGKLRFKKIKPEAFEANRFYTVINKKSGEIVPMEVNFNFDDPNLIILPLAFGKRQGREFIWNDLLSLETGSLKLANGRVIEKTLYNRRTRQDEPALFVALTFERREVLDSSNIKPMNLIGVDRGENIPAVIALTDPEGCPLSRFKDSLGNPTHILRIGESYKEKQRTIQAKKEVEQRRAGGYSRKYASKAKNLADDMVRNTARDLLYYAVTQDAMLIFENLSRGFGRQGKRTFMAERQYTRMEDWLTAKLAYEGLPSKTYLSKTLAQYTSKTCSNCGFTITSADYDRVLEKLKKTATGWMTTINGKELKVEGQITYYNRYKRQNVVKDLSVELDRLSEESVNNDISSWTKGRSGEALSLLKKRFSHRPVQEKFVCLNCGFETHADEQAALNIARSWLFLRSQEYKKYQTNKTTGNTDKRAFVETWQSFYRKKLKEVWKPAV

SEQ ID NO: 42048 - protein, 978 aa, synthetic construct
  REGION 1..978: note = engineered CasX variant
QEIKRINGIRRRLVKDSNTKKAGKTGPMKTLLVRVMTPDLRERLENLRKKPENIPQPISNTSRANLNKLLTDYTEMKKAILHVYWEEFQKDPVGLMSRVAQPASKKIDQNKLKPEMDEKGNLTTAGFACSQCGQPLFVYKLEQVSEKGKAYTNYFGRCNVAEHEKLIKLAQLKPEKDSDEAVTYSLGKFGQRALDFYSIHVTKESTHPVKPLAQIAGNRYASGPVGKALSDACMGTIASFLSKYQDIIIEHQKVVKGNQKRLESLRELAGKENLEYPSVTLPPQPHTKEGVDAYNEVIARVRMWVNLNLWQKLKLSRDDAKPLLRLKGFPSFPLVERQANEVDWWDMVCNVKKLINEKKEDGKVFWQNLAGYKRQEALRPYLSSEEDRKKGKKFARYQLGDLLLHLEKKHGEDWGKVYDEAWERIDKKVEGLSKHIKLEEERRSEDAQSKAALTDWLRAKASFVIEGKKEADKDEFCRCELKLQKWYGDLRGKPFAIEAENSILDISGFSKQYNCAFIWQKDGVKKLNLYLIINYFKGGKLRFKKIKPEAFEANRFYTVINKKSGEIVPMEVNFNFDDPNLIILPLAFGKRQGREFIWNDLLSLETGSLKLANGRVIEKTLYNRRTRQDEPALFVALTFERREVLDSSNIKPMNLIGVDRGENIPAVIALTDPEGCPLSRFKDSLGNPTHILRIGESYKEKQRTIQAKKEVEQRRAGGYSRKYASKAKNLADDMVRNTARDLLYYAVTQDAMLIFENLSRGFGRQGKRTFMAERQYTRMEDWLTAKLAYEGLPSKTYLSKTLAQYTSKTCSNCGFTITSADYDRVLEKLKKTATGWMTTINGKELKVEGQITYYNRYKRQNVVKDLSVELDRLSEESVNNDISSWTKGRSGEALSLLKKRFSHRPVQEKFVCLNCGFETHADEQAALNIARSWLFLRSQEYKKYQTNKTTGNTDKRAFVETWQSFYRKKLKEVWKPAV

SEQ ID NO: 42049 - protein, 977 aa, synthetic construct
  REGION 1..977: note = engineered CasX variant
QEIKRINGIRRRLVKDSNTKKAGKTGPMKTLLVRVMTPDLRERLENLRKKPENIPQPISNTSRANLNKLLTDYTEMKKAILHVYWEEFQKDPVGLMSRVAQPASKKIDQNKLKPEMDEKGNLTTAGFACSQCGQPLFVYKLEQVSEKGKAYTNYFGRCNVAEHEKLILLAQLKPEKDSDEAVTYSLGKFGQRALDFYSIHVTKESTHPVKPLAQIAGNRYASPVGKALSDACMGTIASFLSKYQDIIIEHQKVVKGNQKRLESLRELAGKENLEYPSVTLPPQPHTKEGVDAYNEVIARVRMWVNLNLWQKLKLSRDDAKPLLRLKGFPSFPLVERQANEVDWWDMVCNVKKLINEKKEDGKVFWQNLAGYKRQEALRPYLSSEEDRKKGKKFARYQLGDLLLHLEKKHGEDWGKVYDEAWERIDKKVEGLSKHIKLEEERRSEDAQSKAALTDWLRAKASFVIEGKKEADKDEFCRCELKLQKWYGDLRGKPFAIEAENSILDISGFSKQYNCAFIWQKDGVKKLNLYLIINYFKGGKLRFKKIKPEAFEANRFYTVINKKSGEIVPMEVNFNFDDPNLIILPLAFGKRQGREFIWNDLLSLETGSLKLANGRVIEKTLYNRRTRQDEPALFVALTFERREVLDSSNIKPMNLIGVDRGENIPAVIALTDPEGCPLSRFKDSLGNPTHILRIGESYKEKQRTIQAKKEVEQRRAGGYSRKYASKAKNLADDMVRNTARDLLYYAVTQDAMLIFENLSRGFGRQGKRTFMAERQYTRMEDWLTAKLAYEGLPSKTYLSKTLAQYTSKTCSNCGFTITSADYDRVLEKLKKTATGWMTTINGKELKVEGQITYYNRYKRQNVVKDLSVELDRLSEESVNNDISSWTKGRSGEALSLLKKRFSHRPVQEKFVCLNCGFETHADEQAALNIARSWLFLRSQEYKKYQTNKTTGNTDKRAFVETWQSFYRKKLKEVWKPAV

SEQ ID NO: 42050 - protein, 978 aa, synthetic construct
  REGION 1..978: note = engineered CasX variant
QEIKRINGIRRRLVKDSNTKKAGKTGPMKTLLVRVMTPDLRERLENLRKKPENIPQPISNTSRANLNKLLTDYTEMKKAILHVYWEEFQKDPVGLMSRVAQPASKKIDQNKLKPEMDEKGNLTTAGFACSQCGQPLFVYKLEQVSEKGKAYTNYFGRCNVAEHEKLILLAQLKPEKDSDEAVTYSLGKFGQRALDFYSIHVTKESTHPVKPLAQIAGNRYASYPVGKALSDACMGTIASFLSKYQDIIIEHQKVVKGNQKRLESLRELAGKENLEYPSVTLPPQPHTKEGVDAYNEVIARVRMWVNLNLWQKLKLSRDDAKPLLRLKGFPSFPLVERQANEVDWWDMVCNVKKLINEKKEDGKVFWQNLAGYKRQEALRPYLSSEEDRKKGKKFARYQLGDLLLHLEKKHGEDWGKVYDEAWERIDKKVEGLSKHIKLEEERRSEDAQSKAALTDWLRAKASFVIEGSKEADKDEFCRCELKLQKWYGDLRGKPFAIEAENSILDISGFSKQYNCAFIWQKDGVKKLNLYLIINYFKGGKLRFKKIKPEAFEANRFYTVINKKSGEIVPMEVNFNFDDPNLIILPLAFGKRQGREFIWNDLLSLETGSLKLANGRVIEKTLYNRRTRQDEPALFVALTFERREVLDSSNIKPMNLIGVDRGENIPAVIALTDPEGCPLSRFKDSLGNPTHILRIGESYKEKQRTIQAKKEVEQRRAGGYSRKYASKAKNLADDMVRNTARDLLYYAVTQDAMLIFENLSRGFGRQGKRTFMAERQYTRMEDWLTAKLAYEGLPSKTYLSKTLAQYTSKTCSNCGFTITSADYDRVLEKLKKTATGWMTTINGKELKVEGQITYYNRYKRQNVVKDLSVELDRLSEESVNNDISSWTKGRSGEALSLLKKRFSHRPVQEKFVCLNCGFETHADEQAALNIARSWLFLRSQEYKKYQTNKTTGNTDKRAFVETWQSFYRKKLKEVWKPAV

SEQ ID NO: 42051 - protein, 978 aa, synthetic construct
  REGION 1..978: note = engineered CasX variant
QEIKRINGIRRRLVKDSNTKKAGKTGPMKTLLVRVMTPDLRERLENLRKKPENIPQPISNTSRANLNKLLTDYTEMKKAILHVYWEEFQKDPVGLMSRVAQPASKKIDQNKLKPEMDEKGNLTTAGFACSQCGQPLFVYKLEQVSEKGKAYTNYFGRCNVAEHEKLILLAQLKPEKDSDEAVTYSLGKFGQRALDFYSIHVTKESTHPVKPLAQIAGNRYASHPVGKALSDACMGTIASFLSKYQDIIIEHQKVVKGNQKRLESLRELAGKENLEYPSVTLPPQPHTKEGVDAYNEVIARVRMWVNLNLWQKLKLSRDDAKPLLRLKGFPSFPLVERQANEVDWWDMVCNVKKLINEKKEDGKVFWQNLAGYKRQEALRPYLSSEEDRKKGKKFARYQLGDLLLHLEKKHGEDWGKVYDEAWERIDKKVEGLSKHIKLEEERRSEDAQSKAALTDWLRAKASFVIEGSKEADKDEFCRCELKLQKWYGDLRGKPFAIEAENSILDISGFSKQYNCAFIWQKDGVKKLNLYLIINYFKGGKLRFKKIKPEAFEANRFYTVINKKSGEIVPMEVNFNFDDPNLIILPLAFGKRQGREFIWNDLLSLETGSLKLANGRVIEKTLYNRRTRQDEPALFVALTFERREVLDSSNIKPMNLIGVDRGENIPAVIALTDPEGCPLSRFKDSLGNPTHILRIGESYKEKQRTIQAKKEVEQRRAGGYSRKYASKAKNLADDMVRNTARDLLYYAVTQDAMLIFENLSRGFGRQGKRTFMAERQYTRMEDWLTAKLAYEGLPSKTYLSKTLAQYTSKTCSNCGFTITSADYDRVLEKLKKTATGWMTTINGKELKVEGQITYYNRYKRQNVVKDLSVELDRLSEESVNNDISSWTKGRSGEALSLLKKRFSHRPVQEKFVCLNCGFETHADEQAALNIARSWLFLRSQEYKKYQTNKTTGNTDKRAFVETWQSFYRKKLKEVWKPAV

SEQ ID NO: 42052 - protein, 978 aa, synthetic construct
  REGION 1..978: note = engineered CasX variant
QEIKRINGIRRRLVKDSNTKKAGKTGPMKTLLVRVMTPDLRERLENLRKKPENIPQPISNTSRANLNKLLTDYTEMKKAILHVYWEEFQKDPVGLMSRVAQPASKKIDQNKLKPEMDEKGNLTTAGFACSQCGQPLFVYKLEQVSEKGKAYTNYFGRCNVAEHEKLILLAQLKPEKDSDEAVTYSLGKFGQRALDFYSIHVTKESTHPVKPLAQIAGNRYASSPVGKALSDACMGTIASFLSKYQDIIIEHQKVVKGNQKRLESLRELAGKENLEYPSVTLPPQPHTKEGVDAYNEVIARVRMWVNLNLWQKLKLSRDDAKPLLRLKGFPSFPLVERQANEVDWWDMVCNVKKLINEKKEDGKVFWQNLAGYKRQEALRPYLSSEEDRKKGKKFARYQLGDLLLHLEKKHGEDWGKVYDEAWERIDKKVEGLSKHIKLEEERRSEDAQSKAALTDWLRAKASFVIEGSKEADKDEFCRCELKLQKWYGDLRGKPFAIEAENSILDISGFSKQYNCAFIWQKDGVKKLNLYLIINYFKGGKLRFKKIKPEAFEANRFYTVINKKSGEIVPMEVNFNFDDPNLIILPLAFGKRQGREFIWNDLLSLETGSLKLANGRVIEKTLYNRRTRQDEPALFVALTFERREVLDSSNIKPMNLIGVDRGENIPAVIALTDPEGCPLSRFKDSLGNPTHILRIGESYKEKQRTIQAKKEVEQRRAGGYSRKYASKAKNLADDMVRNTARDLLYYAVTQDAMLIFENLSRGFGRQGKRTFMAERQYTRMEDWLTAKLAYEGLPSKTYLSKTLAQYTSKTCSNCGFTITSADYDRVLEKLKKTATGWMTTINGKELKVEGQITYYNRYKRQNVVKDLSVELDRLSEESVNNDISSWTKGRSGEALSLLKKRFSHRPVQEKFVCLNCGFETHADEQAALNIARSWLFLRSQEYKKYQTNKTTGNTDKRAFVETWQSFYRKKLKEVWKPAV

SEQ ID NO: 42053 - protein, 978 aa, synthetic construct
  REGION 1..978: note = engineered CasX variant
QEIKRINGIRRRLVKDSNTKKAGKTGPMKTLLVRVMTPDLRERLENLRKKPENIPQPISNTSRANLNKLLTDYTEMKKAILHVYWEEFQKDPVGLMSRVAQPASKKIDQNKLKPEMDEKGNLTTAGFACSQCGQPLFVYKLEQVSEKGKAYTNYFGRCNVAEHEKLILLAQLKPEKDSDEAVTYSLGKFGQRALDFYSIHVTKESTHPVKPLAQIAGNRYASTPVGKALSDACMGTIASFLSKYQDIIIEHQKVVKGNQKRLESLRELAGKENLEYPSVTLPPQPHTKEGVDAYNEVIARVRMWVNLNLWQKLKLSRDDAKPLLRLKGFPSFPLVERQANEVDWWDMVCNVKKLINEKKEDGKVFWQNLAGYKRQEALRPYLSSEEDRKKGKKFARYQLGDLLLHLEKKHGEDWGKVYDEAWERIDKKVEGLSKHIKLEEERRSEDAQSKAALTDWLRAKASFVIEGSKEADKDEFCRCELKLQKWYGDLRGKPFAIEAENSILDISGFSKQYNCAFIWQKDGVKKLNLYLIINYFKGGKLRFKKIKPEAFEANRFYTVINKKSGEIVPMEVNFNFDDPNLIILPLAFGKRQGREFIWNDLLSLETGSLKLANGRVIEKTLYNRRTRQDEPALFVALTFERREVLDSSNIKPMNLIGVDRGENIPAVIALTDPEGCPLSRFKDSLGNPTHILRIGESYKEKQRTIQAKKEVEQRRAGGYSRKYASKAKNLADDMVRNTARDLLYYAVTQDAMLIFENLSRGFGRQGKRTFMAERQYTRMEDWLTAKLAYEGLPSKTYLSKTLAQYTSKTCSNCGFTITSADYDRVLEKLKKTATGWMTTINGKELKVEGQITYYNRYKRQNVVKDLSVELDRLSEESVNNDISSWTKGRSGEALSLLKKRFSHRPVQEKFVCLNCGFETHADEQAALNIARSWLFLRSQEYKKYQTNKTTGNTDKRAFVETWQSFYRKKLKEVWKPAV

SEQ ID NO: 42054 - protein, 978 aa, synthetic construct
  REGION 1..978: note = engineered CasX variant
QEIKRINGIRRRLVKDSNTKKAGKTGPMKTLLVRVMTPDLRERLENLRKKPENIPQPISNTSRANLNKLLTDYTEMKKAILHVYWEEFQKDPVGLMSRVAQPASKKIDQNKLKPEMDEKGNLTTAGFACSQCGQPLFVYKLEQVSEKGKAYTNYFGRCNVAEHEKLILLAQLKPEKDSDEAVTYSLGKFGQRALDFYSIHVTKESTHPVKPLAQIAGNRYASAPVGKALSDACMGTIASFLSKYQDIIIEHQKVVKGNQKRLESLRELAGKENLEYPSVTLPPQPHTKEGVDAYNEVIARVRMWVNLNLWQKLKLSRDDAKPLLRLKGFPSFPLVERQANEVDWWDMVCNVKKLINEKKEDGKVFWQNLAGYKRQEALRPYLSSEEDRKKGKKFARYQLGDLLLHLEKKHGEDWGKVYDEAWERIDKKVEGLSKHIKLEEERRSEDAQSKAALTDWLRAKASFVIEGSKEADKDEFCRCELKLQKWYGDLRGKPFAIEAENSILDISGFSKQYNCAFIWQKDGVKKLNLYLIINYFKGGKLRFKKIKPEAFEANRFYTVINKKSGEIVPMEVNFNFDDPNLIILPLAFGKRQGREFIWNDLLSLETGSLKLANGRVIEKTLYNRRTRQDEPALFVALTFERREVLDSSNIKPMNLIGVDRGENIPAVIALTDPEGCPLSRFKDSLGNPTHILRIGESYKEKQRTIQAKKEVEQRRAGGYSRKYASKAKNLADDMVRNTARDLLYYAVTQDAMLIFENLSRGFGRQGKRTFMAERQYTRMEDWLTAKLAYEGLPSKTYLSKTLAQYTSKTCSNCGFTITSADYDRVLEKLKKTATGWMTTINGKELKVEGQITYYNRYKRQNVVKDLSVELDRLSEESVNNDISSWTKGRSGEALSLLKKRFSHRPVQEKFVCLNCGFETHADEQAALNIARSWLFLRSQEYKKYQTNKTTGNTDKRAFVETWQSFYRKKLKEVWKPAV

SEQ ID NO: 42055 - protein, 978 aa, synthetic construct
  REGION 1..978: note = engineered CasX variant
QEIKRINGIRRRLVKDSNTKKAGKTGPMKTLLVRVMTPDLRERLENLRKKPENIPQPISNTSRANLNKLLTDYTEMKKAILHVYWEEFQKDPVGLMSRVAQPASKKIDQNKLKPEMDEKGNLTTAGFACSQCGQPLFVYKLEQVSEKGKAYTNYFGRCNVAEHEKLILLAQLKPEKDSDEAVTYSLGKFGQRALDFYSIHVTKESTHPVKPLAQIAGNRYASVPVGKALSDACMGTIASFLSKYQDIIIEHQKVVKGNQKRLESLRELAGKENLEYPSVTLPPQPHTKEGVDAYNEVIARVRMWVNLNLWQKLKLSRDDAKPLLRLKGFPSFPLVERQANEVDWWDMVCNVKKLINEKKEDGKVFWQNLAGYKRQEALRPYLSSEEDRKKGKKFARYQLGDLLLHLEKKHGEDWGKVYDEAWERIDKKVEGLSKHIKLEEERRSEDAQSKAALTDWLRAKASFVIEGSKEADKDEFCRCELKLQKWYGDLRGKPFAIEAENSILDISGFSKQYNCAFIWQKDGVKKLNLYLIINYFKGGKLRFKKIKPEAFEANRFYTVINKKSGEIVPMEVNFNFDDPNLIILPLAFGKRQGREFIWNDLLSLETGSLKLANGRVIEKTLYNRRTRQDEPALFVALTFERREVLDSSNIKPMNLIGVDRGENIPAVIALTDPEGCPLSRFKDSLGNPTHILRIGESYKEKQRTIQAKKEVEQRRAGGYSRKYASKAKNLADDMVRNTARDLLYYAVTQDAMLIFENLSRGFGRQGKRTFMAERQYTRMEDWLTAKLAYEGLPSKTYLSKTLAQYTSKTCSNCGFTITSADYDRVLEKLKKTATGWMTTINGKELKVEGQITYYNRYKRQNVVKDLSVELDRLSEESVNNDISSWTKGRSGEALSLLKKRFSHRPVQEKFVCLNCGFETHADEQAALNIARSWLFLRSQEYKKYQTNKTTGNTDKRAFVETWQSFYRKKLKEVWKPAV

SEQ ID NO: 42056 - protein, 978 aa, synthetic construct
  REGION 1..978: note = engineered CasX variant
QEIKRINGIRRRLVKDSNTKKAGKTGPMKTLLVRVMTPDLRERLENLRKKPENIPQPISNTSRANLNKLLTDYTEMKKAILHVYWEEFQKDPVGLMSRVAQPASKKIDQNKLKPEMDEKGNLTTAGFACSQCGQPLFVYKLEQVSEKGKAYTNYFGRCNVAEHEKLIKLAQLKPEKDSDEAVTYSLGKFGQRALDFYSIHVTKESTHPVKPLAQIAGNRYASGPVGKALSDACMGTIASFLSKYQDIIIEHQKVVKGNQKRLESLRELAGKENLEYPSVTLPPQPHTKEGVDAYNEVIARVRMWVNLNLWQKLKLSRDDAKPLLRLKGFPSFPLVERQANEVDWWDMVCNVKKLINEKKEDGKVFWQNLAGYKRQEALRPYLSSEEDRKKGKKFARYQLGDLLLHLEKKHGEDWGKVYDEAWERIDKKVEGLSKHIKLEEERRSEDAQSKAALTDWLRAKASFVIEGSKEADKDEFCRCELKLQKWYGDLRGKPFAIEAENSILDISGFSKQYNCAFIWQKDGVKKLNLYLIINYFKGGKLRFKKIKPEAFEANRFYTVINKKSGEIVPMEVNFNFDDPNLIILPLAFGKRQGREFIWNDLLSLETGSLKLANGRVIEKTLYNRRTRQDEPALFVALTFERREVLDSSNIKPMNLIGVDRGENIPAVIALTDPEGCPLSRFKDSLGNPTHILRIGESYKEKQRTIQAKKEVEQRRAGGYSRKYASKAKNLADDMVRNTARDLLYYAVTQDAMLIFENLSRGFGRQGKRTFMAERQYTRMEDWLTAKLAYEGLPSKTYLSKTLAQYTSKTCSNCGFTITSADYDRVLEKLKKTATGWMTTINGKELKVEGQITYYNRYKRQNVVKDLSVELDRLSEESVNNDISSWTKGRSGEALSLLKKRFSHRPVQEKFVCLNCGFETHADEQAALNIARSWLFLRSQEYKKYQTNKTTGNTDKRAFVETWQSFYRKKLKEVWKPAV

SEQ ID NO: 42057 - protein, 977 aa, synthetic construct
  REGION 1..977: note = engineered CasX variant
QEIKRINGIRRRLVKDSNTKKAGKTGPMKTLLVRVMTPDLRERLENLRKKPENIPQPISNTSRANLNKLLTDYTEMKKAILHVYWEEFQKDPVGLMSRVAQPASKKIDQNKLKPEMDEKGNLTTAGFACSQCGQPLFVYKLEQVSEKGKAYTNYFGRCNVAEHEKLILLAQLKPEKDSDEAVTYSLGKFGQRALDFYSIHVTKESTHPVKPLAQIAGNRYASPVGKALSDACMGTIASFLSKYQDIIIEHQKVVKGNQKRLESLRELAGKENLEYPSVTLPPQPHTKEGVDAYNEVIARVRMWVNLNLWQKLKLSRDDAKPLLRLKGFPSFPLVERQANEVDWWDMVCNVKKLINEKKEDGKVFWQNLAGYKRQEALRPYLSSEEDRKKGKKFARYQLGDLLLHLEKKHGEDWGKVYDEAWERIDKKVEGLSKHIKLEEERRSEDAQSKAALTDWLRAKASFVIEGSKEADKDEFCRCELKLQKWYGDLRGKPFAIEAENSILDISGFSKQYNCAFIWQKDGVKKLNLYLIINYFKGGKLRFKKIKPEAFEANRFYTVINKKSGEIVPMEVNFNFDDPNLIILPLAFGKRQGREFIWNDLLSLETGSLKLANGRVIEKTLYNRRTRQDEPALFVALTFERREVLDSSNIKPMNLIGVDRGENIPAVIALTDPEGCPLSRFKDSLGNPTHILRIGESYKEKQRTIQAKKEVEQRRAGGYSRKYASKAKNLADDMVRNTARDLLYYAVTQDAMLIFENLSRGFGRQGKRTFMAERQYTRMEDWLTAKLAYEGLPSKTYLSKTLAQYTSKTCSNCGFTITSADYDRVLEKLKKTATGWMTTINGKELKVEGQITYYNRYKRQNVVKDLSVELDRLSEESVNNDISSWTKGRSGEALSLLKKRFSHRPVQEKFVCLNCGFETHADEQAALNIARSWLFLRSQEYKKYQTNKTTGNTDKRAFVETWQSFYRKKLKEVWKPAV

SEQ ID NO: 42058 - protein, 979 aa, synthetic construct
  REGION 1..979: note = engineered CasX variant
QEIKRINGIRRRLVKDSNTKKAGKTGPMKTLLVRVMTPDLRERLENLRKKPENIPQPISNTSRANLNKLLTDYTEMKKAILHVYWEEFQKDPVGLMSRVAQPASKKIDQNKLKPEMDEKGNLTTAGFACSQCGQPLFVYKLEQVSEKGKAYTNYFGRCNVAEHEKLILLAQLKPEKDSDEAVTYSLGKFGQRALDFYSIHVTKESTHPVKPLAQIAGNRYASYPVGKALSDACMGTIASFLSKYQDIIIEHQKVVKGNQKRLESLRELAGKENLEYPSVTLPPQPHTKEGVDAYNEVIARVRMWVNLNLWQKLKLSRDDAKPLLRLKGFPSFPLVERQANEVDWWDMVCNVKKLINEKKEDGKVFWQNLAGYKRQEALRPYLSSEEDRKKGKKFARYQLGDLLLHLEKKHGEDWGKVYDEAWERIDKKVEGLSKHIKLEEERRSEDAQSKAALTDWLRAKASFVIEGLKEADDKDEFCRCELKLQKWYGDLRGKPFAIEAENSILDISGFSKQYNCAFIWQKDGVKKLNLYLIINYFKGGKLRFKKIKPEAFEANRFYTVINKKSGEIVPMEVNFNFDDPNLIILPLAFGKRQGREFIWNDLLSLETGSLKLANGRVIEKTLYNRRTRQDEPALFVALTFERREVLDSSNIKPMNLIGVDRGENIPAVIALTDPEGCPLSRFKDSLGNPTHILRIGESYKEKQRTIQAKKEVEQRRAGGYSRKYASKAKNLADDMVRNTARDLLYYAVTQDAMLIFENLSRGFGRQGKRTFMAERQYTRMEDWLTAKLAYEGLPSKTYLSKTLAQYTSKTCSNCGFTITSADYDRVLEKLKKTATGWMTTINGKELKVEGQITYYNRYKRQNVVKDLSVELDRLSEESVNNDISSWTKGRSGEALSLLKKRFSHRPVQEKFVCLNCGFETHADEQAALNIARSWLFLRSQEYKKYQTNKTTGNTDKRAFVETWQSFYRKKLKEVWKPAV

SEQ ID NO: 42059 - protein, 979 aa, synthetic construct
  REGION 1..979: note = engineered CasX variant
QEIKRINGIRRRLVKDSNTKKAGKTGPMKTLLVRVMTPDLRERLENLRKKPENIPQPISNTSRANLNKLLTDYTEMKKAILHVYWEEFQKDPVGLMSRVAQPASKKIDQNKLKPEMDEKGNLTTAGFACSQCGQPLFVYKLEQVSEKGKAYTNYFGRCNVAEHEKLILLAQLKPEKDSDEAVTYSLGKFGQRALDFYSIHVTKESTHPVKPLAQIAGNRYASHPVGKALSDACMGTIASFLSKYQDIIIEHQKVVKGNQKRLESLRELAGKENLEYPSVTLPPQPHTKEGVDAYNEVIARVRMWVNLNLWQKLKLSRDDAKPLLRLKGFPSFPLVERQANEVDWWDMVCNVKKLINEKKEDGKVFWQNLAGYKRQEALRPYLSSEEDRKKGKKFARYQLGDLLLHLEKKHGEDWGKVYDEAWERIDKKVEGLSKHIKLEEERRSEDAQSKAALTDWLRAKASFVIEGLKEADDKDEFCRCELKLQKWYGDLRGKPFAIEAENSILDISGFSKQYNCAFIWQKDGVKKLNLYLIINYFKGGKLRFKKIKPEAFEANRFYTVINKKSGEIVPMEVNFNFDDPNLIILPLAFGKRQGREFIWNDLLSLETGSLKLANGRVIEKTLYNRRTRQDEPALFVALTFERREVLDSSNIKPMNLIGVDRGENIPAVIALTDPEGCPLSRFKDSLGNPTHILRIGESYKEKQRTIQAKKEVEQRRAGGYSRKYASKAKNLADDMVRNTARDLLYYAVTQDAMLIFENLSRGFGRQGKRTFMAERQYTRMEDWLTAKLAYEGLPSKTYLSKTLAQYTSKTCSNCGFTITSADYDRVLEKLKKTATGWMTTINGKELKVEGQITYYNRYKRQNVVKDLSVELDRLSEESVNNDISSWTKGRSGEALSLLKKRFSHRPVQEKFVCLNCGFETHADEQAALNIARSWLFLRSQEYKKYQTNKTTGNTDKRAFVETWQSFYRKKLKEVWKPAV

SEQ ID NO: 42060 - protein, 979 aa, synthetic construct
  REGION 1..979: note = engineered CasX variant
QEIKRINGIRRRLVKDSNTKKAGKTGPMKTLLVRVMTPDLRERLENLRKKPENIPQPISNTSRANLNKLLTDYTEMKKAILHVYWEEFQKDPVGLMSRVAQPASKKIDQNKLKPEMDEKGNLTTAGFACSQCGQPLFVYKLEQVSEKGKAYTNYFGRCNVAEHEKLILLAQLKPEKDSDEAVTYSLGKFGQRALDFYSIHVTKESTHPVKPLAQIAGNRYASSPVGKALSDACMGTIASFLSKYQDIIIEHQKVVKGNQKRLESLRELAGKENLEYPSVTLPPQPHTKEGVDAYNEVIARVRMWVNLNLWQKLKLSRDDAKPLLRLKGFPSFPLVERQANEVDWWDMVCNVKKLINEKKEDGKVFWQNLAGYKRQEALRPYLSSEEDRKKGKKFARYQLGDLLLHLEKKHGEDWGKVYDEAWERIDKKVEGLSKHIKLEEERRSEDAQSKAALTDWLRAKASFVIEGLKEADDKDEFCRCELKLQKWYGDLRGKPFAIEAENSILDISGFSKQYNCAFIWQKDGVKKLNLYLIINYFKGGKLRFKKIKPEAFEANRFYTVINKKSGEIVPMEVNFNFDDPNLIILPLAFGKRQGREFIWNDLLSLETGSLKLANGRVIEKTLYNRRTRQDEPALFVALTFERREVLDSSNIKPMNLIGVDRGENIPAVIALTDPEGCPLSRFKDSLGNPTHILRIGESYKEKQRTIQAKKEVEQRRAGGYSRKYASKAKNLADDMVRNTARDLLYYAVTQDAMLIFENLSRGFGRQGKRTFMAERQYTRMEDWLTAKLAYEGLPSKTYLSKTLAQYTSKTCSNCGFTITSADYDRVLEKLKKTATGWMTTINGKELKVEGQITYYNRYKRQNVVKDLSVELDRLSEESVNNDISSWTKGRSGEALSLLKKRFSHRPVQEKFVCLNCGFETHADEQAALNIARSWLFLRSQEYKKYQTNKTTGNTDKRAFVETWQSFYRKKLKEVWKPAV

SEQ ID NO: 42061 - protein, 979 aa, synthetic construct
  REGION 1..979: note = engineered CasX variant
QEIKRINGIRRRLVKDSNTKKAGKTGPMKTLLVRVMTPDLRERLENLRKKPENIPQPISNTSRANLNKLLTDYTEMKKAILHVYWEEFQKDPVGLMSRVAQPASKKIDQNKLKPEMDEKGNLTTAGFACSQCGQPLFVYKLEQVSEKGKAYTNYFGRCNVAEHEKLILLAQLKPEKDSDEAVTYSLGKFGQRALDFYSIHVTKESTHPVKPLAQIAGNRYASTPVGKALSDACMGTIASFLSKYQDIIIEHQKVVKGNQKRLESLRELAGKENLEYPSVTLPPQPHTKEGVDAYNEVIARVRMWVNLNLWQKLKLSRDDAKPLLRLKGFPSFPLVERQANEVDWWDMVCNVKKLINEKKEDGKVFWQNLAGYKRQEALRPYLSSEEDRKKGKKFARYQLGDLLLHLEKKHGEDWGKVYDEAWERIDKKVEGLSKHIKLEEERRSEDAQSKAALTDWLRAKASFVIEGLKEADDKDEFCRCELKLQKWYGDLRGKPFAIEAENSILDISGFSKQYNCAFIWQKDGVKKLNLYLIINYFKGGKLRFKKIKPEAFEANRFYTVINKKSGEIVPMEVNFNFDDPNLIILPLAFGKRQGREFIWNDLLSLETGSLKLANGRVIEKTLYNRRTRQDEPALFVALTFERREVLDSSNIKPMNLIGVDRGENIPAVIALTDPEGCPLSRFKDSLGNPTHILRIGESYKEKQRTIQAKKEVEQRRAGGYSRKYASKAKNLADDMVRNTARDLLYYAVTQDAMLIFENLSRGFGRQGKRTFMAERQYTRMEDWLTAKLAYEGLPSKTYLSKTLAQYTSKTCSNCGFTITSADYDRVLEKLKKTATGWMTTINGKELKVEGQITYYNRYKRQNVVKDLSVELDRLSEESVNNDISSWTKGRSGEALSLLKKRFSHRPVQEKFVCLNCGFETHADEQAALNIARSWLFLRSQEYKKYQTNKTTGNTDKRAFVETWQSFYRKKLKEVWKPAV

SEQ ID NO: 42062 - protein, 979 aa, synthetic construct
  REGION 1..979: note = engineered CasX variant
QEIKRINGIRRRLVKDSNTKKAGKTGPMKTLLVRVMTPDLRERLENLRKKPENIPQPISNTSRANLNKLLTDYTEMKKAILHVYWEEFQKDPVGLMSRVAQPASKKIDQNKLKPEMDEKGNLTTAGFACSQCGQPLFVYKLEQVSEKGKAYTNYFGRCNVAEHEKLILLAQLKPEKDSDEAVTYSLGKFGQRALDFYSIHVTKESTHPVKPLAQIAGNRYASAPVGKALSDACMGTIASFLSKYQDIIIEHQKVVKGNQKRLESLRELAGKENLEYPSVTLPPQPHTKEGVDAYNEVIARVRMWVNLNLWQKLKLSRDDAKPLLRLKGFPSFPLVERQANEVDWWDMVCNVKKLINEKKEDGKVFWQNLAGYKRQEALRPYLSSEEDRKKGKKFARYQLGDLLLHLEKKHGEDWGKVYDEAWERIDKKVEGLSKHIKLEEERRSEDAQSKAALTDWLRAKASFVIEGLKEADDKDEFCRCELKLQKWYGDLRGKPFAIEAENSILDISGFSKQYNCAFIWQKDGVKKLNLYLIINYFKGGKLRFKKIKPEAFEANRFYTVINKKSGEIVPMEVNFNFDDPNLIILPLAFGKRQGREFIWNDLLSLETGSLKLANGRVIEKTLYNRRTRQDEPALFVALTFERREVLDSSNIKPMNLIGVDRGENIPAVIALTDPEGCPLSRFKDSLGNPTHILRIGESYKEKQRTIQAKKEVEQRRAGGYSRKYASKAKNLADDMVRNTARDLLYYAVTQDAMLIFENLSRGFGRQGKRTFMAERQYTRMEDWLTAKLAYEGLPSKTYLSKTLAQYTSKTCSNCGFTITSADYDRVLEKLKKTATGWMTTINGKELKVEGQITYYNRYKRQNVVKDLSVELDRLSEESVNNDISSWTKGRSGEALSLLKKRFSHRPVQEKFVCLNCGFETHADEQAALNIARSWLFLRSQEYKKYQTNKTTGNTDKRAFVETWQSFYRKKLKEVWKPAV

SEQ ID NO: 42063 - protein, 979 aa, synthetic construct
  REGION 1..979: note = engineered CasX variant
QEIKRINGIRRRLVKDSNTKKAGKTGPMKTLLVRVMTPDLRERLENLRKKPENIPQPISNTSRANLNKLLTDYTEMKKAILHVYWEEFQKDPVGLMSRVAQPASKKIDQNKLKPEMDEKGNLTTAGFACSQCGQPLFVYKLEQVSEKGKAYTNYFGRCNVAEHEKLILLAQLKPEKDSDEAVTYSLGKFGQRALDFYSIHVTKESTHPVKPLAQIAGNRYASVPVGKALSDACMGTIASFLSKYQDIIIEHQKVVKGNQKRLESLRELAGKENLEYPSVTLPPQPHTKEGVDAYNEVIARVRMWVNLNLWQKLKLSRDDAKPLLRLKGFPSFPLVERQANEVDWWDMVCNVKKLINEKKEDGKVFWQNLAGYKRQEALRPYLSSEEDRKKGKKFARYQLGDLLLHLEKKHGEDWGKVYDEAWERIDKKVEGLSKHIKLEEERRSEDAQSKAALTDWLRAKASFVIEGLKEADDKDEFCRCELKLQKWYGDLRGKPFAIEAENSILDISGFSKQYNCAFIWQKDGVKKLNLYLIINYFKGGKLRFKKIKPEAFEANRFYTVINKKSGEIVPMEVNFNFDDPNLIILPLAFGKRQGREFIWNDLLSLETGSLKLANGRVIEKTLYNRRTRQDEPALFVALTFERREVLDSSNIKPMNLIGVDRGENIPAVIALTDPEGCPLSRFKDSLGNPTHILRIGESYKEKQRTIQAKKEVEQRRAGGYSRKYASKAKNLADDMVRNTARDLLYYAVTQDAMLIFENLSRGFGRQGKRTFMAERQYTRMEDWLTAKLAYEGLPSKTYLSKTLAQYTSKTCSNCGFTITSADYDRVLEKLKKTATGWMTTINGKELKVEGQITYYNRYKRQNVVKDLSVELDRLSEESVNNDISSWTKGRSGEALSLLKKRFSHRPVQEKFVCLNCGFETHADEQAALNIARSWLFLRSQEYKKYQTNKTTGNTDKRAFVETWQSFYRKKLKEVWKPAV

SEQ ID NO: 42064 - protein, 979 aa, synthetic construct
  REGION 1..979: note = engineered CasX variant
QEIKRINGIRRRLVKDSNTKKAGKTGPMKTLLVRVMTPDLRERLENLRKKPENIPQPISNTSRANLNKLLTDYTEMKKAILHVYWEEFQKDPVGLMSRVAQPASKKIDQNKLKPEMDEKGNLTTAGFACSQCGQPLFVYKLEQVSEKGKAYTNYFGRCNVAEHEKLIKLAQLKPEKDSDEAVTYSLGKFGQRALDFYSIHVTKESTHPVKPLAQIAGNRYASGPVGKALSDACMGTIASFLSKYQDIIIEHQKVVKGNQKRLESLRELAGKENLEYPSVTLPPQPHTKEGVDAYNEVIARVRMWVNLNLWQKLKLSRDDAKPLLRLKGFPSFPLVERQANEVDWWDMVCNVKKLINEKKEDGKVFWQNLAGYKRQEALRPYLSSEEDRKKGKKFARYQLGDLLLHLEKKHGEDWGKVYDEAWERIDKKVEGLSKHIKLEEERRSEDAQSKAALTDWLRAKASFVIEGLKEADDKDEFCRCELKLQKWYGDLRGKPFAIEAENSILDISGFSKQYNCAFIWQKDGVKKLNLYLIINYFKGGKLRFKKIKPEAFEANRFYTVINKKSGEIVPMEVNFNFDDPNLIILPLAFGKRQGREFIWNDLLSLETGSLKLANGRVIEKTLYNRRTRQDEPALFVALTFERREVLDSSNIKPMNLIGVDRGENIPAVIALTDPEGCPLSRFKDSLGNPTHILRIGESYKEKQRTIQAKKEVEQRRAGGYSRKYASKAKNLADDMVRNTARDLLYYAVTQDAMLIFENLSRGFGRQGKRTFMAERQYTRMEDWLTAKLAYEGLPSKTYLSKTLAQYTSKTCSNCGFTITSADYDRVLEKLKKTATGWMTTINGKELKVEGQITYYNRYKRQNVVKDLSVELDRLSEESVNNDISSWTKGRSGEALSLLKKRFSHRPVQEKFVCLNCGFETHADEQAALNIARSWLFLRSQEYKKYQTNKTTGNTDKRAFVETWQSFYRKKLKEVWKPAV

SEQ ID NO: 42065 - protein, 978 aa, synthetic construct
  REGION 1..978: note = engineered CasX variant
QEIKRINGIRRRLVKDSNTKKAGKTGPMKTLLVRVMTPDLRERLENLRKKPENIPQPISNTSRANLNKLLTDYTEMKKAILHVYWEEFQKDPVGLMSRVAQPASKKIDQNKLKPEMDEKGNLTTAGFACSQCGQPLFVYKLEQVSEKGKAYTNYFGRCNVAEHEKLILLAQLKPEKDSDEAVTYSLGKFGQRALDFYSIHVTKESTHPVKPLAQIAGNRYASPVGKALSDACMGTIASFLSKYQDIIIEHQKVVKGNQKRLESLRELAGKENLEYPSVTLPPQPHTKEGVDAYNEVIARVRMWVNLNLWQKLKLSRDDAKPLLRLKGFPSFPLVERQANEVDWWDMVCNVKKLINEKKEDGKVFWQNLAGYKRQEALRPYLSSEEDRKKGKKFARYQLGDLLLHLEKKHGEDWGKVYDEAWERIDKKVEGLSKHIKLEEERRSEDAQSKAALTDWLRAKASFVIEGLKEADDKDEFCRCELKLQKWYGDLRGKPFAIEAENSILDISGFSKQYNCAFIWQKDGVKKLNLYLIINYFKGGKLRFKKIKPEAFEANRFYTVINKKSGEIVPMEVNFNFDDPNLIILPLAFGKRQGREFIWNDLLSLETGSLKLANGRVIEKTLYNRRTRQDEPALFVALTFERREVLDSSNIKPMNLIGVDRGENIPAVIALTDPEGCPLSRFKDSLGNPTHILRIGESYKEKQRTIQAKKEVEQRRAGGYSRKYASKAKNLADDMVRNTARDLLYYAVTQDAMLIFENLSRGFGRQGKRTFMAERQYTRMEDWLTAKLAYEGLPSKTYLSKTLAQYTSKTCSNCGFTITSADYDRVLEKLKKTATGWMTTINGKELKVEGQITYYNRYKRQNVVKDLSVELDRLSEESVNNDISSWTKGRSGEALSLLKKRFSHRPVQEKFVCLNCGFETHADEQAALNIARSWLFLRSQEYKKYQTNKTTGNTDKRAFVETWQSFYRKKLKEVWKPAV

SEQ ID NO: 42066 - protein, 979 aa, synthetic construct
  REGION 1..979: note = engineered CasX variant
QEIKRINGIRRRLVKDSNTKKAGKTGPMKTLLVRVMTPDLRERLENLRKKPENIPQPISNTSRANLNKLLTDYTEMKKAILHVYWEEFQKDPVGLMSRVAQPASKKIDQNKLKPEMDEKGNLTTAGFACSQCGQPLFVYKLEQVSEKGKAYTNYFGRCNVAEHEKLILLAQLKPEKDSDEAVTYSLGKFGQRALDFYSIHVTKESTHPVKPLAQIAGNRYASYPVGKALSDACMGTIASFLSKYQDIIIEHQKVVKGNQKRLESLRELAGKENLEYPSVTLPPQPHTKEGVDAYNEVIARVRMWVNLNLWQKLKLSRDDAKPLLRLKGFPSFPLVERQANEVDWWDMVCNVKKLINEKKEDGKVFWQNLAGYKRQEALRPYLSSEEDRKKGKKFARYQLGDLLLHLEKKHGEDWGKVYDEAWERIDKKVEGLSKHIKLEEERRSEDAQSKAALTDWLRAKASFVIEGLKEADKDEFCRCELKLQKWYGDLRGKPFAIEAENSILDISGFSKQYNCAFIWQKDGVKKLNLYLIINYFKGGKLRFKKIKPEAFEANRFYTVINKKSGEIVPMEVNFNFDDPNLIILPLAFGKRQGREFIWNDLLSLETGSLKLANGRVIEKTLYNRRTRQDEPALFVALTFERREVLDSSNIKPMNLIGVDRGENIPAVIALTDPEGCPLSRFKDSLGNPTHILRIGESYKEKQRTIQAKKEVEQRRAGGYSRKYASKAKNLADDMVRNTARDLLYYAVTQDAMLIFENLSRGFGRQGKRTFMAERQYTRMEDWLTAKLAYEGLPSKTYLSKTLAQYTSKTCSNCGFTITSADYDRVLEKLKKTATGWMTTINGKELKVEGQITYYNRYKRQNVVKDLSVELDRLSEESVNNDISSWTKGRSGNEALSLLKKRFSHRPVQEKFVCLNCGFETHADEQAALNIARSWLFLRSQEYKKYQTNKTTGNTDKRAFVETWQSFYRKKLKEVWKPAV

SEQ ID NO: 42067 - protein, 979 aa, synthetic construct
  REGION 1..979: note = engineered CasX variant
QEIKRINGIRRRLVKDSNTKKAGKTGPMKTLLVRVMTPDLRERLENLRKKPENIPQPISNTSRANLNKLLTDYTEMKKAILHVYWEEFQKDPVGLMSRVAQPASKKIDQNKLKPEMDEKGNLTTAGFACSQCGQPLFVYKLEQVSEKGKAYTNYFGRCNVAEHEKLILLAQLKPEKDSDEAVTYSLGKFGQRALDFYSIHVTKESTHPVKPLAQIAGNRYASHPVGKALSDACMGTIASFLSKYQDIIIEHQKVVKGNQKRLESLRELAGKENLEYPSVTLPPQPHTKEGVDAYNEVIARVRMWVNLNLWQKLKLSRDDAKPLLRLKGFPSFPLVERQANEVDWWDMVCNVKKLINEKKEDGKVFWQNLAGYKRQEALRPYLSSEEDRKKGKKFARYQLGDLLLHLEKKHGEDWGKVYDEAWERIDKKVEGLSKHIKLEEERRSEDAQSKAALTDWLRAKASFVIEGLKEADKDEFCRCELKLQKWYGDLRGKPFAIEAENSILDISGFSKQYNCAFIWQKDGVKKLNLYLIINYFKGGKLRFKKIKPEAFEANRFYTVINKKSGEIVPMEVNFNFDDPNLIILPLAFGKRQGREFIWNDLLSLETGSLKLANGRVIEKTLYNRRTRQDEPALFVALTFERREVLDSSNIKPMNLIGVDRGENIPAVIALTDPEGCPLSRFKDSLGNPTHILRIGESYKEKQRTIQAKKEVEQRRAGGYSRKYASKAKNLADDMVRNTARDLLYYAVTQDAMLIFENLSRGFGRQGKRTFMAERQYTRMEDWLTAKLAYEGLPSKTYLSKTLAQYTSKTCSNCGFTITSADYDRVLEKLKKTATGWMTTINGKELKVEGQITYYNRYKRQNVVKDLSVELDRLSEESVNNDISSWTKGRSGNEALSLLKKRFSHRPVQEKFVCLNCGFETHADEQAALNIARSWLFLRSQEYKKYQTNKTTGNTDKRAFVETWQSFYRKKLKEVWKPAV

SEQ ID NO: 42068 - protein, 979 aa, synthetic construct
  REGION 1..979: note = engineered CasX variant
QEIKRINGIRRRLVKDSNTKKAGKTGPMKTLLVRVMTPDLRERLENLRKKPENIPQPISNTSRANLNKLLTDYTEMKKAILHVYWEEFQKDPVGLMSRVAQPASKKIDQNKLKPEMDEKGNLTTAGFACSQCGQPLFVYKLEQVSEKGKAYTNYFGRCNVAEHEKLILLAQLKPEKDSDEAVTYSLGKFGQRALDFYSIHVTKESTHPVKPLAQIAGNRYASSPVGKALSDACMGTIASFLSKYQDIIIEHQKVVKGNQKRLESLRELAGKENLEYPSVTLPPQPHTKEGVDAYNEVIARVRMWVNLNLWQKLKLSRDDAKPLLRLKGFPSFPLVERQANEVDWWDMVCNVKKLINEKKEDGKVFWQNLAGYKRQEALRPYLSSEEDRKKGKKFARYQLGDLLLHLEKKHGEDWGKVYDEAWERIDKKVEGLSKHIKLEEERRSEDAQSKAALTDWLRAKASFVIEGLKEADKDEFCRCELKLQKWYGDLRGKPFAIEAENSILDISGFSKQYNCAFIWQKDGVKKLNLYLIINYFKGGKLRFKKIKPEAFEANRFYTVINKKSGEIVPMEVNFNFDDPNLIILPLAFGKRQGREFIWNDLLSLETGSLKLANGRVIEKTLYNRRTRQDEPALFVALTFERREVLDSSNIKPMNLIGVDRGENIPAVIALTDPEGCPLSRFKDSLGNPTHILRIGESYKEKQRTIQAKKEVEQRRAGGYSRKYASKAKNLADDMVRNTARDLLYYAVTQDAMLIFENLSRGFGRQGKRTFMAERQYTRMEDWLTAKLAYEGLPSKTYLSKTLAQYTSKTCSNCGFTITSADYDRVLEKLKKTATGWMTTINGKELKVEGQITYYNRYKRQNVVKDLSVELDRLSEESVNNDISSWTKGRSGNEALSLLKKRFSHRPVQEKFVCLNCGFETHADEQAALNIARSWLFLRSQEYKKYQTNKTTGNTDKRAFVETWQSFYRKKLKEVWKPAV

SEQ ID NO: 42069 - protein, 979 aa, synthetic construct
  REGION 1..979: note = engineered CasX variant
QEIKRINGIRRRLVKDSNTKKAGKTGPMKTLLVRVMTPDLRERLENLRKKPENIPQPISNTSRANLNKLLTDYTEMKKAILHVYWEEFQKDPVGLMSRVAQPASKKIDQNKLKPEMDEKGNLTTAGFACSQCGQPLFVYKLEQVSEKGKAYTNYFGRCNVAEHEKLILLAQLKPEKDSDEAVTYSLGKFGQRALDFYSIHVTKESTHPVKPLAQIAGNRYASTPVGKALSDACMGTIASFLSKYQDIIIEHQKVVKGNQKRLESLRELAGKENLEYPSVTLPPQPHTKEGVDAYNEVIARVRMWVNLNLWQKLKLSRDDAKPLLRLKGFPSFPLVERQANEVDWWDMVCNVKKLINEKKEDGKVFWQNLAGYKRQEALRPYLSSEEDRKKGKKFARYQLGDLLLHLEKKHGEDWGKVYDEAWERIDKKVEGLSKHIKLEEERRSEDAQSKAALTDWLRAKASFVIEGLKEADKDEFCRCELKLQKWYGDLRGKPFAIEAENSILDISGFSKQYNCAFIWQKDGVKKLNLYLIINYFKGGKLRFKKIKPEAFEANRFYTVINKKSGEIVPMEVNFNFDDPNLIILPLAFGKRQGREFIWNDLLSLETGSLKLANGRVIEKTLYNRRTRQDEPALFVALTFERREVLDSSNIKPMNLIGVDRGENIPAVIALTDPEGCPLSRFKDSLGNPTHILRIGESYKEKQRTIQAKKEVEQRRAGGYSRKYASKAKNLADDMVRNTARDLLYYAVTQDAMLIFENLSRGFGRQGKRTFMAERQYTRMEDWLTAKLAYEGLPSKTYLSKTLAQYTSKTCSNCGFTITSADYDRVLEKLKKTATGWMTTINGKELKVEGQITYYNRYKRQNVVKDLSVELDRLSEESVNNDISSWTKGRSGNEALSLLKKRFSHRPVQEKFVCLNCGFETHADEQAALNIARSWLFLRSQEYKKYQTNKTTGNTDKRAFVETWQSFYRKKLKEVWKPAV

SEQ ID NO: 42070 - protein, 979 aa, synthetic construct
  REGION 1..979: note = engineered CasX variant
QEIKRINGIRRRLVKDSNTKKAGKTGPMKTLLVRVMTPDLRERLENLRKKPENIPQPISNTSRANLNKLLTDYTEMKKAILHVYWEEFQKDPVGLMSRVAQPASKKIDQNKLKPEMDEKGNLTTAGFACSQCGQPLFVYKLEQVSEKGKAYTNYFGRCNVAEHEKLILLAQLKPEKDSDEAVTYSLGKFGQRALDFYSIHVTKESTHPVKPLAQIAGNRYASAPVGKALSDACMGTIASFLSKYQDIIIEHQKVVKGNQKRLESLRELAGKENLEYPSVTLPPQPHTKEGVDAYNEVIARVRMWVNLNLWQKLKLSRDDAKPLLRLKGFPSFPLVERQANEVDWWDMVCNVKKLINEKKEDGKVFWQNLAGYKRQEALRPYLSSEEDRKKGKKFARYQLGDLLLHLEKKHGEDWGKVYDEAWERIDKKVEGLSKHIKLEEERRSEDAQSKAALTDWLRAKASFVIEGLKEADKDEFCRCELKLQKWYGDLRGKPFAIEAENSILDISGFSKQYNCAFIWQKDGVKKLNLYLIINYFKGGKLRFKKIKPEAFEANRFYTVINKKSGEIVPMEVNFNFDDPNLIILPLAFGKRQGREFIWNDLLSLETGSLKLANGRVIEKTLYNRRTRQDEPALFVALTFERREVLDSSNIKPMNLIGVDRGENIPAVIALTDPEGCPLSRFKDSLGNPTHILRIGESYKEKQRTIQAKKEVEQRRAGGYSRKYASKAKNLADDMVRNTARDLLYYAVTQDAMLIFENLSRGFGRQGKRTFMAERQYTRMEDWLTAKLAYEGLPSKTYLSKTLAQYTSKTCSNCGFTITSADYDRVLEKLKKTATGWMTTINGKELKVEGQITYYNRYKRQNVVKDLSVELDRLSEESVNNDISSWTKGRSGNEALSLLKKRFSHRPVQEKFVCLNCGFETHADEQAALNIARSWLFLRSQEYKKYQTNKTTGNTDKRAFVETWQSFYRKKLKEVWKPAV

SEQ ID NO: 42071 - protein, 979 aa, synthetic construct
  REGION 1..979: note = engineered CasX variant
QEIKRINGIRRRLVKDSNTKKAGKTGPMKTLLVRVMTPDLRERLENLRKKPENIPQPISNTSRANLNKLLTDYTEMKKAILHVYWEEFQKDPVGLMSRVAQPASKKIDQNKLKPEMDEKGNLTTAGFACSQCGQPLFVYKLEQVSEKGKAYTNYFGRCNVAEHEKLILLAQLKPEKDSDEAVTYSLGKFGQRALDFYSIHVTKESTHPVKPLAQIAGNRYASVPVGKALSDACMGTIASFLSKYQDIIIEHQKVVKGNQKRLESLRELAGKENLEYPSVTLPPQPHTKEGVDAYNEVIARVRMWVNLNLWQKLKLSRDDAKPLLRLKGFPSFPLVERQANEVDWWDMVCNVKKLINEKKEDGKVFWQNLAGYKRQEALRPYLSSEEDRKKGKKFARYQLGDLLLHLEKKHGEDWGKVYDEAWERIDKKVEGLSKHIKLEEERRSEDAQSKAALTDWLRAKASFVIEGLKEADKDEFCRCELKLQKWYGDLRGKPFAIEAENSILDISGFSKQYNCAFIWQKDGVKKLNLYLIINYFKGGKLRFKKIKPEAFEANRFYTVINKKSGEIVPMEVNFNFDDPNLIILPLAFGKRQGREFIWNDLLSLETGSLKLANGRVIEKTLYNRRTRQDEPALFVALTFERREVLDSSNIKPMNLIGVDRGENIPAVIALTDPEGCPLSRFKDSLGNPTHILRIGESYKEKQRTIQAKKEVEQRRAGGYSRKYASKAKNLADDMVRNTARDLLYYAVTQDAMLIFENLSRGFGRQGKRTFMAERQYTRMEDWLTAKLAYEGLPSKTYLSKTLAQYTSKTCSNCGFTITSADYDRVLEKLKKTATGWMTTINGKELKVEGQITYYNRYKRQNVVKDLSVELDRLSEESVNNDISSWTKGRSGNEALSLLKKRFSHRPVQEKFVCLNCGFETHADEQAALNIARSWLFLRSQEYKKYQTNKTTGNTDKRAFVETWQSFYRKKLKEVWKPAV

SEQ ID NO: 42072 - protein, 979 aa, synthetic construct
  REGION 1..979: note = engineered CasX variant
QEIKRINGIRRRLVKDSNTKKAGKTGPMKTLLVRVMTPDLRERLENLRKKPENIPQPISNTSRANLNKLLTDYTEMKKAILHVYWEEFQKDPVGLMSRVAQPASKKIDQNKLKPEMDEKGNLTTAGFACSQCGQPLFVYKLEQVSEKGKAYTNYFGRCNVAEHEKLIKLAQLKPEKDSDEAVTYSLGKFGQRALDFYSIHVTKESTHPVKPLAQIAGNRYASGPVGKALSDACMGTIASFLSKYQDIIIEHQKVVKGNQKRLESLRELAGKENLEYPSVTLPPQPHTKEGVDAYNEVIARVRMWVNLNLWQKLKLSRDDAKPLLRLKGFPSFPLVERQANEVDWWDMVCNVKKLINEKKEDGKVFWQNLAGYKRQEALRPYLSSEEDRKKGKKFARYQLGDLLLHLEKKHGEDWGKVYDEAWERIDKKVEGLSKHIKLEEERRSEDAQSKAALTDWLRAKASFVIEGLKEADKDEFCRCELKLQKWYGDLRGKPFAIEAENSILDISGFSKQYNCAFIWQKDGVKKLNLYLIINYFKGGKLRFKKIKPEAFEANRFYTVINKKSGEIVPMEVNFNFDDPNLIILPLAFGKRQGREFIWNDLLSLETGSLKLANGRVIEKTLYNRRTRQDEPALFVALTFERREVLDSSNIKPMNLIGVDRGENIPAVIALTDPEGCPLSRFKDSLGNPTHILRIGESYKEKQRTIQAKKEVEQRRAGGYSRKYASKAKNLADDMVRNTARDLLYYAVTQDAMLIFENLSRGFGRQGKRTFMAERQYTRMEDWLTAKLAYEGLPSKTYLSKTLAQYTSKTCSNCGFTITSADYDRVLEKLKKTATGWMTTINGKELKVEGQITYYNRYKRQNVVKDLSVELDRLSEESVNNDISSWTKGRSGNEALSLLKKRFSHRPVQEKFVCLNCGFETHADEQAALNIARSWLFLRSQEYKKYQTNKTTGNTDKRAFVETWQSFYRKKLKEVWKPAV

SEQ ID NO: 42073 - protein, 978 aa, synthetic construct
  REGION 1..978: note = engineered CasX variant
QEIKRINGIRRRLVKDSNTKKAGKTGPMKTLLVRVMTPDLRERLENLRKKPENIPQPISNTSRANLNKLLTDYTEMKKAILHVYWEEFQKDPVGLMSRVAQPASKKIDQNKLKPEMDEKGNLTTAGFACSQCGQPLFVYKLEQVSEKGKAYTNYFGRCNVAEHEKLILLAQLKPEKDSDEAVTYSLGKFGQRALDFYSIHVTKESTHPVKPLAQIAGNRYASPVGKALSDACMGTIASFLSKYQDIIIEHQKVVKGNQKRLESLRELAGKENLEYPSVTLPPQPHTKEGVDAYNEVIARVRMWVNLNLWQKLKLSRDDAKPLLRLKGFPSFPLVERQANEVDWWDMVCNVKKLINEKKEDGKVFWQNLAGYKRQEALRPYLSSEEDRKKGKKFARYQLGDLLLHLEKKHGEDWGKVYDEAWERIDKKVEGLSKHIKLEEERRSEDAQSKAALTDWLRAKASFVIEGLKEADKDEFCRCELKLQKWYGDLRGKPFAIEAENSILDISGFSKQYNCAFIWQKDGVKKLNLYLIINYFKGGKLRFKKIKPEAFEANRFYTVINKKSGEIVPMEVNFNFDDPNLIILPLAFGKRQGREFIWNDLLSLETGSLKLANGRVIEKTLYNRRTRQDEPALFVALTFERREVLDSSNIKPMNLIGVDRGENIPAVIALTDPEGCPLSRFKDSLGNPTHILRIGESYKEKQRTIQAKKEVEQRRAGGYSRKYASKAKNLADDMVRNTARDLLYYAVTQDAMLIFENLSRGFGRQGKRTFMAERQYTRMEDWLTAKLAYEGLPSKTYLSKTLAQYTSKTCSNCGFTITSADYDRVLEKLKKTATGWMTTINGKELKVEGQITYYNRYKRQNVVKDLSVELDRLSEESVNNDISSWTKGRSGNEALSLLKKRFSHRPVQEKFVCLNCGFETHADEQAALNIARSWLFLRSQEYKKYQTNKTTGNTDKRAFVETWQSFYRKKLKEVWKPAV

SEQ ID NO: 42074 - protein, 978 aa, synthetic construct
  REGION 1..978: note = engineered CasX variant
QEIKRINGIRRRLVKDSNTKKAGKTGPMKTLLVRVMTPDLRERLENLRKKPENIPQPISNTSRANLNKLLTDYTEMKKAILHVYWEEFQKDPVGLMSRVAQPASKKIDQNKLKPEMDEKGNLTTAGFACSQCGQPLFVYKLEQVSEKGKAYTNYFGRCNVAEHEKLILLAQLKPEKDSDEAVTYSLGKFGQRALDFYSIHVTKESTHPVKPLAQIAGNRYASYPVGKALSDACMGTIASFLSKYQDIIIEHQKVVKGNQKRLESLRELAGKENLEYPSVTLPPQPHTKEGVDAYNEVIARVRMWVNLNLWQKLKLSRDDAKPLLRLKGFPSFPLVERQANEVDWWDMVCNVKKLINEKKEDGKVFWQNLAGYKRQEALRPYLSSEEDRQKGKKFARYQLGDLLLHLEKKHGEDWGKVYDEAWERIDKKVEGLSKHIKLEEERRSEDAQSKAALTDWLRAKASFVIEGLKEADKDEFCRCELKLQKWYGDLRGKPFAIEAENSILDISGFSKQYNCAFIWQKDGVKKLNLYLIINYFKGGKLRFKKIKPEAFEANRFYTVINKKSGEIVPMEVNFNFDDPNLIILPLAFGKRQGREFIWNDLLSLETGSLKLANGRVIEKTLYNRRTRQDEPALFVALTFERREVLDSSNIKPMNLIGVDRGENIPAVIALTDPEGCPLSRFKDSLGNPTHILRIGESYKEKQRTIQAKKEVEQRRAGGYSRKYASKAKNLADDMVRNTARDLLYYAVTQDAMLIFENLSRGFGRQGKRTFMAERQYTRMEDWLTAKLAYEGLPSKTYLSKTLAQYTSKTCSNCGFTITSADYDRVLEKLKKTATGWMTTINGKELKVEGQITYYNRYKRQNVVKDLSVELDRLSEESVNNDISSWTKGRSGEALSLLKKRFSHRPVQEKFVCLNCGFETHADEQAALNIARSWLFLRSQEYKKYQTNKTTGNTDKRAFVETWQSFYRKKLKEVWKPAV

SEQ ID NO: 42075 - protein, 978 aa, synthetic construct
  REGION 1..978: note = engineered CasX variant
QEIKRINGIRRRLVKDSNTKKAGKTGPMKTLLVRVMTPDLRERLENLRKKPENIPQPISNTSRANLNKLLTDYTEMKKAILHVYWEEFQKDPVGLMSRVAQPASKKIDQNKLKPEMDEKGNLTTAGFACSQCGQPLFVYKLEQVSEKGKAYTNYFGRCNVAEHEKLILLAQLKPEKDSDEAVTYSLGKFGQRALDFYSIHVTKESTHPVKPLAQIAGNRYASHPVGKALSDACMGTIASFLSKYQDIIIEHQKVVKGNQKRLESLRELAGKENLEYPSVTLPPQPHTKEGVDAYNEVIARVRMWVNLNLWQKLKLSRDDAKPLLRLKGFPSFPLVERQANEVDWWDMVCNVKKLINEKKEDGKVFWQNLAGYKRQEALRPYLSSEEDRQKGKKFARYQLGDLLLHLEKKHGEDWGKVYDEAWERIDKKVEGLSKHIKLEEERRSEDAQSKAALTDWLRAKASFVIEGLKEADKDEFCRCELKLQKWYGDLRGKPFAIEAENSILDISGFSKQYNCAFIWQKDGVKKLNLYLIINYFKGGKLRFKKIKPEAFEANRFYTVINKKSGEIVPMEVNFNFDDPNLIILPLAFGKRQGREFIWNDLLSLETGSLKLANGRVIEKTLYNRRTRQDEPALFVALTFERREVLDSSNIKPMNLIGVDRGENIPAVIALTDPEGCPLSRFKDSLGNPTHILRIGESYKEKQRTIQAKKEVEQRRAGGYSRKYASKAKNLADDMVRNTARDLLYYAVTQDAMLIFENLSRGFGRQGKRTFMAERQYTRMEDWLTAKLAYEGLPSKTYLSKTLAQYTSKTCSNCGFTITSADYDRVLEKLKKTATGWMTTINGKELKVEGQITYYNRYKRQNVVKDLSVELDRLSEESVNNDISSWTKGRSGEALSLLKKRFSHRPVQEKFVCLNCGFETHADEQAALNIARSWLFLRSQEYKKYQTNKTTGNTDKRAFVETWQSFYRKKLKEVWKPAV

SEQ ID NO: 42076 - protein, 978 aa, synthetic construct
  REGION 1..978: note = engineered CasX variant
QEIKRINGIRRRLVKDSNTKKAGKTGPMKTLLVRVMTPDLRERLENLRKKPENIPQPISNTSRANLNKLLTDYTEMKKAILHVYWEEFQKDPVGLMSRVAQPASKKIDQNKLKPEMDEKGNLTTAGFACSQCGQPLFVYKLEQVSEKGKAYTNYFGRCNVAEHEKLILLAQLKPEKDSDEAVTYSLGKFGQRALDFYSIHVTKESTHPVKPLAQIAGNRYASSPVGKALSDACMGTIASFLSKYQDIIIEHQKVVKGNQKRLESLRELAGKENLEYPSVTLPPQPHTKEGVDAYNEVIARVRMWVNLNLWQKLKLSRDDAKPLLRLKGFPSFPLVERQANEVDWWDMVCNVKKLINEKKEDGKVFWQNLAGYKRQEALRPYLSSEEDRQKGKKFARYQLGDLLLHLEKKHGEDWGKVYDEAWERIDKKVEGLSKHIKLEEERRSEDAQSKAALTDWLRAKASFVIEGLKEADKDEFCRCELKLQKWYGDLRGKPFAIEAENSILDISGFSKQYNCAFIWQKDGVKKLNLYLIINYFKGGKLRFKKIKPEAFEANRFYTVINKKSGEIVPMEVNFNFDDPNLIILPLAFGKRQGREFIWNDLLSLETGSLKLANGRVIEKTLYNRRTRQDEPALFVALTFERREVLDSSNIKPMNLIGVDRGENIPAVIALTDPEGCPLSRFKDSLGNPTHILRIGESYKEKQRTIQAKKEVEQRRAGGYSRKYASKAKNLADDMVRNTARDLLYYAVTQDAMLIFENLSRGFGRQGKRTFMAERQYTRMEDWLTAKLAYEGLPSKTYLSKTLAQYTSKTCSNCGFTITSADYDRVLEKLKKTATGWMTTINGKELKVEGQITYYNRYKRQNVVKDLSVELDRLSEESVNNDISSWTKGRSGEALSLLKKRFSHRPVQEKFVCLNCGFETHADEQAALNIARSWLFLRSQEYKKYQTNKTTGNTDKRAFVETWQSFYRKKLKEVWKPAV

SEQ ID NO: 42077 - protein, 978 aa, synthetic construct
  REGION 1..978: note = engineered CasX variant
QEIKRINGIRRRLVKDSNTKKAGKTGPMKTLLVRVMTPDLRERLENLRKKPENIPQPISNTSRANLNKLLTDYTEMKKAILHVYWEEFQKDPVGLMSRVAQPASKKIDQNKLKPEMDEKGNLTTAGFACSQCGQPLFVYKLEQVSEKGKAYTNYFGRCNVAEHEKLILLAQLKPEKDSDEAVTYSLGKFGQRALDFYSIHVTKESTHPVKPLAQIAGNRYASTPVGKALSDACMGTIASFLSKYQDIIIEHQKVVKGNQKRLESLRELAGKENLEYPSVTLPPQPHTKEGVDAYNEVIARVRMWVNLNLWQKLKLSRDDAKPLLRLKGFPSFPLVERQANEVDWWDMVCNVKKLINEKKEDGKVFWQNLAGYKRQEALRPYLSSEEDRQKGKKFARYQLGDLLLHLEKKHGEDWGKVYDEAWERIDKKVEGLSKHIKLEEERRSEDAQSKAALTDWLRAKASFVIEGLKEADKDEFCRCELKLQKWYGDLRGKPFAIEAENSILDISGFSKQYNCAFIWQKDGVKKLNLYLIINYFKGGKLRFKKIKPEAFEANRFYTVINKKSGEIVPMEVNFNFDDPNLIILPLAFGKRQGREFIWNDLLSLETGSLKLANGRVIEKTLYNRRTRQDEPALFVALTFERREVLDSSNIKPMNLIGVDRGENIPAVIALTDPEGCPLSRFKDSLGNPTHILRIGESYKEKQRTIQAKKEVEQRRAGGYSRKYASKAKNLADDMVRNTARDLLYYAVTQDAMLIFENLSRGFGRQGKRTFMAERQYTRMEDWLTAKLAYEGLPSKTYLSKTLAQYTSKTCSNCGFTITSADYDRVLEKLKKTATGWMTTINGKELKVEGQITYYNRYKRQNVVKDLSVELDRLSEESVNNDISSWTKGRSGEALSLLKKRFSHRPVQEKFVCLNCGFETHADEQAALNIARSWLFLRSQEYKKYQTNKTTGNTDKRAFVETWQSFYRKKLKEVWKPAV

SEQ ID NO: 42078 - protein, 978 aa, synthetic construct
  REGION 1..978: note = engineered CasX variant
QEIKRINGIRRRLVKDSNTKKAGKTGPMKTLLVRVMTPDLRERLENLRKKPENIPQPISNTSRANLNKLLTDYTEMKKAILHVYWEEFQKDPVGLMSRVAQPASKKIDQNKLKPEMDEKGNLTTAGFACSQCGQPLFVYKLEQVSEKGKAYTNYFGRCNVAEHEKLILLAQLKPEKDSDEAVTYSLGKFGQRALDFYSIHVTKESTHPVKPLAQIAGNRYASAPVGKALSDACMGTIASFLSKYQDIIIEHQKVVKGNQKRLESLRELAGKENLEYPSVTLPPQPHTKEGVDAYNEVIARVRMWVNLNLWQKLKLSRDDAKPLLRLKGFPSFPLVERQANEVDWWDMVCNVKKLINEKKEDGKVFWQNLAGYKRQEALRPYLSSEEDRQKGKKFARYQLGDLLLHLEKKHGEDWGKVYDEAWERIDKKVEGLSKHIKLEEERRSEDAQSKAALTDWLRAKASFVIEGLKEADKDEFCRCELKLQKWYGDLRGKPFAIEAENSILDISGFSKQYNCAFIWQKDGVKKLNLYLIINYFKGGKLRFKKIKPEAFEANRFYTVINKKSGEIVPMEVNFNFDDPNLIILPLAFGKRQGREFIWNDLLSLETGSLKLANGRVIEKTLYNRRTRQDEPALFVALTFERREVLDSSNIKPMNLIGVDRGENIPAVIALTDPEGCPLSRFKDSLGNPTHILRIGESYKEKQRTIQAKKEVEQRRAGGYSRKYASKAKNLADDMVRNTARDLLYYAVTQDAMLIFENLSRGFGRQGKRTFMAERQYTRMEDWLTAKLAYEGLPSKTYLSKTLAQYTSKTCSNCGFTITSADYDRVLEKLKKTATGWMTTINGKELKVEGQITYYNRYKRQNVVKDLSVELDRLSEESVNNDISSWTKGRSGEALSLLKKRFSHRPVQEKFVCLNCGFETHADEQAALNIARSWLFLRSQEYKKYQTNKTTGNTDKRAFVETWQSFYRKKLKEVWKPAV

SEQ ID NO: 42079 - protein, 978 aa, synthetic construct
  REGION 1..978: note = engineered CasX variant
QEIKRINGIRRRLVKDSNTKKAGKTGPMKTLLVRVMTPDLRERLENLRKKPENIPQPISNTSRANLNKLLTDYTEMKKAILHVYWEEFQKDPVGLMSRVAQPASKKIDQNKLKPEMDEKGNLTTAGFACSQCGQPLFVYKLEQVSEKGKAYTNYFGRCNVAEHEKLILLAQLKPEKDSDEAVTYSLGKFGQRALDFYSIHVTKESTHPVKPLAQIAGNRYASVPVGKALSDACMGTIASFLSKYQDIIIEHQKVVKGNQKRLESLRELAGKENLEYPSVTLPPQPHTKEGVDAYNEVIARVRMWVNLNLWQKLKLSRDDAKPLLRLKGFPSFPLVERQANEVDWWDMVCNVKKLINEKKEDGKVFWQNLAGYKRQEALRPYLSSEEDRQKGKKFARYQLGDLLLHLEKKHGEDWGKVYDEAWERIDKKVEGLSKHIKLEEERRSEDAQSKAALTDWLRAKASFVIEGLKEADKDEFCRCELKLQKWYGDLRGKPFAIEAENSILDISGFSKQYNCAFIWQKDGVKKLNLYLIINYFKGGKLRFKKIKPEAFEANRFYTVINKKSGEIVPMEVNFNFDDPNLIILPLAFGKRQGREFIWNDLLSLETGSLKLANGRVIEKTLYNRRTRQDEPALFVALTFERREVLDSSNIKPMNLIGVDRGENIPAVIALTDPEGCPLSRFKDSLGNPTHILRIGESYKEKQRTIQAKKEVEQRRAGGYSRKYASKAKNLADDMVRNTARDLLYYAVTQDAMLIFENLSRGFGRQGKRTFMAERQYTRMEDWLTAKLAYEGLPSKTYLSKTLAQYTSKTCSNCGFTITSADYDRVLEKLKKTATGWMTTINGKELKVEGQITYYNRYKRQNVVKDLSVELDRLSEESVNNDISSWTKGRSGEALSLLKKRFSHRPVQEKFVCLNCGFETHADEQAALNIARSWLFLRSQEYKKYQTNKTTGNTDKRAFVETWQSFYRKKLKEVWKPAV

SEQ ID NO: 42080 - protein, 978 aa, synthetic construct
  REGION 1..978: note = engineered CasX variant
QEIKRINGIRRRLVKDSNTKKAGKTGPMKTLLVRVMTPDLRERLENLRKKPENIPQPISNTSRANLNKLLTDYTEMKKAILHVYWEEFQKDPVGLMSRVAQPASKKIDQNKLKPEMDEKGNLTTAGFACSQCGQPLFVYKLEQVSEKGKAYTNYFGRCNVAEHEKLIKLAQLKPEKDSDEAVTYSLGKFGQRALDFYSIHVTKESTHPVKPLAQIAGNRYASGPVGKALSDACMGTIASFLSKYQDIIIEHQKVVKGNQKRLESLRELAGKENLEYPSVTLPPQPHTKEGVDAYNEVIARVRMWVNLNLWQKLKLSRDDAKPLLRLKGFPSFPLVERQANEVDWWDMVCNVKKLINEKKEDGKVFWQNLAGYKRQEALRPYLSSEEDRQKGKKFARYQLGDLLLHLEKKHGEDWGKVYDEAWERIDKKVEGLSKHIKLEEERRSEDAQSKAALTDWLRAKASFVIEGLKEADKDEFCRCELKLQKWYGDLRGKPFAIEAENSILDISGFSKQYNCAFIWQKDGVKKLNLYLIINYFKGGKLRFKKIKPEAFEANRFYTVINKKSGEIVPMEVNFNFDDPNLIILPLAFGKRQGREFIWNDLLSLETGSLKLANGRVIEKTLYNRRTRQDEPALFVALTFERREVLDSSNIKPMNLIGVDRGENIPAVIALTDPEGCPLSRFKDSLGNPTHILRIGESYKEKQRTIQAKKEVEQRRAGGYSRKYASKAKNLADDMVRNTARDLLYYAVTQDAMLIFENLSRGFGRQGKRTFMAERQYTRMEDWLTAKLAYEGLPSKTYLSKTLAQYTSKTCSNCGFTITSADYDRVLEKLKKTATGWMTTINGKELKVEGQITYYNRYKRQNVVKDLSVELDRLSEESVNNDISSWTKGRSGEALSLLKKRFSHRPVQEKFVCLNCGFETHADEQAALNIARSWLFLRSQEYKKYQTNKTTGNTDKRAFVETWQSFYRKKLKEVWKPAV

SEQ ID NO: 42081 - protein, 977 aa, synthetic construct
  REGION 1..977: note = engineered CasX variant
QEIKRINGIRRRLVKDSNTKKAGKTGPMKTLLVRVMTPDLRERLENLRKKPENIPQPISNTSRANLNKLLTDYTEMKKAILHVYWEEFQKDPVGLMSRVAQPASKKIDQNKLKPEMDEKGNLTTAGFACSQCGQPLFVYKLEQVSEKGKAYTNYFGRCNVAEHEKLILLAQLKPEKDSDEAVTYSLGKFGQRALDFYSIHVTKESTHPVKPLAQIAGNRYASPVGKALSDACMGTIASFLSKYQDIIIEHQKVVKGNQKRLESLRELAGKENLEYPSVTLPPQPHTKEGVDAYNEVIARVRMWVNLNLWQKLKLSRDDAKPLLRLKGFPSFPLVERQANEVDWWDMVCNVKKLINEKKEDGKVFWQNLAGYKRQEALRPYLSSEEDRQKGKKFARYQLGDLLLHLEKKHGEDWGKVYDEAWERIDKKVEGLSKHIKLEEERRSEDAQSKAALTDWLRAKASFVIEGLKEADKDEFCRCELKLQKWYGDLRGKPFAIEAENSILDISGFSKQYNCAFIWQKDGVKKLNLYLIINYFKGGKLRFKKIKPEAFEANRFYTVINKKSGEIVPMEVNFNFDDPNLIILPLAFGKRQGREFIWNDLLSLETGSLKLANGRVIEKTLYNRRTRQDEPALFVALTFERREVLDSSNIKPMNLIGVDRGENIPAVIALTDPEGCPLSRFKDSLGNPTHILRIGESYKEKQRTIQAKKEVEQRRAGGYSRKYASKAKNLADDMVRNTARDLLYYAVTQDAMLIFENLSRGFGRQGKRTFMAERQYTRMEDWLTAKLAYEGLPSKTYLSKTLAQYTSKTCSNCGFTITSADYDRVLEKLKKTATGWMTTINGKELKVEGQITYYNRYKRQNVVKDLSVELDRLSEESVNNDISSWTKGRSGEALSLLKKRFSHRPVQEKFVCLNCGFETHADEQAALNIARSWLFLRSQEYKKYQTNKTTGNTDKRAFVETWQSFYRKKLKEVWKPAV

SEQ ID NO: 42082 - protein, 978 aa, synthetic construct
  REGION 1..978: note = engineered CasX variant
QEIKRINGIRRRLVKDSNTKKAGKTGPMKTLLVRVMTPDLRERLENLRKKPENIPQPISNTSRANLNKLLTDYTEMKKAILHVYWEEFQKDPVGLMSRVAQPASKKIDQNKLKPEMDEKGNLTTAGFACSQCGQPLFVYKLEQVSEKGKAYTNYFGRCNVAEHEKLILLAQLKPEKDSDEAVTYSLGKFGQRALDFYSIHVTKESTHPVKPLAQIAGNRYASYPVGKALSDACMGTIASFLSKYQDIIIEHQKVVKGNQKRLESLRELAGKENLEYPSVTLPPQPHTKEGVDAYNEVIARVRMWVNLNLWQKLKLSRDDAKPLLRLKGFPSFPLVERQANEVDWWDMVCNVKKLINEKKEDGKVFWQNLAGYKRQEALRPYLSSEEDRKKGKKFARYQLGDLLLHLEKKHGEDWGKVYDEAWERIDKKVEGLSKHIKLEEERRSEDAQSKAALTDWLRAKASFVIEGLKEADKDEFCRCELKLQKWYGDLRGKPFAIEAENSILDISGFSKQYNCAFIWQKDGVKKLNLYLIINYFKGGKLRFKKIKPEAFEANRFYTVINKKSGEIVPMEVNFNFDDPNLIILPLAFGKRQGREFIWNDLLSLETGSLKLANGRVIEKTLYNRRTRQDEPALFVALTFERREVLDSSNIKPMNLIGVDRGENIPAVIALTDPEGCPLSRFKDSLGNPTHILRIGESYKEKQRTIQAKKEVEQRRAGGYSRKYASKAKNLADDMVRNTARDLLYYAVTQDAMLIFENLSRGFGRQGKRTFMAERQYTRMEDWLTAKLAYEGLPSQTYLSKTLAQYTSKTCSNCGFTITSADYDRVLEKLKKTATGWMTTINGKELKVEGQITYYNRYKRQNVVKDLSVELDRLSEESVNNDISSWTKGRSGEALSLLKKRFSHRPVQEKFVCLNCGFETHADEQAALNIARSWLFLRSQEYKKYQTNKTTGNTDKRAFVETWQSFYRKKLKEVWKPAV

SEQ ID NO: 42083 - protein, 978 aa, synthetic construct
  REGION 1..978: note = engineered CasX variant
QEIKRINGIRRRLVKDSNTKKAGKTGPMKTLLVRVMTPDLRERLENLRKKPENIPQPISNTSRANLNKLLTDYTEMKKAILHVYWEEFQKDPVGLMSRVAQPASKKIDQNKLKPEMDEKGNLTTAGFACSQCGQPLFVYKLEQVSEKGKAYTNYFGRCNVAEHEKLILLAQLKPEKDSDEAVTYSLGKFGQRALDFYSIHVTKESTHPVKPLAQIAGNRYASHPVGKALSDACMGTIASFLSKYQDIIIEHQKVVKGNQKRLESLRELAGKENLEYPSVTLPPQPHTKEGVDAYNEVIARVRMWVNLNLWQKLKLSRDDAKPLLRLKGFPSFPLVERQANEVDWWDMVCNVKKLINEKKEDGKVFWQNLAGYKRQEALRPYLSSEEDRKKGKKFARYQLGDLLLHLEKKHGEDWGKVYDEAWERIDKKVEGLSKHIKLEEERRSEDAQSKAALTDWLRAKASFVIEGLKEADKDEFCRCELKLQKWYGDLRGKPFAIEAENSILDISGFSKQYNCAFIWQKDGVKKLNLYLIINYFKGGKLRFKKIKPEAFEANRFYTVINKKSGEIVPMEVNFNFDDPNLIILPLAFGKRQGREFIWNDLLSLETGSLKLANGRVIEKTLYNRRTRQDEPALFVALTFERREVLDSSNIKPMNLIGVDRGENIPAVIALTDPEGCPLSRFKDSLGNPTHILRIGESYKEKQRTIQAKKEVEQRRAGGYSRKYASKAKNLADDMVRNTARDLLYYAVTQDAMLIFENLSRGFGRQGKRTFMAERQYTRMEDWLTAKLAYEGLPSQTYLSKTLAQYTSKTCSNCGFTITSADYDRVLEKLKKTATGWMTTINGKELKVEGQITYYNRYKRQNVVKDLSVELDRLSEESVNNDISSWTKGRSGEALSLLKKRFSHRPVQEKFVCLNCGFETHADEQAALNIARSWLFLRSQEYKKYQTNKTTGNTDKRAFVETWQSFYRKKLKEVWKPAV

SEQ ID NO: 42084 - protein, 978 aa, synthetic construct
  REGION 1..978: note = engineered CasX variant
QEIKRINGIRRRLVKDSNTKKAGKTGPMKTLLVRVMTPDLRERLENLRKKPENIPQPISNTSRANLNKLLTDYTEMKKAILHVYWEEFQKDPVGLMSRVAQPASKKIDQNKLKPEMDEKGNLTTAGFACSQCGQPLFVYKLEQVSEKGKAYTNYFGRCNVAEHEKLILLAQLKPEKDSDEAVTYSLGKFGQRALDFYSIHVTKESTHPVKPLAQIAGNRYASSPVGKALSDACMGTIASFLSKYQDIIIEHQKVVKGNQKRLESLRELAGKENLEYPSVTLPPQPHTKEGVDAYNEVIARVRMWVNLNLWQKLKLSRDDAKPLLRLKGFPSFPLVERQANEVDWWDMVCNVKKLINEKKEDGKVFWQNLAGYKRQEALRPYLSSEEDRKKGKKFARYQLGDLLLHLEKKHGEDWGKVYDEAWERIDKKVEGLSKHIKLEEERRSEDAQSKAALTDWLRAKASFVIEGLKEADKDEFCRCELKLQKWYGDLRGKPFAIEAENSILDISGFSKQYNCAFIWQKDGVKKLNLYLIINYFKGGKLRFKKIKPEAFEANRFYTVINKKSGEIVPMEVNFNFDDPNLIILPLAFGKRQGREFIWNDLLSLETGSLKLANGRVIEKTLYNRRTRQDEPALFVALTFERREVLDSSNIKPMNLIGVDRGENIPAVIALTDPEGCPLSRFKDSLGNPTHILRIGESYKEKQRTIQAKKEVEQRRAGGYSRKYASKAKNLADDMVRNTARDLLYYAVTQDAMLIFENLSRGFGRQGKRTFMAERQYTRMEDWLTAKLAYEGLPSQTYLSKTLAQYTSKTCSNCGFTITSADYDRVLEKLKKTATGWMTTINGKELKVEGQITYYNRYKRQNVVKDLSVELDRLSEESVNNDISSWTKGRSGEALSLLKKRFSHRPVQEKFVCLNCGFETHADEQAALNIARSWLFLRSQEYKKYQTNKTTGNTDKRAFVETWQSFYRKKLKEVWKPAV

SEQ ID NO: 42085 - protein, 978 aa, synthetic construct
  REGION 1..978: note = engineered CasX variant
QEIKRINGIRRRLVKDSNTKKAGKTGPMKTLLVRVMTPDLRERLENLRKKPENIPQPISNTSRANLNKLLTDYTEMKKAILHVYWEEFQKDPVGLMSRVAQPASKKIDQNKLKPEMDEKGNLTTAGFACSQCGQPLFVYKLEQVSEKGKAYTNYFGRCNVAEHEKLILLAQLKPEKDSDEAVTYSLGKFGQRALDFYSIHVTKESTHPVKPLAQIAGNRYASTPVGKALSDACMGTIASFLSKYQDIIIEHQKVVKGNQKRLESLRELAGKENLEYPSVTLPPQPHTKEGVDAYNEVIARVRMWVNLNLWQKLKLSRDDAKPLLRLKGFPSFPLVERQANEVDWWDMVCNVKKLINEKKEDGKVFWQNLAGYKRQEALRPYLSSEEDRKKGKKFARYQLGDLLLHLEKKHGEDWGKVYDEAWERIDKKVEGLSKHIKLEEERRSEDAQSKAALTDWLRAKASFVIEGLKEADKDEFCRCELKLQKWYGDLRGKPFAIEAENSILDISGFSKQYNCAFIWQKDGVKKLNLYLIINYFKGGKLRFKKIKPEAFEANRFYTVINKKSGEIVPMEVNFNFDDPNLIILPLAFGKRQGREFIWNDLLSLETGSLKLANGRVIEKTLYNRRTRQDEPALFVALTFERREVLDSSNIKPMNLIGVDRGENIPAVIALTDPEGCPLSRFKDSLGNPTHILRIGESYKEKQRTIQAKKEVEQRRAGGYSRKYASKAKNLADDMVRNTARDLLYYAVTQDAMLIFENLSRGFGRQGKRTFMAERQYTRMEDWLTAKLAYEGLPSQTYLSKTLAQYTSKTCSNCGFTITSADYDRVLEKLKKTATGWMTTINGKELKVEGQITYYNRYKRQNVVKDLSVELDRLSEESVNNDISSWTKGRSGEALSLLKKRFSHRPVQEKFVCLNCGFETHADEQAALNIARSWLFLRSQEYKKYQTNKTTGNTDKRAFVETWQSFYRKKLKEVWKPAV

SEQ ID NO: 42086 - protein, 978 aa, synthetic construct
  REGION 1..978: note = engineered CasX variant
QEIKRINGIRRRLVKDSNTKKAGKTGPMKTLLVRVMTPDLRERLENLRKKPENIPQPISNTSRANLNKLLTDYTEMKKAILHVYWEEFQKDPVGLMSRVAQPASKKIDQNKLKPEMDEKGNLTTAGFACSQCGQPLFVYKLEQVSEKGKAYTNYFGRCNVAEHEKLILLAQLKPEKDSDEAVTYSLGKFGQRALDFYSIHVTKESTHPVKPLAQIAGNRYASAPVGKALSDACMGTIASFLSKYQDIIIEHQKVVKGNQKRLESLRELAGKENLEYPSVTLPPQPHTKEGVDAYNEVIARVRMWVNLNLWQKLKLSRDDAKPLLRLKGFPSFPLVERQANEVDWWDMVCNVKKLINEKKEDGKVFWQNLAGYKRQEALRPYLSSEEDRKKGKKFARYQLGDLLLHLEKKHGEDWGKVYDEAWERIDKKVEGLSKHIKLEEERRSEDAQSKAALTDWLRAKASFVIEGLKEADKDEFCRCELKLQKWYGDLRGKPFAIEAENSILDISGFSKQYNCAFIWQKDGVKKLNLYLIINYFKGGKLRFKKIKPEAFEANRFYTVINKKSGEIVPMEVNFNFDDPNLIILPLAFGKRQGREFIWNDLLSLETGSLKLANGRVIEKTLYNRRTRQDEPALFVALTFERREVLDSSNIKPMNLIGVDRGENIPAVIALTDPEGCPLSRFKDSLGNPTHILRIGESYKEKQRTIQAKKEVEQRRAGGYSRKYASKAKNLADDMVRNTARDLLYYAVTQDAMLIFENLSRGFGRQGKRTFMAERQYTRMEDWLTAKLAYEGLPSQTYLSKTLAQYTSKTCSNCGFTITSADYDRVLEKLKKTATGWMTTINGKELKVEGQITYYNRYKRQNVVKDLSVELDRLSEESVNNDISSWTKGRSGEALSLLKKRFSHRPVQEKFVCLNCGFETHADEQAALNIARSWLFLRSQEYKKYQTNKTTGNTDKRAFVETWQSFYRKKLKEVWKPAV

SEQ ID NO: 42087 - protein, 978 aa, synthetic construct
  REGION 1..978: note = engineered CasX variant
QEIKRINGIRRRLVKDSNTKKAGKTGPMKTLLVRVMTPDLRERLENLRKKPENIPQPISNTSRANLNKLLTDYTEMKKAILHVYWEEFQKDPVGLMSRVAQPASKKIDQNKLKPEMDEKGNLTTAGFACSQCGQPLFVYKLEQVSEKGKAYTNYFGRCNVAEHEKLILLAQLKPEKDSDEAVTYSLGKFGQRALDFYSIHVTKESTHPVKPLAQIAGNRYASVPVGKALSDACMGTIASFLSKYQDIIIEHQKVVKGNQKRLESLRELAGKENLEYPSVTLPPQPHTKEGVDAYNEVIARVRMWVNLNLWQKLKLSRDDAKPLLRLKGFPSFPLVERQANEVDWWDMVCNVKKLINEKKEDGKVFWQNLAGYKRQEALRPYLSSEEDRKKGKKFARYQLGDLLLHLEKKHGEDWGKVYDEAWERIDKKVEGLSKHIKLEEERRSEDAQSKAALTDWLRAKASFVIEGLKEADKDEFCRCELKLQKWYGDLRGKPFAIEAENSILDISGFSKQYNCAFIWQKDGVKKLNLYLIINYFKGGKLRFKKIKPEAFEANRFYTVINKKSGEIVPMEVNFNFDDPNLIILPLAFGKRQGREFIWNDLLSLETGSLKLANGRVIEKTLYNRRTRQDEPALFVALTFERREVLDSSNIKPMNLIGVDRGENIPAVIALTDPEGCPLSRFKDSLGNPTHILRIGESYKEKQRTIQAKKEVEQRRAGGYSRKYASKAKNLADDMVRNTARDLLYYAVTQDAMLIFENLSRGFGRQGKRTFMAERQYTRMEDWLTAKLAYEGLPSQTYLSKTLAQYTSKTCSNCGFTITSADYDRVLEKLKKTATGWMTTINGKELKVEGQITYYNRYKRQNVVKDLSVELDRLSEESVNNDISSWTKGRSGEALSLLKKRFSHRPVQEKFVCLNCGFETHADEQAALNIARSWLFLRSQEYKKYQTNKTTGNTDKRAFVETWQSFYRKKLKEVWKPAV

SEQ ID NO: 42088 - protein, 978 aa, synthetic construct
  REGION 1..978: note = engineered CasX variant
QEIKRINGIRRRLVKDSNTKKAGKTGPMKTLLVRVMTPDLRERLENLRKKPENIPQPISNTSRANLNKLLTDYTEMKKAILHVYWEEFQKDPVGLMSRVAQPASKKIDQNKLKPEMDEKGNLTTAGFACSQCGQPLFVYKLEQVSEKGKAYTNYFGRCNVAEHEKLIKLAQLKPEKDSDEAVTYSLGKFGQRALDFYSIHVTKESTHPVKPLAQIAGNRYASGPVGKALSDACMGTIASFLSKYQDIIIEHQKVVKGNQKRLESLRELAGKENLEYPSVTLPPQPHTKEGVDAYNEVIARVRMWVNLNLWQKLKLSRDDAKPLLRLKGFPSFPLVERQANEVDWWDMVCNVKKLINEKKEDGKVFWQNLAGYKRQEALRPYLSSEEDRKKGKKFARYQLGDLLLHLEKKHGEDWGKVYDEAWERIDKKVEGLSKHIKLEEERRSEDAQSKAALTDWLRAKASFVIEGLKEADKDEFCRCELKLQKWYGDLRGKPFAIEAENSILDISGFSKQYNCAFIWQKDGVKKLNLYLIINYFKGGKLRFKKIKPEAFEANRFYTVINKKSGEIVPMEVNFNFDDPNLIILPLAFGKRQGREFIWNDLLSLETGSLKLANGRVIEKTLYNRRTRQDEPALFVALTFERREVLDSSNIKPMNLIGVDRGENIPAVIALTDPEGCPLSRFKDSLGNPTHILRIGESYKEKQRTIQAKKEVEQRRAGGYSRKYASKAKNLADDMVRNTARDLLYYAVTQDAMLIFENLSRGFGRQGKRTFMAERQYTRMEDWLTAKLAYEGLPSQTYLSKTLAQYTSKTCSNCGFTITSADYDRVLEKLKKTATGWMTTINGKELKVEGQITYYNRYKRQNVVKDLSVELDRLSEESVNNDISSWTKGRSGEALSLLKKRFSHRPVQEKFVCLNCGFETHADEQAALNIARSWLFLRSQEYKKYQTNKTTGNTDKRAFVETWQSFYRKKLKEVWKPAV

SEQ ID NO: 42089 - protein, 977 aa, synthetic construct
  REGION 1..977: note = engineered CasX variant
QEIKRINGIRRRLVKDSNTKKAGKTGPMKTLLVRVMTPDLRERLENLRKKPENIPQPISNTSRANLNKLLTDYTEMKKAILHVYWEEFQKDPVGLMSRVAQPASKKIDQNKLKPEMDEKGNLTTAGFACSQCGQPLFVYKLEQVSEKGKAYTNYFGRCNVAEHEKLILLAQLKPEKDSDEAVTYSLGKFGQRALDFYSIHVTKESTHPVKPLAQIAGNRYASPVGKALSDACMGTIASFLSKYQDIIIEHQKVVKGNQKRLESLRELAGKENLEYPSVTLPPQPHTKEGVDAYNEVIARVRMWVNLNLWQKLKLSRDDAKPLLRLKGFPSFPLVERQANEVDWWDMVCNVKKLINEKKEDGKVFWQNLAGYKRQEALRPYLSSEEDRKKGKKFARYQLGDLLLHLEKKHGEDWGKVYDEAWERIDKKVEGLSKHIKLEEERRSEDAQSKAALTDWLRAKASFVIEGLKEADKDEFCRCELKLQKWYGDLRGKPFAIEAENSILDISGFSKQYNCAFIWQKDGVKKLNLYLIINYFKGGKLRFKKIKPEAFEANRFYTVINKKSGEIVPMEVNFNFDDPNLIILPLAFGKRQGREFIWNDLLSLETGSLKLANGRVIEKTLYNRRTRQDEPALFVALTFERREVLDSSNIKPMNLIGVDRGENIPAVIALTDPEGCPLSRFKDSLGNPTHILRIGESYKEKQRTIQAKKEVEQRRAGGYSRKYASKAKNLADDMVRNTARDLLYYAVTQDAMLIFENLSRGFGRQGKRTFMAERQYTRMEDWLTAKLAYEGLPSQTYLSKTLAQYTSKTCSNCGFTITSADYDRVLEKLKKTATGWMTTINGKELKVEGQITYYNRYKRQNVVKDLSVELDRLSEESVNNDISSWTKGRSGEALSLLKKRFSHRPVQEKFVCLNCGFETHADEQAALNIARSWLFLRSQEYKKYQTNKTTGNTDKRAFVETWQSFYRKKLKEVWKPAV

SEQ ID NO: 42090 - protein, 978 aa, synthetic construct
  REGION 1..978: note = engineered CasX variant
QEIKRINGIRRRLVKDSNTKKAGKTGPMKTLLVRVMTPDLRERLENLRKKPENIPQPISNTSRANLNKLLTDYTEMKKAILHVYWEEFQKDPVGLMSRVAQPASKKIDQNKLKPEMDEKGNLTTAGFACSQCGQPLFVYKLEQVSEKGKAYTNYFGRCNVAEHEKLILLAQLKPEKDSDEAVTYSLGKFGQRALDFYSIHVTKESTHPVKPLAQIAGNRYASYPVGKALSDACMGTIASFLSKYQDIIIEHQKVVKGNQKRLESLRELAGKENLEYPSVTLPPQPHTKEGVDAYNEVIARVRMWVNLNLWQKLKLSRDDAKPLLRLKGFPSFPLVERQANEVDWWDMVCNVKKLINEKKEDGKVFWQNLAGYKRQEALRPYLSSEEDRKKGKKFARYQLGDLLLHLEKKHGEDWGKVYDEAWERIDKKVEGLSKHIKLEEERRSEDAQSKAALTDWLRAKASFVIEGLKEADKDEFCRCELKLQKWYGDLRGKPFAIEAENSILDISGFSKQYNCAFIWQKDGVKKLNLYLIINYFKGGKLRFKKIKPEAFEANRFYTVINKKSGEIVPMEVNFNFDDPNLIILPLAFGKRQGREFIWNDLLSLETGSLKLANGRVIEKTLYNRRTRQDEPALFVALTFERREVLDSSNIKPMNLIGVDRGENIPAVIALTDPEGCPLSRFKDSLGNPTHILRIGESYKEKQRTIQAKKEVEQRRAGGYSRKYASKAKNLADDMVRNTARDLLYYAVTQDAMLIFENLSRGFGRQGKRTFMAERQYTRMEDWLTAKLAYNGLPSKTYLSKTLAQYTSKTCSNCGFTITSADYDRVLEKLKKTATGWMTTINGKELKVEGQITYYNRYKRQNVVKDLSVELDRLSEESVNNDISSWTKGRSGEALSLLKKRFSHRPVQEKFVCLNCGFETHADEQAALNIARSWLFLRSQEYKKYQTNKTTGNTDKRAFVETWQSFYRKKLKEVWKPAV

SEQ ID NO: 42091 - protein, 978 aa, synthetic construct
  REGION 1..978: note = engineered CasX variant
QEIKRINGIRRRLVKDSNTKKAGKTGPMKTLLVRVMTPDLRERLENLRKKPENIPQPISNTSRANLNKLLTDYTEMKKAILHVYWEEFQKDPVGLMSRVAQPASKKIDQNKLKPEMDEKGNLTTAGFACSQCGQPLFVYKLEQVSEKGKAYTNYFGRCNVAEHEKLILLAQLKPEKDSDEAVTYSLGKFGQRALDFYSIHVTKESTHPVKPLAQIAGNRYASHPVGKALSDACMGTIASFLSKYQDIIIEHQKVVKGNQKRLESLRELAGKENLEYPSVTLPPQPHTKEGVDAYNEVIARVRMWVNLNLWQKLKLSRDDAKPLLRLKGFPSFPLVERQANEVDWWDMVCNVKKLINEKKEDGKVFWQNLAGYKRQEALRPYLSSEEDRKKGKKFARYQLGDLLLHLEKKHGEDWGKVYDEAWERIDKKVEGLSKHIKLEEERRSEDAQSKAALTDWLRAKASFVIEGLKEADKDEFCRCELKLQKWYGDLRGKPFAIEAENSILDISGFSKQYNCAFIWQKDGVKKLNLYLIINYFKGGKLRFKKIKPEAFEANRFYTVINKKSGEIVPMEVNFNFDDPNLIILPLAFGKRQGREFIWNDLLSLETGSLKLANGRVIEKTLYNRRTRQDEPALFVALTFERREVLDSSNIKPMNLIGVDRGENIPAVIALTDPEGCPLSRFKDSLGNPTHILRIGESYKEKQRTIQAKKEVEQRRAGGYSRKYASKAKNLADDMVRNTARDLLYYAVTQDAMLIFENLSRGFGRQGKRTFMAERQYTRMEDWLTAKLAYNGLPSKTYLSKTLAQYTSKTCSNCGFTITSADYDRVLEKLKKTATGWMTTINGKELKVEGQITYYNRYKRQNVVKDLSVELDRLSEESVNNDISSWTKGRSGEALSLLKKRFSHRPVQEKFVCLNCGFETHADEQAALNIARSWLFLRSQEYKKYQTNKTTGNTDKRAFVETWQSFYRKKLKEVWKPAV

SEQ ID NO: 42092 - protein, 978 aa, synthetic construct
  REGION 1..978: note = engineered CasX variant
QEIKRINGIRRRLVKDSNTKKAGKTGPMKTLLVRVMTPDLRERLENLRKKPENIPQPISNTSRANLNKLLTDYTEMKKAILHVYWEEFQKDPVGLMSRVAQPASKKIDQNKLKPEMDEKGNLTTAGFACSQCGQPLFVYKLEQVSEKGKAYTNYFGRCNVAEHEKLILLAQLKPEKDSDEAVTYSLGKFGQRALDFYSIHVTKESTHPVKPLAQIAGNRYASSPVGKALSDACMGTIASFLSKYQDIIIEHQKVVKGNQKRLESLRELAGKENLEYPSVTLPPQPHTKEGVDAYNEVIARVRMWVNLNLWQKLKLSRDDAKPLLRLKGFPSFPLVERQANEVDWWDMVCNVKKLINEKKEDGKVFWQNLAGYKRQEALRPYLSSEEDRKKGKKFARYQLGDLLLHLEKKHGEDWGKVYDEAWERIDKKVEGLSKHIKLEEERRSEDAQSKAALTDWLRAKASFVIEGLKEADKDEFCRCELKLQKWYGDLRGKPFAIEAENSILDISGFSKQYNCAFIWQKDGVKKLNLYLIINYFKGGKLRFKKIKPEAFEANRFYTVINKKSGEIVPMEVNFNFDDPNLIILPLAFGKRQGREFIWNDLLSLETGSLKLANGRVIEKTLYNRRTRQDEPALFVALTFERREVLDSSNIKPMNLIGVDRGENIPAVIALTDPEGCPLSRFKDSLGNPTHILRIGESYKEKQRTIQAKKEVEQRRAGGYSRKYASKAKNLADDMVRNTARDLLYYAVTQDAMLIFENLSRGFGRQGKRTFMAERQYTRMEDWLTAKLAYNGLPSKTYLSKTLAQYTSKTCSNCGFTITSADYDRVLEKLKKTATGWMTTINGKELKVEGQITYYNRYKRQNVVKDLSVELDRLSEESVNNDISSWTKGRSGEALSLLKKRFSHRPVQEKFVCLNCGFETHADEQAALNIARSWLFLRSQEYKKYQTNKTTGNTDKRAFVETWQSFYRKKLKEVWKPAV

SEQ ID NO: 42093 - protein, 978 aa, synthetic construct
  REGION 1..978: note = engineered CasX variant
QEIKRINGIRRRLVKDSNTKKAGKTGPMKTLLVRVMTPDLRERLENLRKKPENIPQPISNTSRANLNKLLTDYTEMKKAILHVYWEEFQKDPVGLMSRVAQPASKKIDQNKLKPEMDEKGNLTTAGFACSQCGQPLFVYKLEQVSEKGKAYTNYFGRCNVAEHEKLILLAQLKPEKDSDEAVTYSLGKFGQRALDFYSIHVTKESTHPVKPLAQIAGNRYASTPVGKALSDACMGTIASFLSKYQDIIIEHQKVVKGNQKRLESLRELAGKENLEYPSVTLPPQPHTKEGVDAYNEVIARVRMWVNLNLWQKLKLSRDDAKPLLRLKGFPSFPLVERQANEVDWWDMVCNVKKLINEKKEDGKVFWQNLAGYKRQEALRPYLSSEEDRKKGKKFARYQLGDLLLHLEKKHGEDWGKVYDEAWERIDKKVEGLSKHIKLEEERRSEDAQSKAALTDWLRAKASFVIEGLKEADKDEFCRCELKLQKWYGDLRGKPFAIEAENSILDISGFSKQYNCAFIWQKDGVKKLNLYLIINYFKGGKLRFKKIKPEAFEANRFYTVINKKSGEIVPMEVNFNFDDPNLIILPLAFGKRQGREFIWNDLLSLETGSLKLANGRVIEKTLYNRRTRQDEPALFVALTFERREVLDSSNIKPMNLIGVDRGENIPAVIALTDPEGCPLSRFKDSLGNPTHILRIGESYKEKQRTIQAKKEVEQRRAGGYSRKYASKAKNLADDMVRNTARDLLYYAVTQDAMLIFENLSRGFGRQGKRTFMAERQYTRMEDWLTAKLAYNGLPSKTYLSKTLAQYTSKTCSNCGFTITSADYDRVLEKLKKTATGWMTTINGKELKVEGQITYYNRYKRQNVVKDLSVELDRLSEESVNNDISSWTKGRSGEALSLLKKRFSHRPVQEKFVCLNCGFETHADEQAALNIARSWLFLRSQEYKKYQTNKTTGNTDKRAFVETWQSFYRKKLKEVWKPAV

SEQ ID NO: 42094 - protein, 978 aa, synthetic construct
  REGION 1..978: note = engineered CasX variant
QEIKRINGIRRRLVKDSNTKKAGKTGPMKTLLVRVMTPDLRERLENLRKKPENIPQPISNTSRANLNKLLTDYTEMKKAILHVYWEEFQKDPVGLMSRVAQPASKKIDQNKLKPEMDEKGNLTTAGFACSQCGQPLFVYKLEQVSEKGKAYTNYFGRCNVAEHEKLILLAQLKPEKDSDEAVTYSLGKFGQRALDFYSIHVTKESTHPVKPLAQIAGNRYASAPVGKALSDACMGTIASFLSKYQDIIIEHQKVVKGNQKRLESLRELAGKENLEYPSVTLPPQPHTKEGVDAYNEVIARVRMWVNLNLWQKLKLSRDDAKPLLRLKGFPSFPLVERQANEVDWWDMVCNVKKLINEKKEDGKVFWQNLAGYKRQEALRPYLSSEEDRKKGKKFARYQLGDLLLHLEKKHGEDWGKVYDEAWERIDKKVEGLSKHIKLEEERRSEDAQSKAALTDWLRAKASFVIEGLKEADKDEFCRCELKLQKWYGDLRGKPFAIEAENSILDISGFSKQYNCAFIWQKDGVKKLNLYLIINYFKGGKLRFKKIKPEAFEANRFYTVINKKSGEIVPMEVNFNFDDPNLIILPLAFGKRQGREFIWNDLLSLETGSLKLANGRVIEKTLYNRRTRQDEPALFVALTFERREVLDSSNIKPMNLIGVDRGENIPAVIALTDPEGCPLSRFKDSLGNPTHILRIGESYKEKQRTIQAKKEVEQRRAGGYSRKYASKAKNLADDMVRNTARDLLYYAVTQDAMLIFENLSRGFGRQGKRTFMAERQYTRMEDWLTAKLAYNGLPSKTYLSKTLAQYTSKTCSNCGFTITSADYDRVLEKLKKTATGWMTTINGKELKVEGQITYYNRYKRQNVVKDLSVELDRLSEESVNNDISSWTKGRSGEALSLLKKRFSHRPVQEKFVCLNCGFETHADEQAALNIARSWLFLRSQEYKKYQTNKTTGNTDKRAFVETWQSFYRKKLKEVWKPAV

SEQ ID NO: 42095 - protein, 978 aa, synthetic construct
  REGION 1..978: note = engineered CasX variant
QEIKRINGIRRRLVKDSNTKKAGKTGPMKTLLVRVMTPDLRERLENLRKKPENIPQPISNTSRANLNKLLTDYTEMKKAILHVYWEEFQKDPVGLMSRVAQPASKKIDQNKLKPEMDEKGNLTTAGFACSQCGQPLFVYKLEQVSEKGKAYTNYFGRCNVAEHEKLILLAQLKPEKDSDEAVTYSLGKFGQRALDFYSIHVTKESTHPVKPLAQIAGNRYASVPVGKALSDACMGTIASFLSKYQDIIIEHQKVVKGNQKRLESLRELAGKENLEYPSVTLPPQPHTKEGVDAYNEVIARVRMWVNLNLWQKLKLSRDDAKPLLRLKGFPSFPLVERQANEVDWWDMVCNVKKLINEKKEDGKVFWQNLAGYKRQEALRPYLSSEEDRKKGKKFARYQLGDLLLHLEKKHGEDWGKVYDEAWERIDKKVEGLSKHIKLEEERRSEDAQSKAALTDWLRAKASFVIEGLKEADKDEFCRCELKLQKWYGDLRGKPFAIEAENSILDISGFSKQYNCAFIWQKDGVKKLNLYLIINYFKGGKLRFKKIKPEAFEANRFYTVINKKSGEIVPMEVNFNFDDPNLIILPLAFGKRQGREFIWNDLLSLETGSLKLANGRVIEKTLYNRRTRQDEPALFVALTFERREVLDSSNIKPMNLIGVDRGENIPAVIALTDPEGCPLSRFKDSLGNPTHILRIGESYKEKQRTIQAKKEVEQRRAGGYSRKYASKAKNLADDMVRNTARDLLYYAVTQDAMLIFENLSRGFGRQGKRTFMAERQYTRMEDWLTAKLAYNGLPSKTYLSKTLAQYTSKTCSNCGFTITSADYDRVLEKLKKTATGWMTTINGKELKVEGQITYYNRYKRQNVVKDLSVELDRLSEESVNNDISSWTKGRSGEALSLLKKRFSHRPVQEKFVCLNCGFETHADEQAALNIARSWLFLRSQEYKKYQTNKTTGNTDKRAFVETWQSFYRKKLKEVWKPAV

SEQ ID NO: 42096 - protein, 978 aa, synthetic construct
  REGION 1..978: note = engineered CasX variant
QEIKRINGIRRRLVKDSNTKKAGKTGPMKTLLVRVMTPDLRERLENLRKKPENIPQPISNTSRANLNKLLTDYTEMKKAILHVYWEEFQKDPVGLMSRVAQPASKKIDQNKLKPEMDEKGNLTTAGFACSQCGQPLFVYKLEQVSEKGKAYTNYFGRCNVAEHEKLIKLAQLKPEKDSDEAVTYSLGKFGQRALDFYSIHVTKESTHPVKPLAQIAGNRYASGPVGKALSDACMGTIASFLSKYQDIIIEHQKVVKGNQKRLESLRELAGKENLEYPSVTLPPQPHTKEGVDAYNEVIARVRMWVNLNLWQKLKLSRDDAKPLLRLKGFPSFPLVERQANEVDWWDMVCNVKKLINEKKEDGKVFWQNLAGYKRQEALRPYLSSEEDRKKGKKFARYQLGDLLLHLEKKHGEDWGKVYDEAWERIDKKVEGLSKHIKLEEERRSEDAQSKAALTDWLRAKASFVIEGLKEADKDEFCRCELKLQKWYGDLRGKPFAIEAENSILDISGFSKQYNCAFIWQKDGVKKLNLYLIINYFKGGKLRFKKIKPEAFEANRFYTVINKKSGEIVPMEVNFNFDDPNLIILPLAFGKRQGREFIWNDLLSLETGSLKLANGRVIEKTLYNRRTRQDEPALFVALTFERREVLDSSNIKPMNLIGVDRGENIPAVIALTDPEGCPLSRFKDSLGNPTHILRIGESYKEKQRTIQAKKEVEQRRAGGYSRKYASKAKNLADDMVRNTARDLLYYAVTQDAMLIFENLSRGFGRQGKRTFMAERQYTRMEDWLTAKLAYNGLPSKTYLSKTLAQYTSKTCSNCGFTITSADYDRVLEKLKKTATGWMTTINGKELKVEGQITYYNRYKRQNVVKDLSVELDRLSEESVNNDISSWTKGRSGEALSLLKKRFSHRPVQEKFVCLNCGFETHADEQAALNIARSWLFLRSQEYKKYQTNKTTGNTDKRAFVETWQSFYRKKLKEVWKPAV

SEQ ID NO: 42097 - protein, 977 aa, synthetic construct
  REGION 1..977: note = engineered CasX variant
QEIKRINGIRRRLVKDSNTKKAGKTGPMKTLLVRVMTPDLRERLENLRKKPENIPQPISNTSRANLNKLLTDYTEMKKAILHVYWEEFQKDPVGLMSRVAQPASKKIDQNKLKPEMDEKGNLTTAGFACSQCGQPLFVYKLEQVSEKGKAYTNYFGRCNVAEHEKLILLAQLKPEKDSDEAVTYSLGKFGQRALDFYSIHVTKESTHPVKPLAQIAGNRYASPVGKALSDACMGTIASFLSKYQDIIIEHQKVVKGNQKRLESLRELAGKENLEYPSVTLPPQPHTKEGVDAYNEVIARVRMWVNLNLWQKLKLSRDDAKPLLRLKGFPSFPLVERQANEVDWWDMVCNVKKLINEKKEDGKVFWQNLAGYKRQEALRPYLSSEEDRKKGKKFARYQLGDLLLHLEKKHGEDWGKVYDEAWERIDKKVEGLSKHIKLEEERRSEDAQSKAALTDWLRAKASFVIEGLKEADKDEFCRCELKLQKWYGDLRGKPFAIEAENSILDISGFSKQYNCAFIWQKDGVKKLNLYLIINYFKGGKLRFKKIKPEAFEANRFYTVINKKSGEIVPMEVNFNFDDPNLIILPLAFGKRQGREFIWNDLLSLETGSLKLANGRVIEKTLYNRRTRQDEPALFVALTFERREVLDSSNIKPMNLIGVDRGENIPAVIALTDPEGCPLSRFKDSLGNPTHILRIGESYKEKQRTIQAKKEVEQRRAGGYSRKYASKAKNLADDMVRNTARDLLYYAVTQDAMLIFENLSRGFGRQGKRTFMAERQYTRMEDWLTAKLAYNGLPSKTYLSKTLAQYTSKTCSNCGFTITSADYDRVLEKLKKTATGWMTTINGKELKVEGQITYYNRYKRQNVVKDLSVELDRLSEESVNNDISSWTKGRSGEALSLLKKRFSHRPVQEKFVCLNCGFETHADEQAALNIARSWLFLRSQEYKKYQTNKTTGNTDKRAFVETWQSFYRKKLKEVWKPAV

SEQ ID NO: 42098 - protein, 978 aa, synthetic construct
  REGION 1..978: note = engineered CasX variant
QEIKRINGIRRRLVKDSNTKKAGKTGPMKTLLVRVMTPDLRERLENLRKKPENIPQPISNTSRANLNKLLTDYTEMKKAILHVYWEEFQKDPVGLMSRVAQPASKKIDQNKLKPEMDEKGNLTTAGFACSQCGQPLFVYKLEQVSEKGKAYTNYFGRCNVAEHEKLIQLAQLKPEKDSDEAVTYSLGKFGQRALDFYSIHVTKESTHPVKPLAQIAGNRYASYPVGKALSDACMGTIASFLSKYQDIIIEHQKVVKGNQKRLESLRELAGKENLEYPSVTLPPQPHTKEGVDAYNEVIARVRMWVNLNLWQKLKLSRDDAKPLLRLKGFPSFPLVERQANEVDWWDMVCNVKKLINEKKEDGKVFWQNLAGYKRQEALRPYLSSEEDRKKGKKFARYQLGDLLLHLEKKHGEDWGKVYDEAWERIDKKVEGLSKHIKLEEERRSEDAQSKAALTDWLRAKASFVIEGLKEADKDEFCRCELKLQKWYGDLRGKPFAIEAENSILDISGFSKQYNCAFIWQKDGVKKLNLYLIINYFKGGKLRFKKIKPEAFEANRFYTVINKKSGEIVPMEVNFNFDDPNLIILPLAFGKRQGREFIWNDLLSLETGSLKLANGRVIEKTLYNRRTRQDEPALFVALTFERREVLDSSNIKPMNLIGVDRGENIPAVIALTDPEGCPLSRFKDSLGNPTHILRIGESYKEKQRTIQAKKEVEQRRAGGYSRKYASKAKNLADDMVRNTARDLLYYAVTQDAMLIFENLSRGFGRQGKRTFMAERQYTRMEDWLTAKLAYEGLPSKTYLSKTLAQYTSKTCSNCGFTITSADYDRVLEKLKKTATGWMTTINGKELKVEGQITYYNRYKRQNVVKDLSVELDRLSEESVNNDISSWTKGRSGEALSLLKKRFSHRPVQEKFVCLNCGFETHADEQAALNIARSWLFLRSQEYKKYQTNKTTGNTDKRAFVETWQSFYRKKLKEVWKPAV

SEQ ID NO: 42099 - protein, 978 aa, synthetic construct
  REGION 1..978: note = engineered CasX variant
QEIKRINGIRRRLVKDSNTKKAGKTGPMKTLLVRVMTPDLRERLENLRKKPENIPQPISNTSRANLNKLLTDYTEMKKAILHVYWEEFQKDPVGLMSRVAQPASKKIDQNKLKPEMDEKGNLTTAGFACSQCGQPLFVYKLEQVSEKGKAYTNYFGRCNVAEHEKLIQLAQLKPEKDSDEAVTYSLGKFGQRALDFYSIHVTKESTHPVKPLAQIAGNRYASHPVGKALSDACMGTIASFLSKYQDIIIEHQKVVKGNQKRLESLRELAGKENLEYPSVTLPPQPHTKEGVDAYNEVIARVRMWVNLNLWQKLKLSRDDAKPLLRLKGFPSFPLVERQANEVDWWDMVCNVKKLINEKKEDGKVFWQNLAGYKRQEALRPYLSSEEDRKKGKKFARYQLGDLLLHLEKKHGEDWGKVYDEAWERIDKKVEGLSKHIKLEEERRSEDAQSKAALTDWLRAKASFVIEGLKEADKDEFCRCELKLQKWYGDLRGKPFAIEAENSILDISGFSKQYNCAFIWQKDGVKKLNLYLIINYFKGGKLRFKKIKPEAFEANRFYTVINKKSGEIVPMEVNFNFDDPNLIILPLAFGKRQGREFIWNDLLSLETGSLKLANGRVIEKTLYNRRTRQDEPALFVALTFERREVLDSSNIKPMNLIGVDRGENIPAVIALTDPEGCPLSRFKDSLGNPTHILRIGESYKEKQRTIQAKKEVEQRRAGGYSRKYASKAKNLADDMVRNTARDLLYYAVTQDAMLIFENLSRGFGRQGKRTFMAERQYTRMEDWLTAKLAYEGLPSKTYLSKTLAQYTSKTCSNCGFTITSADYDRVLEKLKKTATGWMTTINGKELKVEGQITYYNRYKRQNVVKDLSVELDRLSEESVNNDISSWTKGRSGEALSLLKKRFSHRPVQEKFVCLNCGFETHADEQAALNIARSWLFLRSQEYKKYQTNKTTGNTDKRAFVETWQSFYRKKLKEVWKPAV

SEQ ID NO: 42100 - protein, 978 aa, synthetic construct
  REGION 1..978: note = engineered CasX variant
QEIKRINGIRRRLVKDSNTKKAGKTGPMKTLLVRVMTPDLRERLENLRKKPENIPQPISNTSRANLNKLLTDYTEMKKAILHVYWEEFQKDPVGLMSRVAQPASKKIDQNKLKPEMDEKGNLTTAGFACSQCGQPLFVYKLEQVSEKGKAYTNYFGRCNVAEHEKLIQLAQLKPEKDSDEAVTYSLGKFGQRALDFYSIHVTKESTHPVKPLAQIAGNRYASSPVGKALSDACMGTIASFLSKYQDIIIEHQKVVKGNQKRLESLRELAGKENLEYPSVTLPPQPHTKEGVDAYNEVIARVRMWVNLNLWQKLKLSRDDAKPLLRLKGFPSFPLVERQANEVDWWDMVCNVKKLINEKKEDGKVFWQNLAGYKRQEALRPYLSSEEDRKKGKKFARYQLGDLLLHLEKKHGEDWGKVYDEAWERIDKKVEGLSKHIKLEEERRSEDAQSKAALTDWLRAKASFVIEGLKEADKDEFCRCELKLQKWYGDLRGKPFAIEAENSILDISGFSKQYNCAFIWQKDGVKKLNLYLIINYFKGGKLRFKKIKPEAFEANRFYTVINKKSGEIVPMEVNFNFDDPNLIILPLAFGKRQGREFIWNDLLSLETGSLKLANGRVIEKTLYNRRTRQDEPALFVALTFERREVLDSSNIKPMNLIGVDRGENIPAVIALTDPEGCPLSRFKDSLGNPTHILRIGESYKEKQRTIQAKKEVEQRRAGGYSRKYASKAKNLADDMVRNTARDLLYYAVTQDAMLIFENLSRGFGRQGKRTFMAERQYTRMEDWLTAKLAYEGLPSKTYLSKTLAQYTSKTCSNCGFTITSADYDRVLEKLKKTATGWMTTINGKELKVEGQITYYNRYKRQNVVKDLSVELDRLSEESVNNDISSWTKGRSGEALSLLKKRFSHRPVQEKFVCLNCGFETHADEQAALNIARSWLFLRSQEYKKYQTNKTTGNTDKRAFVETWQSFYRKKLKEVWKPAV

SEQ ID NO: 42101 - protein, 978 aa, synthetic construct
  REGION 1..978: note = engineered CasX variant
QEIKRINGIRRRLVKDSNTKKAGKTGPMKTLLVRVMTPDLRERLENLRKKPENIPQPISNTSRANLNKLLTDYTEMKKAILHVYWEEFQKDPVGLMSRVAQPASKKIDQNKLKPEMDEKGNLTTAGFACSQCGQPLFVYKLEQVSEKGKAYTNYFGRCNVAEHEKLIQLAQLKPEKDSDEAVTYSLGKFGQRALDFYSIHVTKESTHPVKPLAQIAGNRYASTPVGKALSDACMGTIASFLSKYQDIIIEHQKVVKGNQKRLESLRELAGKENLEYPSVTLPPQPHTKEGVDAYNEVIARVRMWVNLNLWQKLKLSRDDAKPLLRLKGFPSFPLVERQANEVDWWDMVCNVKKLINEKKEDGKVFWQNLAGYKRQEALRPYLSSEEDRKKGKKFARYQLGDLLLHLEKKHGEDWGKVYDEAWERIDKKVEGLSKHIKLEEERRSEDAQSKAALTDWLRAKASFVIEGLKEADKDEFCRCELKLQKWYGDLRGKPFAIEAENSILDISGFSKQYNCAFIWQKDGVKKLNLYLIINYFKGGKLRFKKIKPEAFEANRFYTVINKKSGEIVPMEVNFNFDDPNLIILPLAFGKRQGREFIWNDLLSLETGSLKLANGRVIEKTLYNRRTRQDEPALFVALTFERREVLDSSNIKPMNLIGVDRGENIPAVIALTDPEGCPLSRFKDSLGNPTHILRIGESYKEKQRTIQAKKEVEQRRAGGYSRKYASKAKNLADDMVRNTARDLLYYAVTQDAMLIFENLSRGFGRQGKRTFMAERQYTRMEDWLTAKLAYEGLPSKTYLSKTLAQYTSKTCSNCGFTITSADYDRVLEKLKKTATGWMTTINGKELKVEGQITYYNRYKRQNVVKDLSVELDRLSEESVNNDISSWTKGRSGEALSLLKKRFSHRPVQEKFVCLNCGFETHADEQAALNIARSWLFLRSQEYKKYQTNKTTGNTDKRAFVETWQSFYRKKLKEVWKPAV

SEQ ID NO: 42102 - protein, 978 aa, synthetic construct
  REGION 1..978: note = engineered CasX variant
QEIKRINGIRRRLVKDSNTKKAGKTGPMKTLLVRVMTPDLRERLENLRKKPENIPQPISNTSRANLNKLLTDYTEMKKAILHVYWEEFQKDPVGLMSRVAQPASKKIDQNKLKPEMDEKGNLTTAGFACSQCGQPLFVYKLEQVSEKGKAYTNYFGRCNVAEHEKLIQLAQLKPEKDSDEAVTYSLGKFGQRALDFYSIHVTKESTHPVKPLAQIAGNRYASAPVGKALSDACMGTIASFLSKYQDIIIEHQKVVKGNQKRLESLRELAGKENLEYPSVTLPPQPHTKEGVDAYNEVIARVRMWVNLNLWQKLKLSRDDAKPLLRLKGFPSFPLVERQANEVDWWDMVCNVKKLINEKKEDGKVFWQNLAGYKRQEALRPYLSSEEDRKKGKKFARYQLGDLLLHLEKKHGEDWGKVYDEAWERIDKKVEGLSKHIKLEEERRSEDAQSKAALTDWLRAKASFVIEGLKEADKDEFCRCELKLQKWYGDLRGKPFAIEAENSILDISGFSKQYNCAFIWQKDGVKKLNLYLIINYFKGGKLRFKKIKPEAFEANRFYTVINKKSGEIVPMEVNFNFDDPNLIILPLAFGKRQGREFIWNDLLSLETGSLKLANGRVIEKTLYNRRTRQDEPALFVALTFERREVLDSSNIKPMNLIGVDRGENIPAVIALTDPEGCPLSRFKDSLGNPTHILRIGESYKEKQRTIQAKKEVEQRRAGGYSRKYASKAKNLADDMVRNTARDLLYYAVTQDAMLIFENLSRGFGRQGKRTFMAERQYTRMEDWLTAKLAYEGLPSKTYLSKTLAQYTSKTCSNCGFTITSADYDRVLEKLKKTATGWMTTINGKELKVEGQITYYNRYKRQNVVKDLSVELDRLSEESVNNDISSWTKGRSGEALSLLKKRFSHRPVQEKFVCLNCGFETHADEQAALNIARSWLFLRSQEYKKYQTNKTTGNTDKRAFVETWQSFYRKKLKEVWKPAV

SEQ ID NO: 42103 - protein, 978 aa, synthetic construct
  REGION 1..978: note = engineered CasX variant
QEIKRINGIRRRLVKDSNTKKAGKTGPMKTLLVRVMTPDLRERLENLRKKPENIPQPISNTSRANLNKLLTDYTEMKKAILHVYWEEFQKDPVGLMSRVAQPASKKIDQNKLKPEMDEKGNLTTAGFACSQCGQPLFVYKLEQVSEKGKAYTNYFGRCNVAEHEKLIQLAQLKPEKDSDEAVTYSLGKFGQRALDFYSIHVTKESTHPVKPLAQIAGNRYASVPVGKALSDACMGTIASFLSKYQDIIIEHQKVVKGNQKRLESLRELAGKENLEYPSVTLPPQPHTKEGVDAYNEVIARVRMWVNLNLWQKLKLSRDDAKPLLRLKGFPSFPLVERQANEVDWWDMVCNVKKLINEKKEDGKVFWQNLAGYKRQEALRPYLSSEEDRKKGKKFARYQLGDLLLHLEKKHGEDWGKVYDEAWERIDKKVEGLSKHIKLEEERRSEDAQSKAALTDWLRAKASFVIEGLKEADKDEFCRCELKLQKWYGDLRGKPFAIEAENSILDISGFSKQYNCAFIWQKDGVKKLNLYLIINYFKGGKLRFKKIKPEAFEANRFYTVINKKSGEIVPMEVNFNFDDPNLIILPLAFGKRQGREFIWNDLLSLETGSLKLANGRVIEKTLYNRRTRQDEPALFVALTFERREVLDSSNIKPMNLIGVDRGENIPAVIALTDPEGCPLSRFKDSLGNPTHILRIGESYKEKQRTIQAKKEVEQRRAGGYSRKYASKAKNLADDMVRNTARDLLYYAVTQDAMLIFENLSRGFGRQGKRTFMAERQYTRMEDWLTAKLAYEGLPSKTYLSKTLAQYTSKTCSNCGFTITSADYDRVLEKLKKTATGWMTTINGKELKVEGQITYYNRYKRQNVVKDLSVELDRLSEESVNNDISSWTKGRSGEALSLLKKRFSHRPVQEKFVCLNCGFETHADEQAALNIARSWLFLRSQEYKKYQTNKTTGNTDKRAFVETWQSFYRKKLKEVWKPAV

SEQ ID NO: 42104 - protein, 979 aa, synthetic construct
  REGION 1..979: note = engineered CasX variant
QEIKRINGIRRRLVKDSNTKKAGKTGPMKTLLVRVMTPDLRERLENLRKKPENIPQPISNTSRANLNKLLTDYTEMKKAILHVYWEEFQKDPVGLMSRVAQPASKKIDQNKLKPEMDEKGNLTTAGFACSQCGQPLFVYKLEQVSEKGKAYTNYFGRCNVAEHEKLIQKLAQLKPEKDSDEAVTYSLGKFGQRALDFYSIHVTKESTHPVKPLAQIAGNRYASGPVGKALSDACMGTIASFLSKYQDIIIEHQKVVKGNQKRLESLRELAGKENLEYPSVTLPPQPHTKEGVDAYNEVIARVRMWVNLNLWQKLKLSRDDAKPLLRLKGFPSFPLVERQANEVDWWDMVCNVKKLINEKKEDGKVFWQNLAGYKRQEALRPYLSSEEDRKKGKKFARYQLGDLLLHLEKKHGEDWGKVYDEAWERIDKKVEGLSKHIKLEEERRSEDAQSKAALTDWLRAKASFVIEGLKEADKDEFCRCELKLQKWYGDLRGKPFAIEAENSILDISGFSKQYNCAFIWQKDGVKKLNLYLIINYFKGGKLRFKKIKPEAFEANRFYTVINKKSGEIVPMEVNFNFDDPNLIILPLAFGKRQGREFIWNDLLSLETGSLKLANGRVIEKTLYNRRTRQDEPALFVALTFERREVLDSSNIKPMNLIGVDRGENIPAVIALTDPEGCPLSRFKDSLGNPTHILRIGESYKEKQRTIQAKKEVEQRRAGGYSRKYASKAKNLADDMVRNTARDLLYYAVTQDAMLIFENLSRGFGRQGKRTFMAERQYTRMEDWLTAKLAYEGLPSKTYLSKTLAQYTSKTCSNCGFTITSADYDRVLEKLKKTATGWMTTINGKELKVEGQITYYNRYKRQNVVKDLSVELDRLSEESVNNDISSWTKGRSGEALSLLKKRFSHRPVQEKFVCLNCGFETHADEQAALNIARSWLFLRSQEYKKYQTNKTTGNTDKRAFVETWQSFYRKKLKEVWKPAV

SEQ ID NO: 42105 - protein, 977 aa, synthetic construct
  REGION 1..977: note = engineered CasX variant
QEIKRINGIRRRLVKDSNTKKAGKTGPMKTLLVRVMTPDLRERLENLRKKPENIPQPISNTSRANLNKLLTDYTEMKKAILHVYWEEFQKDPVGLMSRVAQPASKKIDQNKLKPEMDEKGNLTTAGFACSQCGQPLFVYKLEQVSEKGKAYTNYFGRCNVAEHEKLIQLAQLKPEKDSDEAVTYSLGKFGQRALDFYSIHVTKESTHPVKPLAQIAGNRYASPVGKALSDACMGTIASFLSKYQDIIIEHQKVVKGNQKRLESLRELAGKENLEYPSVTLPPQPHTKEGVDAYNEVIARVRMWVNLNLWQKLKLSRDDAKPLLRLKGFPSFPLVERQANEVDWWDMVCNVKKLINEKKEDGKVFWQNLAGYKRQEALRPYLSSEEDRKKGKKFARYQLGDLLLHLEKKHGEDWGKVYDEAWERIDKKVEGLSKHIKLEEERRSEDAQSKAALTDWLRAKASFVIEGLKEADKDEFCRCELKLQKWYGDLRGKPFAIEAENSILDISGFSKQYNCAFIWQKDGVKKLNLYLIINYFKGGKLRFKKIKPEAFEANRFYTVINKKSGEIVPMEVNFNFDDPNLIILPLAFGKRQGREFIWNDLLSLETGSLKLANGRVIEKTLYNRRTRQDEPALFVALTFERREVLDSSNIKPMNLIGVDRGENIPAVIALTDPEGCPLSRFKDSLGNPTHILRIGESYKEKQRTIQAKKEVEQRRAGGYSRKYASKAKNLADDMVRNTARDLLYYAVTQDAMLIFENLSRGFGRQGKRTFMAERQYTRMEDWLTAKLAYEGLPSKTYLSKTLAQYTSKTCSNCGFTITSADYDRVLEKLKKTATGWMTTINGKELKVEGQITYYNRYKRQNVVKDLSVELDRLSEESVNNDISSWTKGRSGEALSLLKKRFSHRPVQEKFVCLNCGFETHADEQAALNIARSWLFLRSQEYKKYQTNKTTGNTDKRAFVETWQSFYRKKLKEVWKPAV

SEQ ID NO: 42106 - protein, 978 aa, synthetic construct
  REGION 1..978: note = engineered CasX variant
QEIKRINGIRRRLVKDSNTKKAGKTGPMKTLLVRVMTPDLRERLENLRKKPENIPQPISNTSRANLNKLLTDYTEMKKAILHVYWEEFQKDPVGLMSRVAQPASKKIDQNKLKPEMDEKGNLTTAGFACSQCGQPLFVYKLEQVSEKGKAYTNYFGRCNVAEHEKLILLAQLKPEKDSDEAVTYSLGKFGQRALDFYSIHVTKESTHPVKPLAQIAGNRYASYPVGKALSDACMGTIASFLSKYQDIIIEHQKVVKGNQKRLESLRELAGKENLEYPSVTLPPQPHTKEGVDAYNEVIARVRMWVNLNLWQKLKLSRDDAKPLLRLKGFPSFPLVERQANEVDWWDMVCNVKKLINEKKEDGKVFWQNLAIYKRQEALRPYLSSEEDRKKGKKFARYQLGDLLLHLEKKHGEDWGKVYDEAWERIDKKVEGLSKHIKLEEERRSEDAQSKAALTDWLRAKASFVIEGLKEADKDEFCRCELKLQKWYGDLRGKPFAIEAENSILDISGFSKQYNCAFIWQKDGVKKLNLYLIINYFKGGKLRFKKIKPEAFEANRFYTVINKKSGEIVPMEVNFNFDDPNLIILPLAFGKRQGREFIWNDLLSLETGSLKLANGRVIEKTLYNRRTRQDEPALFVALTFERREVLDSSNIKPMNLIGVDRGENIPAVIALTDPEGCPLSRFKDSLGNPTHILRIGESYKEKQRTIQAKKEVEQRRAGGYSRKYASKAKNLADDMVRNTARDLLYYAVTQDAMLIFENLSRGFGRQGKRTFMAERQYTRMEDWLTAKLAYEGLPSKTYLSKTLAQYTSKTCSNCGFTITSADYDRVLEKLKKTATGWMTTINGKELKVEGQITYYNRYKRQNVVKDLSVELDRLSEESVNNDISSWTKGRSGEALSLLKKRFSHRPVQEKFVCLNCGFETHADEQAALNIARSWLFLRSQEYKKYQTNKTTGNTDKRAFVETWQSFYRKKLKEVWKPAV

SEQ ID NO: 42107 - protein, 978 aa, synthetic construct
  REGION 1..978: note = engineered CasX variant
QEIKRINGIRRRLVKDSNTKKAGKTGPMKTLLVRVMTPDLRERLENLRKKPENIPQPISNTSRANLNKLLTDYTEMKKAILHVYWEEFQKDPVGLMSRVAQPASKKIDQNKLKPEMDEKGNLTTAGFACSQCGQPLFVYKLEQVSEKGKAYTNYFGRCNVAEHEKLILLAQLKPEKDSDEAVTYSLGKFGQRALDFYSIHVTKESTHPVKPLAQIAGNRYASHPVGKALSDACMGTIASFLSKYQDIIIEHQKVVKGNQKRLESLRELAGKENLEYPSVTLPPQPHTKEGVDAYNEVIARVRMWVNLNLWQKLKLSRDDAKPLLRLKGFPSFPLVERQANEVDWWDMVCNVKKLINEKKEDGKVFWQNLAIYKRQEALRPYLSSEEDRKKGKKFARYQLGDLLLHLEKKHGEDWGKVYDEAWERIDKKVEGLSKHIKLEEERRSEDAQSKAALTDWLRAKASFVIEGLKEADKDEFCRCELKLQKWYGDLRGKPFAIEAENSILDISGFSKQYNCAFIWQKDGVKKLNLYLIINYFKGGKLRFKKIKPEAFEANRFYTVINKKSGEIVPMEVNFNFDDPNLIILPLAFGKRQGREFIWNDLLSLETGSLKLANGRVIEKTLYNRRTRQDEPALFVALTFERREVLDSSNIKPMNLIGVDRGENIPAVIALTDPEGCPLSRFKDSLGNPTHILRIGESYKEKQRTIQAKKEVEQRRAGGYSRKYASKAKNLADDMVRNTARDLLYYAVTQDAMLIFENLSRGFGRQGKRTFMAERQYTRMEDWLTAKLAYEGLPSKTYLSKTLAQYTSKTCSNCGFTITSADYDRVLEKLKKTATGWMTTINGKELKVEGQITYYNRYKRQNVVKDLSVELDRLSEESVNNDISSWTKGRSGEALSLLKKRFSHRPVQEKFVCLNCGFETHADEQAALNIARSWLFLRSQEYKKYQTNKTTGNTDKRAFVETWQSFYRKKLKEVWKPAV

SEQ ID NO: 42108 - protein, 978 aa, synthetic construct
  REGION 1..978: note = engineered CasX variant
QEIKRINGIRRRLVKDSNTKKAGKTGPMKTLLVRVMTPDLRERLENLRKKPENIPQPISNTSRANLNKLLTDYTEMKKAILHVYWEEFQKDPVGLMSRVAQPASKKIDQNKLKPEMDEKGNLTTAGFACSQCGQPLFVYKLEQVSEKGKAYTNYFGRCNVAEHEKLILLAQLKPEKDSDEAVTYSLGKFGQRALDFYSIHVTKESTHPVKPLAQIAGNRYASSPVGKALSDACMGTIASFLSKYQDIIIEHQKVVKGNQKRLESLRELAGKENLEYPSVTLPPQPHTKEGVDAYNEVIARVRMWVNLNLWQKLKLSRDDAKPLLRLKGFPSFPLVERQANEVDWWDMVCNVKKLINEKKEDGKVFWQNLAIYKRQEALRPYLSSEEDRKKGKKFARYQLGDLLLHLEKKHGEDWGKVYDEAWERIDKKVEGLSKHIKLEEERRSEDAQSKAALTDWLRAKASFVIEGLKEADKDEFCRCELKLQKWYGDLRGKPFAIEAENSILDISGFSKQYNCAFIWQKDGVKKLNLYLIINYFKGGKLRFKKIKPEAFEANRFYTVINKKSGEIVPMEVNFNFDDPNLIILPLAFGKRQGREFIWNDLLSLETGSLKLANGRVIEKTLYNRRTRQDEPALFVALTFERREVLDSSNIKPMNLIGVDRGENIPAVIALTDPEGCPLSRFKDSLGNPTHILRIGESYKEKQRTIQAKKEVEQRRAGGYSRKYASKAKNLADDMVRNTARDLLYYAVTQDAMLIFENLSRGFGRQGKRTFMAERQYTRMEDWLTAKLAYEGLPSKTYLSKTLAQYTSKTCSNCGFTITSADYDRVLEKLKKTATGWMTTINGKELKVEGQITYYNRYKRQNVVKDLSVELDRLSEESVNNDISSWTKGRSGEALSLLKKRFSHRPVQEKFVCLNCGFETHADEQAALNIARSWLFLRSQEYKKYQTNKTTGNTDKRAFVETWQSFYRKKLKEVWKPAV

SEQ ID NO: 42109 - protein, 978 aa, synthetic construct
  REGION 1..978: note = engineered CasX variant
QEIKRINGIRRRLVKDSNTKKAGKTGPMKTLLVRVMTPDLRERLENLRKKPENIPQPISNTSRANLNKLLTDYTEMKKAILHVYWEEFQKDPVGLMSRVAQPASKKIDQNKLKPEMDEKGNLTTAGFACSQCGQPLFVYKLEQVSEKGKAYTNYFGRCNVAEHEKLILLAQLKPEKDSDEAVTYSLGKFGQRALDFYSIHVTKESTHPVKPLAQIAGNRYASTPVGKALSDACMGTIASFLSKYQDIIIEHQKVVKGNQKRLESLRELAGKENLEYPSVTLPPQPHTKEGVDAYNEVIARVRMWVNLNLWQKLKLSRDDAKPLLRLKGFPSFPLVERQANEVDWWDMVCNVKKLINEKKEDGKVFWQNLAIYKRQEALRPYLSSEEDRKKGKKFARYQLGDLLLHLEKKHGEDWGKVYDEAWERIDKKVEGLSKHIKLEEERRSEDAQSKAALTDWLRAKASFVIEGLKEADKDEFCRCELKLQKWYGDLRGKPFAIEAENSILDISGFSKQYNCAFIWQKDGVKKLNLYLIINYFKGGKLRFKKIKPEAFEANRFYTVINKKSGEIVPMEVNFNFDDPNLIILPLAFGKRQGREFIWNDLLSLETGSLKLANGRVIEKTLYNRRTRQDEPALFVALTFERREVLDSSNIKPMNLIGVDRGENIPAVIALTDPEGCPLSRFKDSLGNPTHILRIGESYKEKQRTIQAKKEVEQRRAGGYSRKYASKAKNLADDMVRNTARDLLYYAVTQDAMLIFENLSRGFGRQGKRTFMAERQYTRMEDWLTAKLAYEGLPSKTYLSKTLAQYTSKTCSNCGFTITSADYDRVLEKLKKTATGWMTTINGKELKVEGQITYYNRYKRQNVVKDLSVELDRLSEESVNNDISSWTKGRSGEALSLLKKRFSHRPVQEKFVCLNCGFETHADEQAALNIARSWLFLRSQEYKKYQTNKTTGNTDKRAFVETWQSFYRKKLKEVWKPAV

SEQ ID NO: 42110 - protein, 978 aa, synthetic construct
  REGION 1..978: note = engineered CasX variant
QEIKRINGIRRRLVKDSNTKKAGKTGPMKTLLVRVMTPDLRERLENLRKKPENIPQPISNTSRANLNKLLTDYTEMKKAILHVYWEEFQKDPVGLMSRVAQPASKKIDQNKLKPEMDEKGNLTTAGFACSQCGQPLFVYKLEQVSEKGKAYTNYFGRCNVAEHEKLILLAQLKPEKDSDEAVTYSLGKFGQRALDFYSIHVTKESTHPVKPLAQIAGNRYASAPVGKALSDACMGTIASFLSKYQDIIIEHQKVVKGNQKRLESLRELAGKENLEYPSVTLPPQPHTKEGVDAYNEVIARVRMWVNLNLWQKLKLSRDDAKPLLRLKGFPSFPLVERQANEVDWWDMVCNVKKLINEKKEDGKVFWQNLAIYKRQEALRPYLSSEEDRKKGKKFARYQLGDLLLHLEKKHGEDWGKVYDEAWERIDKKVEGLSKHIKLEEERRSEDAQSKAALTDWLRAKASFVIEGLKEADKDEFCRCELKLQKWYGDLRGKPFAIEAENSILDISGFSKQYNCAFIWQKDGVKKLNLYLIINYFKGGKLRFKKIKPEAFEANRFYTVINKKSGEIVPMEVNFNFDDPNLIILPLAFGKRQGREFIWNDLLSLETGSLKLANGRVIEKTLYNRRTRQDEPALFVALTFERREVLDSSNIKPMNLIGVDRGENIPAVIALTDPEGCPLSRFKDSLGNPTHILRIGESYKEKQRTIQAKKEVEQRRAGGYSRKYASKAKNLADDMVRNTARDLLYYAVTQDAMLIFENLSRGFGRQGKRTFMAERQYTRMEDWLTAKLAYEGLPSKTYLSKTLAQYTSKTCSNCGFTITSADYDRVLEKLKKTATGWMTTINGKELKVEGQITYYNRYKRQNVVKDLSVELDRLSEESVNNDISSWTKGRSGEALSLLKKRFSHRPVQEKFVCLNCGFETHADEQAALNIARSWLFLRSQEYKKYQTNKTTGNTDKRAFVETWQSFYRKKLKEVWKPAV

SEQ ID NO: 42111 - protein, 978 aa, synthetic construct
  REGION 1..978: note = engineered CasX variant
QEIKRINGIRRRLVKDSNTKKAGKTGPMKTLLVRVMTPDLRERLENLRKKPENIPQPISNTSRANLNKLLTDYTEMKKAILHVYWEEFQKDPVGLMSRVAQPASKKIDQNKLKPEMDEKGNLTTAGFACSQCGQPLFVYKLEQVSEKGKAYTNYFGRCNVAEHEKLILLAQLKPEKDSDEAVTYSLGKFGQRALDFYSIHVTKESTHPVKPLAQIAGNRYASVPVGKALSDACMGTIASFLSKYQDIIIEHQKVVKGNQKRLESLRELAGKENLEYPSVTLPPQPHTKEGVDAYNEVIARVRMWVNLNLWQKLKLSRDDAKPLLRLKGFPSFPLVERQANEVDWWDMVCNVKKLINEKKEDGKVFWQNLAIYKRQEALRPYLSSEEDRKKGKKFARYQLGDLLLHLEKKHGEDWGKVYDEAWERIDKKVEGLSKHIKLEEERRSEDAQSKAALTDWLRAKASFVIEGLKEADKDEFCRCELKLQKWYGDLRGKPFAIEAENSILDISGFSKQYNCAFIWQKDGVKKLNLYLIINYFKGGKLRFKKIKPEAFEANRFYTVINKKSGEIVPMEVNFNFDDPNLIILPLAFGKRQGREFIWNDLLSLETGSLKLANGRVIEKTLYNRRTRQDEPALFVALTFERREVLDSSNIKPMNLIGVDRGENIPAVIALTDPEGCPLSRFKDSLGNPTHILRIGESYKEKQRTIQAKKEVEQRRAGGYSRKYASKAKNLADDMVRNTARDLLYYAVTQDAMLIFENLSRGFGRQGKRTFMAERQYTRMEDWLTAKLAYEGLPSKTYLSKTLAQYTSKTCSNCGFTITSADYDRVLEKLKKTATGWMTTINGKELKVEGQITYYNRYKRQNVVKDLSVELDRLSEESVNNDISSWTKGRSGEALSLLKKRFSHRPVQEKFVCLNCGFETHADEQAALNIARSWLFLRSQEYKKYQTNKTTGNTDKRAFVETWQSFYRKKLKEVWKPAV

SEQ ID NO: 42112 - protein, 978 aa, synthetic construct
  REGION 1..978: note = engineered CasX variant
QEIKRINGIRRRLVKDSNTKKAGKTGPMKTLLVRVMTPDLRERLENLRKKPENIPQPISNTSRANLNKLLTDYTEMKKAILHVYWEEFQKDPVGLMSRVAQPASKKIDQNKLKPEMDEKGNLTTAGFACSQCGQPLFVYKLEQVSEKGKAYTNYFGRCNVAEHEKLIKLAQLKPEKDSDEAVTYSLGKFGQRALDFYSIHVTKESTHPVKPLAQIAGNRYASGPVGKALSDACMGTIASFLSKYQDIIIEHQKVVKGNQKRLESLRELAGKENLEYPSVTLPPQPHTKEGVDAYNEVIARVRMWVNLNLWQKLKLSRDDAKPLLRLKGFPSFPLVERQANEVDWWDMVCNVKKLINEKKEDGKVFWQNLAIYKRQEALRPYLSSEEDRKKGKKFARYQLGDLLLHLEKKHGEDWGKVYDEAWERIDKKVEGLSKHIKLEEERRSEDAQSKAALTDWLRAKASFVIEGLKEADKDEFCRCELKLQKWYGDLRGKPFAIEAENSILDISGFSKQYNCAFIWQKDGVKKLNLYLIINYFKGGKLRFKKIKPEAFEANRFYTVINKKSGEIVPMEVNFNFDDPNLIILPLAFGKRQGREFIWNDLLSLETGSLKLANGRVIEKTLYNRRTRQDEPALFVALTFERREVLDSSNIKPMNLIGVDRGENIPAVIALTDPEGCPLSRFKDSLGNPTHILRIGESYKEKQRTIQAKKEVEQRRAGGYSRKYASKAKNLADDMVRNTARDLLYYAVTQDAMLIFENLSRGFGRQGKRTFMAERQYTRMEDWLTAKLAYEGLPSKTYLSKTLAQYTSKTCSNCGFTITSADYDRVLEKLKKTATGWMTTINGKELKVEGQITYYNRYKRQNVVKDLSVELDRLSEESVNNDISSWTKGRSGEALSLLKKRFSHRPVQEKFVCLNCGFETHADEQAALNIARSWLFLRSQEYKKYQTNKTTGNTDKRAFVETWQSFYRKKLKEVWKPAV

SEQ ID NO: 42113 - protein, 977 aa, synthetic construct
  REGION 1..977: note = engineered CasX variant
QEIKRINGIRRRLVKDSNTKKAGKTGPMKTLLVRVMTPDLRERLENLRKKPENIPQPISNTSRANLNKLLTDYTEMKKAILHVYWEEFQKDPVGLMSRVAQPASKKIDQNKLKPEMDEKGNLTTAGFACSQCGQPLFVYKLEQVSEKGKAYTNYFGRCNVAEHEKLILLAQLKPEKDSDEAVTYSLGKFGQRALDFYSIHVTKESTHPVKPLAQIAGNRYASPVGKALSDACMGTIASFLSKYQDIIIEHQKVVKGNQKRLESLRELAGKENLEYPSVTLPPQPHTKEGVDAYNEVIARVRMWVNLNLWQKLKLSRDDAKPLLRLKGFPSFPLVERQANEVDWWDMVCNVKKLINEKKEDGKVFWQNLAIYKRQEALRPYLSSEEDRKKGKKFARYQLGDLLLHLEKKHGEDWGKVYDEAWERIDKKVEGLSKHIKLEEERRSEDAQSKAALTDWLRAKASFVIEGLKEADKDEFCRCELKLQKWYGDLRGKPFAIEAENSILDISGFSKQYNCAFIWQKDGVKKLNLYLIINYFKGGKLRFKKIKPEAFEANRFYTVINKKSGEIVPMEVNFNFDDPNLIILPLAFGKRQGREFIWNDLLSLETGSLKLANGRVIEKTLYNRRTRQDEPALFVALTFERREVLDSSNIKPMNLIGVDRGENIPAVIALTDPEGCPLSRFKDSLGNPTHILRIGESYKEKQRTIQAKKEVEQRRAGGYSRKYASKAKNLADDMVRNTARDLLYYAVTQDAMLIFENLSRGFGRQGKRTFMAERQYTRMEDWLTAKLAYEGLPSKTYLSKTLAQYTSKTCSNCGFTITSADYDRVLEKLKKTATGWMTTINGKELKVEGQITYYNRYKRQNVVKDLSVELDRLSEESVNNDISSWTKGRSGEALSLLKKRFSHRPVQEKFVCLNCGFETHADEQAALNIARSWLFLRSQEYKKYQTNKTTGNTDKRAFVETWQSFYRKKLKEVWKPAV

SEQ ID NO: 42114 - protein, 978 aa, synthetic construct
  REGION 1..978: note = engineered CasX variant
QEIKRINGIRRRLVKDSNTKKAGKTGPMKTLLVRVMTPDLRERLENLRKKPENIPQPISNTSRANLNKLLTDYTEMKKAILHVYWEEFQKDPVGLMSRVAQPASKKIDQNKLKPEMDEKGNLTTAGFACSQCGQPLFVYKLEQVSEKGKAYTNYFGRCNVAEHEKLILLAQLKPEKDSDEAVTYSLGKFGQRALDFYSIHVTKESTHPVKPLAQIAGNRYASYPVGKALSDACMGTIASFLSKYQDIIIEHQKVVKGNQKRLESLRELAGKENLEYPSVTLPPQPHTKEGVDAYNEVIARVRMWVNLNLWQKLKLSRDDAKPLLRLKGFPSFPLVERQANEVDWWDMVCNVKKLINEKKEDGKVFWQNLAGYKRQEALRPYLSSEEDREKGKKFARYQLGDLLLHLEKKHGEDWGKVYDEAWERIDKKVEGLSKHIKLEEERRSEDAQSKAALTDWLRAKASFVIEGLKEADKDEFCRCELKLQKWYGDLRGKPFAIEAENSILDISGFSKQYNCAFIWQKDGVKKLNLYLIINYFKGGKLRFKKIKPEAFEANRFYTVINKKSGEIVPMEVNFNFDDPNLIILPLAFGKRQGREFIWNDLLSLETGSLKLANGRVIEKTLYNRRTRQDEPALFVALTFERREVLDSSNIKPMNLIGVDRGENIPAVIALTDPEGCPLSRFKDSLGNPTHILRIGESYKEKQRTIQAKKEVEQRRAGGYSRKYASKAKNLADDMVRNTARDLLYYAVTQDAMLIFENLSRGFGRQGKRTFMAERQYTRMEDWLTAKLAYEGLPSKTYLSKTLAQYTSKTCSNCGFTITSADYDRVLEKLKKTATGWMTTINGKELKVEGQITYYNRYKRQNVVKDLSVELDRLSEESVNNDISSWTKGRSGEALSLLKKRFSHRPVQEKFVCLNCGFETHADEQAALNIARSWLFLRSQEYKKYQTNKTTGNTDKRAFVETWQSFYRKKLKEVWKPAV

SEQ ID NO: 42115 - protein, 978 aa, synthetic construct
  REGION 1..978: note = engineered CasX variant
QEIKRINGIRRRLVKDSNTKKAGKTGPMKTLLVRVMTPDLRERLENLRKKPENIPQPISNTSRANLNKLLTDYTEMKKAILHVYWEEFQKDPVGLMSRVAQPASKKIDQNKLKPEMDEKGNLTTAGFACSQCGQPLFVYKLEQVSEKGKAYTNYFGRCNVAEHEKLILLAQLKPEKDSDEAVTYSLGKFGQRALDFYSIHVTKESTHPVKPLAQIAGNRYASHPVGKALSDACMGTIASFLSKYQDIIIEHQKVVKGNQKRLESLRELAGKENLEYPSVTLPPQPHTKEGVDAYNEVIARVRMWVNLNLWQKLKLSRDDAKPLLRLKGFPSFPLVERQANEVDWWDMVCNVKKLINEKKEDGKVFWQNLAGYKRQEALRPYLSSEEDREKGKKFARYQLGDLLLHLEKKHGEDWGKVYDEAWERIDKKVEGLSKHIKLEEERRSEDAQSKAALTDWLRAKASFVIEGLKEADKDEFCRCELKLQKWYGDLRGKPFAIEAENSILDISGFSKQYNCAFIWQKDGVKKLNLYLIINYFKGGKLRFKKIKPEAFEANRFYTVINKKSGEIVPMEVNFNFDDPNLIILPLAFGKRQGREFIWNDLLSLETGSLKLANGRVIEKTLYNRRTRQDEPALFVALTFERREVLDSSNIKPMNLIGVDRGENIPAVIALTDPEGCPLSRFKDSLGNPTHILRIGESYKEKQRTIQAKKEVEQRRAGGYSRKYASKAKNLADDMVRNTARDLLYYAVTQDAMLIFENLSRGFGRQGKRTFMAERQYTRMEDWLTAKLAYEGLPSKTYLSKTLAQYTSKTCSNCGFTITSADYDRVLEKLKKTATGWMTTINGKELKVEGQITYYNRYKRQNVVKDLSVELDRLSEESVNNDISSWTKGRSGEALSLLKKRFSHRPVQEKFVCLNCGFETHADEQAALNIARSWLFLRSQEYKKYQTNKTTGNTDKRAFVETWQSFYRKKLKEVWKPAV

SEQ ID NO: 42116 - protein, 978 aa, synthetic construct
  REGION 1..978: note = engineered CasX variant
QEIKRINGIRRRLVKDSNTKKAGKTGPMKTLLVRVMTPDLRERLENLRKKPENIPQPISNTSRANLNKLLTDYTEMKKAILHVYWEEFQKDPVGLMSRVAQPASKKIDQNKLKPEMDEKGNLTTAGFACSQCGQPLFVYKLEQVSEKGKAYTNYFGRCNVAEHEKLILLAQLKPEKDSDEAVTYSLGKFGQRALDFYSIHVTKESTHPVKPLAQIAGNRYASSPVGKALSDACMGTIASFLSKYQDIIIEHQKVVKGNQKRLESLRELAGKENLEYPSVTLPPQPHTKEGVDAYNEVIARVRMWVNLNLWQKLKLSRDDAKPLLRLKGFPSFPLVERQANEVDWWDMVCNVKKLINEKKEDGKVFWQNLAGYKRQEALRPYLSSEEDREKGKKFARYQLGDLLLHLEKKHGEDWGKVYDEAWERIDKKVEGLSKHIKLEEERRSEDAQSKAALTDWLRAKASFVIEGLKEADKDEFCRCELKLQKWYGDLRGKPFAIEAENSILDISGFSKQYNCAFIWQKDGVKKLNLYLIINYFKGGKLRFKKIKPEAFEANRFYTVINKKSGEIVPMEVNFNFDDPNLIILPLAFGKRQGREFIWNDLLSLETGSLKLANGRVIEKTLYNRRTRQDEPALFVALTFERREVLDSSNIKPMNLIGVDRGENIPAVIALTDPEGCPLSRFKDSLGNPTHILRIGESYKEKQRTIQAKKEVEQRRAGGYSRKYASKAKNLADDMVRNTARDLLYYAVTQDAMLIFENLSRGFGRQGKRTFMAERQYTRMEDWLTAKLAYEGLPSKTYLSKTLAQYTSKTCSNCGFTITSADYDRVLEKLKKTATGWMTTINGKELKVEGQITYYNRYKRQNVVKDLSVELDRLSEESVNNDISSWTKGRSGEALSLLKKRFSHRPVQEKFVCLNCGFETHADEQAALNIARSWLFLRSQEYKKYQTNKTTGNTDKRAFVETWQSFYRKKLKEVWKPAV

SEQ ID NO: 42117 - protein, 978 aa, synthetic construct
  REGION 1..978: note = engineered CasX variant
QEIKRINGIRRRLVKDSNTKKAGKTGPMKTLLVRVMTPDLRERLENLRKKPENIPQPISNTSRANLNKLLTDYTEMKKAILHVYWEEFQKDPVGLMSRVAQPASKKIDQNKLKPEMDEKGNLTTAGFACSQCGQPLFVYKLEQVSEKGKAYTNYFGRCNVAEHEKLILLAQLKPEKDSDEAVTYSLGKFGQRALDFYSIHVTKESTHPVKPLAQIAGNRYASTPVGKALSDACMGTIASFLSKYQDIIIEHQKVVKGNQKRLESLRELAGKENLEYPSVTLPPQPHTKEGVDAYNEVIARVRMWVNLNLWQKLKLSRDDAKPLLRLKGFPSFPLVERQANEVDWWDMVCNVKKLINEKKEDGKVFWQNLAGYKRQEALRPYLSSEEDREKGKKFARYQLGDLLLHLEKKHGEDWGKVYDEAWERIDKKVEGLSKHIKLEEERRSEDAQSKAALTDWLRAKASFVIEGLKEADKDEFCRCELKLQKWYGDLRGKPFAIEAENSILDISGFSKQYNCAFIWQKDGVKKLNLYLIINYFKGGKLRFKKIKPEAFEANRFYTVINKKSGEIVPMEVNFNFDDPNLIILPLAFGKRQGREFIWNDLLSLETGSLKLANGRVIEKTLYNRRTRQDEPALFVALTFERREVLDSSNIKPMNLIGVDRGENIPAVIALTDPEGCPLSRFKDSLGNPTHILRIGESYKEKQRTIQAKKEVEQRRAGGYSRKYASKAKNLADDMVRNTARDLLYYAVTQDAMLIFENLSRGFGRQGKRTFMAERQYTRMEDWLTAKLAYEGLPSKTYLSKTLAQYTSKTCSNCGFTITSADYDRVLEKLKKTATGWMTTINGKELKVEGQITYYNRYKRQNVVKDLSVELDRLSEESVNNDISSWTKGRSGEALSLLKKRFSHRPVQEKFVCLNCGFETHADEQAALNIARSWLFLRSQEYKKYQTNKTTGNTDKRAFVETWQSFYRKKLKEVWKPAV

SEQ ID NO: 42118 - protein, 978 aa, synthetic construct
  REGION 1..978: note = engineered CasX variant
QEIKRINGIRRRLVKDSNTKKAGKTGPMKTLLVRVMTPDLRERLENLRKKPENIPQPISNTSRANLNKLLTDYTEMKKAILHVYWEEFQKDPVGLMSRVAQPASKKIDQNKLKPEMDEKGNLTTAGFACSQCGQPLFVYKLEQVSEKGKAYTNYFGRCNVAEHEKLILLAQLKPEKDSDEAVTYSLGKFGQRALDFYSIHVTKESTHPVKPLAQIAGNRYASAPVGKALSDACMGTIASFLSKYQDIIIEHQKVVKGNQKRLESLRELAGKENLEYPSVTLPPQPHTKEGVDAYNEVIARVRMWVNLNLWQKLKLSRDDAKPLLRLKGFPSFPLVERQANEVDWWDMVCNVKKLINEKKEDGKVFWQNLAGYKRQEALRPYLSSEEDREKGKKFARYQLGDLLLHLEKKHGEDWGKVYDEAWERIDKKVEGLSKHIKLEEERRSEDAQSKAALTDWLRAKASFVIEGLKEADKDEFCRCELKLQKWYGDLRGKPFAIEAENSILDISGFSKQYNCAFIWQKDGVKKLNLYLIINYFKGGKLRFKKIKPEAFEANRFYTVINKKSGEIVPMEVNFNFDDPNLIILPLAFGKRQGREFIWNDLLSLETGSLKLANGRVIEKTLYNRRTRQDEPALFVALTFERREVLDSSNIKPMNLIGVDRGENIPAVIALTDPEGCPLSRFKDSLGNPTHILRIGESYKEKQRTIQAKKEVEQRRAGGYSRKYASKAKNLADDMVRNTARDLLYYAVTQDAMLIFENLSRGFGRQGKRTFMAERQYTRMEDWLTAKLAYEGLPSKTYLSKTLAQYTSKTCSNCGFTITSADYDRVLEKLKKTATGWMTTINGKELKVEGQITYYNRYKRQNVVKDLSVELDRLSEESVNNDISSWTKGRSGEALSLLKKRFSHRPVQEKFVCLNCGFETHADEQAALNIARSWLFLRSQEYKKYQTNKTTGNTDKRAFVETWQSFYRKKLKEVWKPAV

SEQ ID NO: 42119 - protein, 978 aa, synthetic construct
  REGION 1..978: note = engineered CasX variant
QEIKRINGIRRRLVKDSNTKKAGKTGPMKTLLVRVMTPDLRERLENLRKKPENIPQPISNTSRANLNKLLTDYTEMKKAILHVYWEEFQKDPVGLMSRVAQPASKKIDQNKLKPEMDEKGNLTTAGFACSQCGQPLFVYKLEQVSEKGKAYTNYFGRCNVAEHEKLILLAQLKPEKDSDEAVTYSLGKFGQRALDFYSIHVTKESTHPVKPLAQIAGNRYASVPVGKALSDACMGTIASFLSKYQDIIIEHQKVVKGNQKRLESLRELAGKENLEYPSVTLPPQPHTKEGVDAYNEVIARVRMWVNLNLWQKLKLSRDDAKPLLRLKGFPSFPLVERQANEVDWWDMVCNVKKLINEKKEDGKVFWQNLAGYKRQEALRPYLSSEEDREKGKKFARYQLGDLLLHLEKKHGEDWGKVYDEAWERIDKKVEGLSKHIKLEEERRSEDAQSKAALTDWLRAKASFVIEGLKEADKDEFCRCELKLQKWYGDLRGKPFAIEAENSILDISGFSKQYNCAFIWQKDGVKKLNLYLIINYFKGGKLRFKKIKPEAFEANRFYTVINKKSGEIVPMEVNFNFDDPNLIILPLAFGKRQGREFIWNDLLSLETGSLKLANGRVIEKTLYNRRTRQDEPALFVALTFERREVLDSSNIKPMNLIGVDRGENIPAVIALTDPEGCPLSRFKDSLGNPTHILRIGESYKEKQRTIQAKKEVEQRRAGGYSRKYASKAKNLADDMVRNTARDLLYYAVTQDAMLIFENLSRGFGRQGKRTFMAERQYTRMEDWLTAKLAYEGLPSKTYLSKTLAQYTSKTCSNCGFTITSADYDRVLEKLKKTATGWMTTINGKELKVEGQITYYNRYKRQNVVKDLSVELDRLSEESVNNDISSWTKGRSGEALSLLKKRFSHRPVQEKFVCLNCGFETHADEQAALNIARSWLFLRSQEYKKYQTNKTTGNTDKRAFVETWQSFYRKKLKEVWKPAV

SEQ ID NO: 42120 - protein, 978 aa, synthetic construct
  REGION 1..978: note = engineered CasX variant
QEIKRINGIRRRLVKDSNTKKAGKTGPMKTLLVRVMTPDLRERLENLRKKPENIPQPISNTSRANLNKLLTDYTEMKKAILHVYWEEFQKDPVGLMSRVAQPASKKIDQNKLKPEMDEKGNLTTAGFACSQCGQPLFVYKLEQVSEKGKAYTNYFGRCNVAEHEKLIKLAQLKPEKDSDEAVTYSLGKFGQRALDFYSIHVTKESTHPVKPLAQIAGNRYASGPVGKALSDACMGTIASFLSKYQDIIIEHQKVVKGNQKRLESLRELAGKENLEYPSVTLPPQPHTKEGVDAYNEVIARVRMWVNLNLWQKLKLSRDDAKPLLRLKGFPSFPLVERQANEVDWWDMVCNVKKLINEKKEDGKVFWQNLAGYKRQEALRPYLSSEEDREKGKKFARYQLGDLLLHLEKKHGEDWGKVYDEAWERIDKKVEGLSKHIKLEEERRSEDAQSKAALTDWLRAKASFVIEGLKEADKDEFCRCELKLQKWYGDLRGKPFAIEAENSILDISGFSKQYNCAFIWQKDGVKKLNLYLIINYFKGGKLRFKKIKPEAFEANRFYTVINKKSGEIVPMEVNFNFDDPNLIILPLAFGKRQGREFIWNDLLSLETGSLKLANGRVIEKTLYNRRTRQDEPALFVALTFERREVLDSSNIKPMNLIGVDRGENIPAVIALTDPEGCPLSRFKDSLGNPTHILRIGESYKEKQRTIQAKKEVEQRRAGGYSRKYASKAKNLADDMVRNTARDLLYYAVTQDAMLIFENLSRGFGRQGKRTFMAERQYTRMEDWLTAKLAYEGLPSKTYLSKTLAQYTSKTCSNCGFTITSADYDRVLEKLKKTATGWMTTINGKELKVEGQITYYNRYKRQNVVKDLSVELDRLSEESVNNDISSWTKGRSGEALSLLKKRFSHRPVQEKFVCLNCGFETHADEQAALNIARSWLFLRSQEYKKYQTNKTTGNTDKRAFVETWQSFYRKKLKEVWKPAV

SEQ ID NO: 42121 - protein, 977 aa, synthetic construct
  REGION 1..977: note = engineered CasX variant
QEIKRINGIRRRLVKDSNTKKAGKTGPMKTLLVRVMTPDLRERLENLRKKPENIPQPISNTSRANLNKLLTDYTEMKKAILHVYWEEFQKDPVGLMSRVAQPASKKIDQNKLKPEMDEKGNLTTAGFACSQCGQPLFVYKLEQVSEKGKAYTNYFGRCNVAEHEKLILLAQLKPEKDSDEAVTYSLGKFGQRALDFYSIHVTKESTHPVKPLAQIAGNRYASPVGKALSDACMGTIASFLSKYQDIIIEHQKVVKGNQKRLESLRELAGKENLEYPSVTLPPQPHTKEGVDAYNEVIARVRMWVNLNLWQKLKLSRDDAKPLLRLKGFPSFPLVERQANEVDWWDMVCNVKKLINEKKEDGKVFWQNLAGYKRQEALRPYLSSEEDREKGKKFARYQLGDLLLHLEKKHGEDWGKVYDEAWERIDKKVEGLSKHIKLEEERRSEDAQSKAALTDWLRAKASFVIEGLKEADKDEFCRCELKLQKWYGDLRGKPFAIEAENSILDISGFSKQYNCAFIWQKDGVKKLNLYLIINYFKGGKLRFKKIKPEAFEANRFYTVINKKSGEIVPMEVNFNFDDPNLIILPLAFGKRQGREFIWNDLLSLETGSLKLANGRVIEKTLYNRRTRQDEPALFVALTFERREVLDSSNIKPMNLIGVDRGENIPAVIALTDPEGCPLSRFKDSLGNPTHILRIGESYKEKQRTIQAKKEVEQRRAGGYSRKYASKAKNLADDMVRNTARDLLYYAVTQDAMLIFENLSRGFGRQGKRTFMAERQYTRMEDWLTAKLAYEGLPSKTYLSKTLAQYTSKTCSNCGFTITSADYDRVLEKLKKTATGWMTTINGKELKVEGQITYYNRYKRQNVVKDLSVELDRLSEESVNNDISSWTKGRSGEALSLLKKRFSHRPVQEKFVCLNCGFETHADEQAALNIARSWLFLRSQEYKKYQTNKTTGNTDKRAFVETWQSFYRKKLKEVWKPAV

SEQ ID NO: 42122 - protein, 978 aa, synthetic construct
  REGION 1..978: note = engineered CasX variant
QEIKRINGIRRRLVKDSNTKKAGKTGPMKTLLVRVMTPDLRERLENLRKKPENIPQPISNTSRANLNKLLTDYTEMKKAILHVYWEEFQKDPVGLMSRVAQPASKKIDQNKLKPEMDEKGNLTTAGFACSQCGQPLFVYKLEQVSEKGKAYTNYFGRCNVAEHEKLILLAQLKPEKDSDEAVTYSLGKFGQRALDFYSIHVTKESTHPVKPLAQIAGNRYASYPVGKALSDACMGTIASFLSKYQDIIIEHQKVVKGNQKRLESLRELAGKENLEYPSVTLPPQPHTKEGVDAYNEVIARVRMWVNLNLWQKLKLSRDDAKPLLRLKGFPSFPLVERQANEVDWWDMVCNVKKLINEKKEDGKVFWQNLAGYKRQEALRPYLSSEEDRKKGKKFARYQLGDLLLHLEKKHGEDWGKVYDEAWERIDKKVEGLSKHIKLEEERRSEDAQSKAALTDWLRAKASFVIEGLKEADKDEFCRCELKLQKWYGDLRGKPFAIEAENSILDISGFSKQYNCAFIWQKDGVKKLNLYLIINYFKGGKLRFKKIKPEAFEANRFYTVINKKSGEIVIMEVNFNFDDPNLIILPLAFGKRQGREFIWNDLLSLETGSLKLANGRVIEKTLYNRRTRQDEPALFVALTFERREVLDSSNIKPMNLIGVDRGENIPAVIALTDPEGCPLSRFKDSLGNPTHILRIGESYKEKQRTIQAKKEVEQRRAGGYSRKYASKAKNLADDMVRNTARDLLYYAVTQDAMLIFENLSRGFGRQGKRTFMAERQYTRMEDWLTAKLAYEGLPSKTYLSKTLAQYTSKTCSNCGFTITSADYDRVLEKLKKTATGWMTTINGKELKVEGQITYYNRYKRQNVVKDLSVELDRLSEESVNNDISSWTKGRSGEALSLLKKRFSHRPVQEKFVCLNCGFETHADEQAALNIARSWLFLRSQEYKKYQTNKTTGNTDKRAFVETWQSFYRKKLKEVWKPAV

SEQ ID NO: 42123 - protein, 978 aa, synthetic construct
  REGION 1..978: note = engineered CasX variant
QEIKRINGIRRRLVKDSNTKKAGKTGPMKTLLVRVMTPDLRERLENLRKKPENIPQPISNTSRANLNKLLTDYTEMKKAILHVYWEEFQKDPVGLMSRVAQPASKKIDQNKLKPEMDEKGNLTTAGFACSQCGQPLFVYKLEQVSEKGKAYTNYFGRCNVAEHEKLILLAQLKPEKDSDEAVTYSLGKFGQRALDFYSIHVTKESTHPVKPLAQIAGNRYASHPVGKALSDACMGTIASFLSKYQDIIIEHQKVVKGNQKRLESLRELAGKENLEYPSVTLPPQPHTKEGVDAYNEVIARVRMWVNLNLWQKLKLSRDDAKPLLRLKGFPSFPLVERQANEVDWWDMVCNVKKLINEKKEDGKVFWQNLAGYKRQEALRPYLSSEEDRKKGKKFARYQLGDLLLHLEKKHGEDWGKVYDEAWERIDKKVEGLSKHIKLEEERRSEDAQSKAALTDWLRAKASFVIEGLKEADKDEFCRCELKLQKWYGDLRGKPFAIEAENSILDISGFSKQYNCAFIWQKDGVKKLNLYLIINYFKGGKLRFKKIKPEAFEANRFYTVINKKSGEIVIMEVNFNFDDPNLIILPLAFGKRQGREFIWNDLLSLETGSLKLANGRVIEKTLYNRRTRQDEPALFVALTFERREVLDSSNIKPMNLIGVDRGENIPAVIALTDPEGCPLSRFKDSLGNPTHILRIGESYKEKQRTIQAKKEVEQRRAGGYSRKYASKAKNLADDMVRNTARDLLYYAVTQDAMLIFENLSRGFGRQGKRTFMAERQYTRMEDWLTAKLAYEGLPSKTYLSKTLAQYTSKTCSNCGFTITSADYDRVLEKLKKTATGWMTTINGKELKVEGQITYYNRYKRQNVVKDLSVELDRLSEESVNNDISSWTKGRSGEALSLLKKRFSHRPVQEKFVCLNCGFETHADEQAALNIARSWLFLRSQEYKKYQTNKTTGNTDKRAFVETWQSFYRKKLKEVWKPAV

SEQ ID NO: 42124 - protein, 978 aa, synthetic construct
  REGION 1..978: note = engineered CasX variant
QEIKRINGIRRRLVKDSNTKKAGKTGPMKTLLVRVMTPDLRERLENLRKKPENIPQPISNTSRANLNKLLTDYTEMKKAILHVYWEEFQKDPVGLMSRVAQPASKKIDQNKLKPEMDEKGNLTTAGFACSQCGQPLFVYKLEQVSEKGKAYTNYFGRCNVAEHEKLILLAQLKPEKDSDEAVTYSLGKFGQRALDFYSIHVTKESTHPVKPLAQIAGNRYASSPVGKALSDACMGTIASFLSKYQDIIIEHQKVVKGNQKRLESLRELAGKENLEYPSVTLPPQPHTKEGVDAYNEVIARVRMWVNLNLWQKLKLSRDDAKPLLRLKGFPSFPLVERQANEVDWWDMVCNVKKLINEKKEDGKVFWQNLAGYKRQEALRPYLSSEEDRKKGKKFARYQLGDLLLHLEKKHGEDWGKVYDEAWERIDKKVEGLSKHIKLEEERRSEDAQSKAALTDWLRAKASFVIEGLKEADKDEFCRCELKLQKWYGDLRGKPFAIEAENSILDISGFSKQYNCAFIWQKDGVKKLNLYLIINYFKGGKLRFKKIKPEAFEANRFYTVINKKSGEIVIMEVNFNFDDPNLIILPLAFGKRQGREFIWNDLLSLETGSLKLANGRVIEKTLYNRRTRQDEPALFVALTFERREVLDSSNIKPMNLIGVDRGENIPAVIALTDPEGCPLSRFKDSLGNPTHILRIGESYKEKQRTIQAKKEVEQRRAGGYSRKYASKAKNLADDMVRNTARDLLYYAVTQDAMLIFENLSRGFGRQGKRTFMAERQYTRMEDWLTAKLAYEGLPSKTYLSKTLAQYTSKTCSNCGFTITSADYDRVLEKLKKTATGWMTTINGKELKVEGQITYYNRYKRQNVVKDLSVELDRLSEESVNNDISSWTKGRSGEALSLLKKRFSHRPVQEKFVCLNCGFETHADEQAALNIARSWLFLRSQEYKKYQTNKTTGNTDKRAFVETWQSFYRKKLKEVWKPAV

SEQ ID NO: 42125 - protein, 978 aa, synthetic construct
  REGION 1..978: note = engineered CasX variant
QEIKRINGIRRRLVKDSNTKKAGKTGPMKTLLVRVMTPDLRERLENLRKKPENIPQPISNTSRANLNKLLTDYTEMKKAILHVYWEEFQKDPVGLMSRVAQPASKKIDQNKLKPEMDEKGNLTTAGFACSQCGQPLFVYKLEQVSEKGKAYTNYFGRCNVAEHEKLILLAQLKPEKDSDEAVTYSLGKFGQRALDFYSIHVTKESTHPVKPLAQIAGNRYASTPVGKALSDACMGTIASFLSKYQDIIIEHQKVVKGNQKRLESLRELAGKENLEYPSVTLPPQPHTKEGVDAYNEVIARVRMWVNLNLWQKLKLSRDDAKPLLRLKGFPSFPLVERQANEVDWWDMVCNVKKLINEKKEDGKVFWQNLAGYKRQEALRPYLSSEEDRKKGKKFARYQLGDLLLHLEKKHGEDWGKVYDEAWERIDKKVEGLSKHIKLEEERRSEDAQSKAALTDWLRAKASFVIEGLKEADKDEFCRCELKLQKWYGDLRGKPFAIEAENSILDISGFSKQYNCAFIWQKDGVKKLNLYLIINYFKGGKLRFKKIKPEAFEANRFYTVINKKSGEIVIMEVNFNFDDPNLIILPLAFGKRQGREFIWNDLLSLETGSLKLANGRVIEKTLYNRRTRQDEPALFVALTFERREVLDSSNIKPMNLIGVDRGENIPAVIALTDPEGCPLSRFKDSLGNPTHILRIGESYKEKQRTIQAKKEVEQRRAGGYSRKYASKAKNLADDMVRNTARDLLYYAVTQDAMLIFENLSRGFGRQGKRTFMAERQYTRMEDWLTAKLAYEGLPSKTYLSKTLAQYTSKTCSNCGFTITSADYDRVLEKLKKTATGWMTTINGKELKVEGQITYYNRYKRQNVVKDLSVELDRLSEESVNNDISSWTKGRSGEALSLLKKRFSHRPVQEKFVCLNCGFETHADEQAALNIARSWLFLRSQEYKKYQTNKTTGNTDKRAFVETWQSFYRKKLKEVWKPAV

SEQ ID NO: 42126 - protein, 978 aa, synthetic construct
  REGION 1..978: note = engineered CasX variant
QEIKRINGIRRRLVKDSNTKKAGKTGPMKTLLVRVMTPDLRERLENLRKKPENIPQPISNTSRANLNKLLTDYTEMKKAILHVYWEEFQKDPVGLMSRVAQPASKKIDQNKLKPEMDEKGNLTTAGFACSQCGQPLFVYKLEQVSEKGKAYTNYFGRCNVAEHEKLILLAQLKPEKDSDEAVTYSLGKFGQRALDFYSIHVTKESTHPVKPLAQIAGNRYASAPVGKALSDACMGTIASFLSKYQDIIIEHQKVVKGNQKRLESLRELAGKENLEYPSVTLPPQPHTKEGVDAYNEVIARVRMWVNLNLWQKLKLSRDDAKPLLRLKGFPSFPLVERQANEVDWWDMVCNVKKLINEKKEDGKVFWQNLAGYKRQEALRPYLSSEEDRKKGKKFARYQLGDLLLHLEKKHGEDWGKVYDEAWERIDKKVEGLSKHIKLEEERRSEDAQSKAALTDWLRAKASFVIEGLKEADKDEFCRCELKLQKWYGDLRGKPFAIEAENSILDISGFSKQYNCAFIWQKDGVKKLNLYLIINYFKGGKLRFKKIKPEAFEANRFYTVINKKSGEIVIMEVNFNFDDPNLIILPLAFGKRQGREFIWNDLLSLETGSLKLANGRVIEKTLYNRRTRQDEPALFVALTFERREVLDSSNIKPMNLIGVDRGENIPAVIALTDPEGCPLSRFKDSLGNPTHILRIGESYKEKQRTIQAKKEVEQRRAGGYSRKYASKAKNLADDMVRNTARDLLYYAVTQDAMLIFENLSRGFGRQGKRTFMAERQYTRMEDWLTAKLAYEGLPSKTYLSKTLAQYTSKTCSNCGFTITSADYDRVLEKLKKTATGWMTTINGKELKVEGQITYYNRYKRQNVVKDLSVELDRLSEESVNNDISSWTKGRSGEALSLLKKRFSHRPVQEKFVCLNCGFETHADEQAALNIARSWLFLRSQEYKKYQTNKTTGNTDKRAFVETWQSFYRKKLKEVWKPAV

SEQ ID NO: 42127 - protein, 978 aa, synthetic construct
  REGION 1..978: note = engineered CasX variant
QEIKRINGIRRRLVKDSNTKKAGKTGPMKTLLVRVMTPDLRERLENLRKKPENIPQPISNTSRANLNKLLTDYTEMKKAILHVYWEEFQKDPVGLMSRVAQPASKKIDQNKLKPEMDEKGNLTTAGFACSQCGQPLFVYKLEQVSEKGKAYTNYFGRCNVAEHEKLILLAQLKPEKDSDEAVTYSLGKFGQRALDFYSIHVTKESTHPVKPLAQIAGNRYASVPVGKALSDACMGTIASFLSKYQDIIIEHQKVVKGNQKRLESLRELAGKENLEYPSVTLPPQPHTKEGVDAYNEVIARVRMWVNLNLWQKLKLSRDDAKPLLRLKGFPSFPLVERQANEVDWWDMVCNVKKLINEKKEDGKVFWQNLAGYKRQEALRPYLSSEEDRKKGKKFARYQLGDLLLHLEKKHGEDWGKVYDEAWERIDKKVEGLSKHIKLEEERRSEDAQSKAALTDWLRAKASFVIEGLKEADKDEFCRCELKLQKWYGDLRGKPFAIEAENSILDISGFSKQYNCAFIWQKDGVKKLNLYLIINYFKGGKLRFKKIKPEAFEANRFYTVINKKSGEIVIMEVNFNFDDPNLIILPLAFGKRQGREFIWNDLLSLETGSLKLANGRVIEKTLYNRRTRQDEPALFVALTFERREVLDSSNIKPMNLIGVDRGENIPAVIALTDPEGCPLSRFKDSLGNPTHILRIGESYKEKQRTIQAKKEVEQRRAGGYSRKYASKAKNLADDMVRNTARDLLYYAVTQDAMLIFENLSRGFGRQGKRTFMAERQYTRMEDWLTAKLAYEGLPSKTYLSKTLAQYTSKTCSNCGFTITSADYDRVLEKLKKTATGWMTTINGKELKVEGQITYYNRYKRQNVVKDLSVELDRLSEESVNNDISSWTKGRSGEALSLLKKRFSHRPVQEKFVCLNCGFETHADEQAALNIARSWLFLRSQEYKKYQTNKTTGNTDKRAFVETWQSFYRKKLKEVWKPAV

SEQ ID NO: 42128 - protein, 978 aa, synthetic construct
  REGION 1..978: note = engineered CasX variant
QEIKRINGIRRRLVKDSNTKKAGKTGPMKTLLVRVMTPDLRERLENLRKKPENIPQPISNTSRANLNKLLTDYTEMKKAILHVYWEEFQKDPVGLMSRVAQPASKKIDQNKLKPEMDEKGNLTTAGFACSQCGQPLFVYKLEQVSEKGKAYTNYFGRCNVAEHEKLIKLAQLKPEKDSDEAVTYSLGKFGQRALDFYSIHVTKESTHPVKPLAQIAGNRYASGPVGKALSDACMGTIASFLSKYQDIIIEHQKVVKGNQKRLESLRELAGKENLEYPSVTLPPQPHTKEGVDAYNEVIARVRMWVNLNLWQKLKLSRDDAKPLLRLKGFPSFPLVERQANEVDWWDMVCNVKKLINEKKEDGKVFWQNLAGYKRQEALRPYLSSEEDRKKGKKFARYQLGDLLLHLEKKHGEDWGKVYDEAWERIDKKVEGLSKHIKLEEERRSEDAQSKAALTDWLRAKASFVIEGLKEADKDEFCRCELKLQKWYGDLRGKPFAIEAENSILDISGFSKQYNCAFIWQKDGVKKLNLYLIINYFKGGKLRFKKIKPEAFEANRFYTVINKKSGEIVIMEVNFNFDDPNLIILPLAFGKRQGREFIWNDLLSLETGSLKLANGRVIEKTLYNRRTRQDEPALFVALTFERREVLDSSNIKPMNLIGVDRGENIPAVIALTDPEGCPLSRFKDSLGNPTHILRIGESYKEKQRTIQAKKEVEQRRAGGYSRKYASKAKNLADDMVRNTARDLLYYAVTQDAMLIFENLSRGFGRQGKRTFMAERQYTRMEDWLTAKLAYEGLPSKTYLSKTLAQYTSKTCSNCGFTITSADYDRVLEKLKKTATGWMTTINGKELKVEGQITYYNRYKRQNVVKDLSVELDRLSEESVNNDISSWTKGRSGEALSLLKKRFSHRPVQEKFVCLNCGFETHADEQAALNIARSWLFLRSQEYKKYQTNKTTGNTDKRAFVETWQSFYRKKLKEVWKPAV

SEQ ID NO: 42129 - protein, 977 aa, synthetic construct
  REGION 1..977: note = engineered CasX variant
QEIKRINGIRRRLVKDSNTKKAGKTGPMKTLLVRVMTPDLRERLENLRKKPENIPQPISNTSRANLNKLLTDYTEMKKAILHVYWEEFQKDPVGLMSRVAQPASKKIDQNKLKPEMDEKGNLTTAGFACSQCGQPLFVYKLEQVSEKGKAYTNYFGRCNVAEHEKLILLAQLKPEKDSDEAVTYSLGKFGQRALDFYSIHVTKESTHPVKPLAQIAGNRYASPVGKALSDACMGTIASFLSKYQDIIIEHQKVVKGNQKRLESLRELAGKENLEYPSVTLPPQPHTKEGVDAYNEVIARVRMWVNLNLWQKLKLSRDDAKPLLRLKGFPSFPLVERQANEVDWWDMVCNVKKLINEKKEDGKVFWQNLAGYKRQEALRPYLSSEEDRKKGKKFARYQLGDLLLHLEKKHGEDWGKVYDEAWERIDKKVEGLSKHIKLEEERRSEDAQSKAALTDWLRAKASFVIEGLKEADKDEFCRCELKLQKWYGDLRGKPFAIEAENSILDISGFSKQYNCAFIWQKDGVKKLNLYLIINYFKGGKLRFKKIKPEAFEANRFYTVINKKSGEIVIMEVNFNFDDPNLIILPLAFGKRQGREFIWNDLLSLETGSLKLANGRVIEKTLYNRRTRQDEPALFVALTFERREVLDSSNIKPMNLIGVDRGENIPAVIALTDPEGCPLSRFKDSLGNPTHILRIGESYKEKQRTIQAKKEVEQRRAGGYSRKYASKAKNLADDMVRNTARDLLYYAVTQDAMLIFENLSRGFGRQGKRTFMAERQYTRMEDWLTAKLAYEGLPSKTYLSKTLAQYTSKTCSNCGFTITSADYDRVLEKLKKTATGWMTTINGKELKVEGQITYYNRYKRQNVVKDLSVELDRLSEESVNNDISSWTKGRSGEALSLLKKRFSHRPVQEKFVCLNCGFETHADEQAALNIARSWLFLRSQEYKKYQTNKTTGNTDKRAFVETWQSFYRKKLKEVWKPAV

SEQ ID NO: 42130 - protein, 978 aa, synthetic construct
  REGION 1..978: note = engineered CasX variant
QEIKRINKIRRRLVKDSNTKKAGKTGPMKTLLVPVMTPDLRERLENLRKKPENIPQPISNTSRANLNKLLTDYTEMKKAILHVYWEEFQKDPVGLMSRVAQPASKKIDQNKLKPEMDEKGNLTTAGFACSQCGQPLFVYKLEQVSEKGKAYTNYFGRCNVAEHEKLILLAQLKPEKDSDEAVTYSLGKFGQRALDFYSIHVTKESTHPVKPLAQIAGNRYASYPVGKALSGACMGTIASFLSKYQDIIIEHQKVVKGNQKRLESLRELAGKENLEYPSVTLPPQPHTKEGVDAYNEVIARVRMWVNLNLWQKLKLSRDDAKPLLRLKGFPSFPLVERQANEVDWWDMVCNVKKLINEKKEDGKVFWQNLAGYKRQEALRPYLSSEEDRKKGKKFARYQLGDLLLHLEKKHGEDWGKVYDEAWERIDKKVEGLSKHIKLEEERRSEDAQSKAALTDWLRAKASFVIEGLKEADKDEFCRCELKLQKWYGDLRGKPFAIEAENSILDISGFSKQYNCAFIWQKDGVKKLNLYLIINYFKGGKLRFKKIKPEAFEANRFYTVINKKSGEIVPMEVNFNFDDPNLIILPLAFGKRQGREFIWNDLLSLETGSLKLANGRVIEKTLYNRRTRQDEPALFVALTFERREVLDSSNIKPMNLIGVDRGENIPAVIALTDPEGCPLSRFKDSLGNPTHILRIGESYKEKQRTIQAKKEVEQRRAGGYSRKYASKAKNLADDMVRNTARDLLYYAVTQDAMLIFENLSRGFGRQGKRTFMAERQYTRMEDWLTAKLAYEGLPSKTYLSKTLAQYTSKTCSNCGFTITSADYDRVLEKLKKTATGWMTTINGKELKVEGQITYYNRYKRQNVVKDLSVELDRLSEESVNNDISSWTKGRSGEALSLLKKRFSHRPVQEKFVCLNCGFETHADEQAALNIARSWLFLRSQEYKKYQTNKTTGNTDKRAFVETWQSFYRKKLKEVWKPAV

SEQ ID NO: 42131 - protein, 978 aa, synthetic construct
  REGION 1..978: note = engineered CasX variant
QEIKRINKIRRRLVKDSNTKKAGKTGPMKTLLVPVMTPDLRERLENLRKKPENIPQPISNTSRANLNKLLTDYTEMKKAILHVYWEEFQKDPVGLMSRVAQPASKKIDQNKLKPEMDEKGNLTTAGFACSQCGQPLFVYKLEQVSEKGKAYTNYFGRCNVAEHEKLILLAQLKPEKDSDEAVTYSLGKFGQRALDFYSIHVTKESTHPVKPLAQIAGNRYASHPVGKALSGACMGTIASFLSKYQDIIIEHQKVVKGNQKRLESLRELAGKENLEYPSVTLPPQPHTKEGVDAYNEVIARVRMWVNLNLWQKLKLSRDDAKPLLRLKGFPSFPLVERQANEVDWWDMVCNVKKLINEKKEDGKVFWQNLAGYKRQEALRPYLSSEEDRKKGKKFARYQLGDLLLHLEKKHGEDWGKVYDEAWERIDKKVEGLSKHIKLEEERRSEDAQSKAALTDWLRAKASFVIEGLKEADKDEFCRCELKLQKWYGDLRGKPFAIEAENSILDISGFSKQYNCAFIWQKDGVKKLNLYLIINYFKGGKLRFKKIKPEAFEANRFYTVINKKSGEIVPMEVNFNFDDPNLIILPLAFGKRQGREFIWNDLLSLETGSLKLANGRVIEKTLYNRRTRQDEPALFVALTFERREVLDSSNIKPMNLIGVDRGENIPAVIALTDPEGCPLSRFKDSLGNPTHILRIGESYKEKQRTIQAKKEVEQRRAGGYSRKYASKAKNLADDMVRNTARDLLYYAVTQDAMLIFENLSRGFGRQGKRTFMAERQYTRMEDWLTAKLAYEGLPSKTYLSKTLAQYTSKTCSNCGFTITSADYDRVLEKLKKTATGWMTTINGKELKVEGQITYYNRYKRQNVVKDLSVELDRLSEESVNNDISSWTKGRSGEALSLLKKRFSHRPVQEKFVCLNCGFETHADEQAALNIARSWLFLRSQEYKKYQTNKTTGNTDKRAFVETWQSFYRKKLKEVWKPAV

SEQ ID NO: 42132 - protein, 978 aa, synthetic construct
  REGION 1..978: note = engineered CasX variant
QEIKRINKIRRRLVKDSNTKKAGKTGPMKTLLVPVMTPDLRERLENLRKKPENIPQPISNTSRANLNKLLTDYTEMKKAILHVYWEEFQKDPVGLMSRVAQPASKKIDQNKLKPEMDEKGNLTTAGFACSQCGQPLFVYKLEQVSEKGKAYTNYFGRCNVAEHEKLILLAQLKPEKDSDEAVTYSLGKFGQRALDFYSIHVTKESTHPVKPLAQIAGNRYASSPVGKALSGACMGTIASFLSKYQDIIIEHQKVVKGNQKRLESLRELAGKENLEYPSVTLPPQPHTKEGVDAYNEVIARVRMWVNLNLWQKLKLSRDDAKPLLRLKGFPSFPLVERQANEVDWWDMVCNVKKLINEKKEDGKVFWQNLAGYKRQEALRPYLSSEEDRKKGKKFARYQLGDLLLHLEKKHGEDWGKVYDEAWERIDKKVEGLSKHIKLEEERRSEDAQSKAALTDWLRAKASFVIEGLKEADKDEFCRCELKLQKWYGDLRGKPFAIEAENSILDISGFSKQYNCAFIWQKDGVKKLNLYLIINYFKGGKLRFKKIKPEAFEANRFYTVINKKSGEIVPMEVNFNFDDPNLIILPLAFGKRQGREFIWNDLLSLETGSLKLANGRVIEKTLYNRRTRQDEPALFVALTFERREVLDSSNIKPMNLIGVDRGENIPAVIALTDPEGCPLSRFKDSLGNPTHILRIGESYKEKQRTIQAKKEVEQRRAGGYSRKYASKAKNLADDMVRNTARDLLYYAVTQDAMLIFENLSRGFGRQGKRTFMAERQYTRMEDWLTAKLAYEGLPSKTYLSKTLAQYTSKTCSNCGFTITSADYDRVLEKLKKTATGWMTTINGKELKVEGQITYYNRYKRQNVVKDLSVELDRLSEESVNNDISSWTKGRSGEALSLLKKRFSHRPVQEKFVCLNCGFETHADEQAALNIARSWLFLRSQEYKKYQTNKTTGNTDKRAFVETWQSFYRKKLKEVWKPAV

SEQ ID NO: 42133 - protein, 978 aa, synthetic construct
  REGION 1..978: note = engineered CasX variant
QEIKRINKIRRRLVKDSNTKKAGKTGPMKTLLVPVMTPDLRERLENLRKKPENIPQPISNTSRANLNKLLTDYTEMKKAILHVYWEEFQKDPVGLMSRVAQPASKKIDQNKLKPEMDEKGNLTTAGFACSQCGQPLFVYKLEQVSEKGKAYTNYFGRCNVAEHEKLILLAQLKPEKDSDEAVTYSLGKFGQRALDFYSIHVTKESTHPVKPLAQIAGNRYASTPVGKALSGACMGTIASFLSKYQDIIIEHQKVVKGNQKRLESLRELAGKENLEYPSVTLPPQPHTKEGVDAYNEVIARVRMWVNLNLWQKLKLSRDDAKPLLRLKGFPSFPLVERQANEVDWWDMVCNVKKLINEKKEDGKVFWQNLAGYKRQEALRPYLSSEEDRKKGKKFARYQLGDLLLHLEKKHGEDWGKVYDEAWERIDKKVEGLSKHIKLEEERRSEDAQSKAALTDWLRAKASFVIEGLKEADKDEFCRCELKLQKWYGDLRGKPFAIEAENSILDISGFSKQYNCAFIWQKDGVKKLNLYLIINYFKGGKLRFKKIKPEAFEANRFYTVINKKSGEIVPMEVNFNFDDPNLIILPLAFGKRQGREFIWNDLLSLETGSLKLANGRVIEKTLYNRRTRQDEPALFVALTFERREVLDSSNIKPMNLIGVDRGENIPAVIALTDPEGCPLSRFKDSLGNPTHILRIGESYKEKQRTIQAKKEVEQRRAGGYSRKYASKAKNLADDMVRNTARDLLYYAVTQDAMLIFENLSRGFGRQGKRTFMAERQYTRMEDWLTAKLAYEGLPSKTYLSKTLAQYTSKTCSNCGFTITSADYDRVLEKLKKTATGWMTTINGKELKVEGQITYYNRYKRQNVVKDLSVELDRLSEESVNNDISSWTKGRSGEALSLLKKRFSHRPVQEKFVCLNCGFETHADEQAALNIARSWLFLRSQEYKKYQTNKTTGNTDKRAFVETWQSFYRKKLKEVWKPAV

SEQ ID NO: 42134 - protein, 978 aa, synthetic construct
  REGION 1..978: note = engineered CasX variant
QEIKRINKIRRRLVKDSNTKKAGKTGPMKTLLVPVMTPDLRERLENLRKKPENIPQPISNTSRANLNKLLTDYTEMKKAILHVYWEEFQKDPVGLMSRVAQPASKKIDQNKLKPEMDEKGNLTTAGFACSQCGQPLFVYKLEQVSEKGKAYTNYFGRCNVAEHEKLILLAQLKPEKDSDEAVTYSLGKFGQRALDFYSIHVTKESTHPVKPLAQIAGNRYASAPVGKALSGACMGTIASFLSKYQDIIIEHQKVVKGNQKRLESLRELAGKENLEYPSVTLPPQPHTKEGVDAYNEVIARVRMWVNLNLWQKLKLSRDDAKPLLRLKGFPSFPLVERQANEVDWWDMVCNVKKLINEKKEDGKVFWQNLAGYKRQEALRPYLSSEEDRKKGKKFARYQLGDLLLHLEKKHGEDWGKVYDEAWERIDKKVEGLSKHIKLEEERRSEDAQSKAALTDWLRAKASFVIEGLKEADKDEFCRCELKLQKWYGDLRGKPFAIEAENSILDISGFSKQYNCAFIWQKDGVKKLNLYLIINYFKGGKLRFKKIKPEAFEANRFYTVINKKSGEIVPMEVNFNFDDPNLIILPLAFGKRQGREFIWNDLLSLETGSLKLANGRVIEKTLYNRRTRQDEPALFVALTFERREVLDSSNIKPMNLIGVDRGENIPAVIALTDPEGCPLSRFKDSLGNPTHILRIGESYKEKQRTIQAKKEVEQRRAGGYSRKYASKAKNLADDMVRNTARDLLYYAVTQDAMLIFENLSRGFGRQGKRTFMAERQYTRMEDWLTAKLAYEGLPSKTYLSKTLAQYTSKTCSNCGFTITSADYDRVLEKLKKTATGWMTTINGKELKVEGQITYYNRYKRQNVVKDLSVELDRLSEESVNNDISSWTKGRSGEALSLLKKRFSHRPVQEKFVCLNCGFETHADEQAALNIARSWLFLRSQEYKKYQTNKTTGNTDKRAFVETWQSFYRKKLKEVWKPAV

SEQ ID NO: 42135 - protein, 978 aa, synthetic construct
  REGION 1..978: note = engineered CasX variant
QEIKRINKIRRRLVKDSNTKKAGKTGPMKTLLVPVMTPDLRERLENLRKKPENIPQPISNTSRANLNKLLTDYTEMKKAILHVYWEEFQKDPVGLMSRVAQPASKKIDQNKLKPEMDEKGNLTTAGFACSQCGQPLFVYKLEQVSEKGKAYTNYFGRCNVAEHEKLILLAQLKPEKDSDEAVTYSLGKFGQRALDFYSIHVTKESTHPVKPLAQIAGNRYASVPVGKALSGACMGTIASFLSKYQDIIIEHQKVVKGNQKRLESLRELAGKENLEYPSVTLPPQPHTKEGVDAYNEVIARVRMWVNLNLWQKLKLSRDDAKPLLRLKGFPSFPLVERQANEVDWWDMVCNVKKLINEKKEDGKVFWQNLAGYKRQEALRPYLSSEEDRKKGKKFARYQLGDLLLHLEKKHGEDWGKVYDEAWERIDKKVEGLSKHIKLEEERRSEDAQSKAALTDWLRAKASFVIEGLKEADKDEFCRCELKLQKWYGDLRGKPFAIEAENSILDISGFSKQYNCAFIWQKDGVKKLNLYLIINYFKGGKLRFKKIKPEAFEANRFYTVINKKSGEIVPMEVNFNFDDPNLIILPLAFGKRQGREFIWNDLLSLETGSLKLANGRVIEKTLYNRRTRQDEPALFVALTFERREVLDSSNIKPMNLIGVDRGENIPAVIALTDPEGCPLSRFKDSLGNPTHILRIGESYKEKQRTIQAKKEVEQRRAGGYSRKYASKAKNLADDMVRNTARDLLYYAVTQDAMLIFENLSRGFGRQGKRTFMAERQYTRMEDWLTAKLAYEGLPSKTYLSKTLAQYTSKTCSNCGFTITSADYDRVLEKLKKTATGWMTTINGKELKVEGQITYYNRYKRQNVVKDLSVELDRLSEESVNNDISSWTKGRSGEALSLLKKRFSHRPVQEKFVCLNCGFETHADEQAALNIARSWLFLRSQEYKKYQTNKTTGNTDKRAFVETWQSFYRKKLKEVWKPAV

SEQ ID NO: 42136 - protein, 978 aa, synthetic construct
  REGION 1..978: note = engineered CasX variant
QEIKRINKIRRRLVKDSNTKKAGKTGPMKTLLVPVMTPDLRERLENLRKKPENIPQPISNTSRANLNKLLTDYTEMKKAILHVYWEEFQKDPVGLMSRVAQPASKKIDQNKLKPEMDEKGNLTTAGFACSQCGQPLFVYKLEQVSEKGKAYTNYFGRCNVAEHEKLIKLAQLKPEKDSDEAVTYSLGKFGQRALDFYSIHVTKESTHPVKPLAQIAGNRYASGPVGKALSGACMGTIASFLSKYQDIIIEHQKVVKGNQKRLESLRELAGKENLEYPSVTLPPQPHTKEGVDAYNEVIARVRMWVNLNLWQKLKLSRDDAKPLLRLKGFPSFPLVERQANEVDWWDMVCNVKKLINEKKEDGKVFWQNLAGYKRQEALRPYLSSEEDRKKGKKFARYQLGDLLLHLEKKHGEDWGKVYDEAWERIDKKVEGLSKHIKLEEERRSEDAQSKAALTDWLRAKASFVIEGLKEADKDEFCRCELKLQKWYGDLRGKPFAIEAENSILDISGFSKQYNCAFIWQKDGVKKLNLYLIINYFKGGKLRFKKIKPEAFEANRFYTVINKKSGEIVPMEVNFNFDDPNLIILPLAFGKRQGREFIWNDLLSLETGSLKLANGRVIEKTLYNRRTRQDEPALFVALTFERREVLDSSNIKPMNLIGVDRGENIPAVIALTDPEGCPLSRFKDSLGNPTHILRIGESYKEKQRTIQAKKEVEQRRAGGYSRKYASKAKNLADDMVRNTARDLLYYAVTQDAMLIFENLSRGFGRQGKRTFMAERQYTRMEDWLTAKLAYEGLPSKTYLSKTLAQYTSKTCSNCGFTITSADYDRVLEKLKKTATGWMTTINGKELKVEGQITYYNRYKRQNVVKDLSVELDRLSEESVNNDISSWTKGRSGEALSLLKKRFSHRPVQEKFVCLNCGFETHADEQAALNIARSWLFLRSQEYKKYQTNKTTGNTDKRAFVETWQSFYRKKLKEVWKPAV

SEQ ID NO: 42137 - protein, 977 aa, synthetic construct
  REGION 1..977: note = engineered CasX variant
QEIKRINKIRRRLVKDSNTKKAGKTGPMKTLLVPVMTPDLRERLENLRKKPENIPQPISNTSRANLNKLLTDYTEMKKAILHVYWEEFQKDPVGLMSRVAQPASKKIDQNKLKPEMDEKGNLTTAGFACSQCGQPLFVYKLEQVSEKGKAYTNYFGRCNVAEHEKLILLAQLKPEKDSDEAVTYSLGKFGQRALDFYSIHVTKESTHPVKPLAQIAGNRYASPVGKALSGACMGTIASFLSKYQDIIIEHQKVVKGNQKRLESLRELAGKENLEYPSVTLPPQPHTKEGVDAYNEVIARVRMWVNLNLWQKLKLSRDDAKPLLRLKGFPSFPLVERQANEVDWWDMVCNVKKLINEKKEDGKVFWQNLAGYKRQEALRPYLSSEEDRKKGKKFARYQLGDLLLHLEKKHGEDWGKVYDEAWERIDKKVEGLSKHIKLEEERRSEDAQSKAALTDWLRAKASFVIEGLKEADKDEFCRCELKLQKWYGDLRGKPFAIEAENSILDISGFSKQYNCAFIWQKDGVKKLNLYLIINYFKGGKLRFKKIKPEAFEANRFYTVINKKSGEIVPMEVNFNFDDPNLIILPLAFGKRQGREFIWNDLLSLETGSLKLANGRVIEKTLYNRRTRQDEPALFVALTFERREVLDSSNIKPMNLIGVDRGENIPAVIALTDPEGCPLSRFKDSLGNPTHILRIGESYKEKQRTIQAKKEVEQRRAGGYSRKYASKAKNLADDMVRNTARDLLYYAVTQDAMLIFENLSRGFGRQGKRTFMAERQYTRMEDWLTAKLAYEGLPSKTYLSKTLAQYTSKTCSNCGFTITSADYDRVLEKLKKTATGWMTTINGKELKVEGQITYYNRYKRQNVVKDLSVELDRLSEESVNNDISSWTKGRSGEALSLLKKRFSHRPVQEKFVCLNCGFETHADEQAALNIARSWLFLRSQEYKKYQTNKTTGNTDKRAFVETWQSFYRKKLKEVWKPAV

SEQ ID NO: 42138 - protein, 978 aa, synthetic construct
  REGION 1..978: note = engineered CasX variant
QEIKRINKIRRRLVKDSNTKKAGKTGPMKTLLVPVMTPDLRERLENLRKKPENIPQPISNTSRANLNKLLTDYTEMKKAILHVYWEEFQKDPVGLMSRVAQPASKKIDQNKLKPEMDEKGNLTTAGFACSQCGQPLFVYKLEQVSEKGKAYTNYFGRCNVAEHEKLILLAQLKPEKDSDEAVTYSLGKFGQRALDFYSIHVTKESTHPVKPLAQIAGNRYASYPVGKALSDACMGTIASFLSKYQDIIIEHQKVVKGNQKRLESLRELAGKENLEYPSVTLPPQPHTKEGVDAYNEVIARVRMWVNLNLWQKLKLSRDDAKPLLRLKNFPSFPLVERQANEVDWWDMVCNVKKLINEKKEDGKVFWQNLAGYKRQEALRPYLSSEEDRKKGKKFARYQLGDLLLHLEKKHGEDWGKVYDEAWERIDKKVEGLSKHIKLEEERRSEDAQSKAALTDWLRAKASFVIEGLKEADKDEFCRCELKLQKWYGDLRGKPFAIEAENSILDISGFSKQYNCAFIWQKDGVKKLNLYLIINYFKGGKLRFKKIKPEAFEANRFYTVINKKSGEIVPMEVNFNFDDPNLIILPLAFGKRQGREFIWNDLLSLETGSLKLANGRVIEKTLYNRRTRQDEPALFVALTFERREVLDSSNIKPMNLIGVDRGENIPAVIALTDPEGCPLSRFKDSLGNPTHILRIGESYKEKQRTIQAKKEVEQRRAGGYSRKYASKAKNLADDMVRNTARDLLYYAVTQDAMLIFENLSRGFGRQGKRTFMAERQYTRMEDWLTAKLAYEGLPSKTYLSKTLAQYTSKTCSNCGFTITSADYDRVLEKLKKTATGWMTTINGKELKVEGQITYYNRYKRQNVVKDLSVELDRLSEESVNNDISSWTKGRSGEALSLLKKRFSHRPVQEKFVCLNCGFETHADEQAALNIARSWLFLRSQEYKKYQTNKTTGNTDKRAFVETWQSFYRKKLKEVWKPAV

SEQ ID NO: 42139 - protein, 978 aa, synthetic construct
  REGION 1..978: note = engineered CasX variant
QEIKRINKIRRRLVKDSNTKKAGKTGPMKTLLVPVMTPDLRERLENLRKKPENIPQPISNTSRANLNKLLTDYTEMKKAILHVYWEEFQKDPVGLMSRVAQPASKKIDQNKLKPEMDEKGNLTTAGFACSQCGQPLFVYKLEQVSEKGKAYTNYFGRCNVAEHEKLILLAQLKPEKDSDEAVTYSLGKFGQRALDFYSIHVTKESTHPVKPLAQIAGNRYASHPVGKALSDACMGTIASFLSKYQDIIIEHQKVVKGNQKRLESLRELAGKENLEYPSVTLPPQPHTKEGVDAYNEVIARVRMWVNLNLWQKLKLSRDDAKPLLRLKNFPSFPLVERQANEVDWWDMVCNVKKLINEKKEDGKVFWQNLAGYKRQEALRPYLSSEEDRKKGKKFARYQLGDLLLHLEKKHGEDWGKVYDEAWERIDKKVEGLSKHIKLEEERRSEDAQSKAALTDWLRAKASFVIEGLKEADKDEFCRCELKLQKWYGDLRGKPFAIEAENSILDISGFSKQYNCAFIWQKDGVKKLNLYLIINYFKGGKLRFKKIKPEAFEANRFYTVINKKSGEIVPMEVNFNFDDPNLIILPLAFGKRQGREFIWNDLLSLETGSLKLANGRVIEKTLYNRRTRQDEPALFVALTFERREVLDSSNIKPMNLIGVDRGENIPAVIALTDPEGCPLSRFKDSLGNPTHILRIGESYKEKQRTIQAKKEVEQRRAGGYSRKYASKAKNLADDMVRNTARDLLYYAVTQDAMLIFENLSRGFGRQGKRTFMAERQYTRMEDWLTAKLAYEGLPSKTYLSKTLAQYTSKTCSNCGFTITSADYDRVLEKLKKTATGWMTTINGKELKVEGQITYYNRYKRQNVVKDLSVELDRLSEESVNNDISSWTKGRSGEALSLLKKRFSHRPVQEKFVCLNCGFETHADEQAALNIARSWLFLRSQEYKKYQTNKTTGNTDKRAFVETWQSFYRKKLKEVWKPAV

SEQ ID NO: 42140 - protein, 978 aa, synthetic construct
  REGION 1..978: note = engineered CasX variant
QEIKRINKIRRRLVKDSNTKKAGKTGPMKTLLVPVMTPDLRERLENLRKKPENIPQPISNTSRANLNKLLTDYTEMKKAILHVYWEEFQKDPVGLMSRVAQPASKKIDQNKLKPEMDEKGNLTTAGFACSQCGQPLFVYKLEQVSEKGKAYTNYFGRCNVAEHEKLILLAQLKPEKDSDEAVTYSLGKFGQRALDFYSIHVTKESTHPVKPLAQIAGNRYASSPVGKALSDACMGTIASFLSKYQDIIIEHQKVVKGNQKRLESLRELAGKENLEYPSVTLPPQPHTKEGVDAYNEVIARVRMWVNLNLWQKLKLSRDDAKPLLRLKNFPSFPLVERQANEVDWWDMVCNVKKLINEKKEDGKVFWQNLAGYKRQEALRPYLSSEEDRKKGKKFARYQLGDLLLHLEKKHGEDWGKVYDEAWERIDKKVEGLSKHIKLEEERRSEDAQSKAALTDWLRAKASFVIEGLKEADKDEFCRCELKLQKWYGDLRGKPFAIEAENSILDISGFSKQYNCAFIWQKDGVKKLNLYLIINYFKGGKLRFKKIKPEAFEANRFYTVINKKSGEIVPMEVNFNFDDPNLIILPLAFGKRQGREFIWNDLLSLETGSLKLANGRVIEKTLYNRRTRQDEPALFVALTFERREVLDSSNIKPMNLIGVDRGENIPAVIALTDPEGCPLSRFKDSLGNPTHILRIGESYKEKQRTIQAKKEVEQRRAGGYSRKYASKAKNLADDMVRNTARDLLYYAVTQDAMLIFENLSRGFGRQGKRTFMAERQYTRMEDWLTAKLAYEGLPSKTYLSKTLAQYTSKTCSNCGFTITSADYDRVLEKLKKTATGWMTTINGKELKVEGQITYYNRYKRQNVVKDLSVELDRLSEESVNNDISSWTKGRSGEALSLLKKRFSHRPVQEKFVCLNCGFETHADEQAALNIARSWLFLRSQEYKKYQTNKTTGNTDKRAFVETWQSFYRKKLKEVWKPAV

SEQ ID NO: 42141 - protein, 978 aa, synthetic construct
  REGION 1..978: note = engineered CasX variant
QEIKRINKIRRRLVKDSNTKKAGKTGPMKTLLVPVMTPDLRERLENLRKKPENIPQPISNTSRANLNKLLTDYTEMKKAILHVYWEEFQKDPVGLMSRVAQPASKKIDQNKLKPEMDEKGNLTTAGFACSQCGQPLFVYKLEQVSEKGKAYTNYFGRCNVAEHEKLILLAQLKPEKDSDEAVTYSLGKFGQRALDFYSIHVTKESTHPVKPLAQIAGNRYASTPVGKALSDACMGTIASFLSKYQDIIIEHQKVVKGNQKRLESLRELAGKENLEYPSVTLPPQPHTKEGVDAYNEVIARVRMWVNLNLWQKLKLSRDDAKPLLRLKNFPSFPLVERQANEVDWWDMVCNVKKLINEKKEDGKVFWQNLAGYKRQEALRPYLSSEEDRKKGKKFARYQLGDLLLHLEKKHGEDWGKVYDEAWERIDKKVEGLSKHIKLEEERRSEDAQSKAALTDWLRAKASFVIEGLKEADKDEFCRCELKLQKWYGDLRGKPFAIEAENSILDISGFSKQYNCAFIWQKDGVKKLNLYLIINYFKGGKLRFKKIKPEAFEANRFYTVINKKSGEIVPMEVNFNFDDPNLIILPLAFGKRQGREFIWNDLLSLETGSLKLANGRVIEKTLYNRRTRQDEPALFVALTFERREVLDSSNIKPMNLIGVDRGENIPAVIALTDPEGCPLSRFKDSLGNPTHILRIGESYKEKQRTIQAKKEVEQRRAGGYSRKYASKAKNLADDMVRNTARDLLYYAVTQDAMLIFENLSRGFGRQGKRTFMAERQYTRMEDWLTAKLAYEGLPSKTYLSKTLAQYTSKTCSNCGFTITSADYDRVLEKLKKTATGWMTTINGKELKVEGQITYYNRYKRQNVVKDLSVELDRLSEESVNNDISSWTKGRSGEALSLLKKRFSHRPVQEKFVCLNCGFETHADEQAALNIARSWLFLRSQEYKKYQTNKTTGNTDKRAFVETWQSFYRKKLKEVWKPAV

SEQ ID NO: 42142 - protein, 978 aa, synthetic construct
  REGION 1..978: note = engineered CasX variant
QEIKRINKIRRRLVKDSNTKKAGKTGPMKTLLVPVMTPDLRERLENLRKKPENIPQPISNTSRANLNKLLTDYTEMKKAILHVYWEEFQKDPVGLMSRVAQPASKKIDQNKLKPEMDEKGNLTTAGFACSQCGQPLFVYKLEQVSEKGKAYTNYFGRCNVAEHEKLILLAQLKPEKDSDEAVTYSLGKFGQRALDFYSIHVTKESTHPVKPLAQIAGNRYASAPVGKALSDACMGTIASFLSKYQDIIIEHQKVVKGNQKRLESLRELAGKENLEYPSVTLPPQPHTKEGVDAYNEVIARVRMWVNLNLWQKLKLSRDDAKPLLRLKNFPSFPLVERQANEVDWWDMVCNVKKLINEKKEDGKVFWQNLAGYKRQEALRPYLSSEEDRKKGKKFARYQLGDLLLHLEKKHGEDWGKVYDEAWERIDKKVEGLSKHIKLEEERRSEDAQSKAALTDWLRAKASFVIEGLKEADKDEFCRCELKLQKWYGDLRGKPFAIEAENSILDISGFSKQYNCAFIWQKDGVKKLNLYLIINYFKGGKLRFKKIKPEAFEANRFYTVINKKSGEIVPMEVNFNFDDPNLIILPLAFGKRQGREFIWNDLLSLETGSLKLANGRVIEKTLYNRRTRQDEPALFVALTFERREVLDSSNIKPMNLIGVDRGENIPAVIALTDPEGCPLSRFKDSLGNPTHILRIGESYKEKQRTIQAKKEVEQRRAGGYSRKYASKAKNLADDMVRNTARDLLYYAVTQDAMLIFENLSRGFGRQGKRTFMAERQYTRMEDWLTAKLAYEGLPSKTYLSKTLAQYTSKTCSNCGFTITSADYDRVLEKLKKTATGWMTTINGKELKVEGQITYYNRYKRQNVVKDLSVELDRLSEESVNNDISSWTKGRSGEALSLLKKRFSHRPVQEKFVCLNCGFETHADEQAALNIARSWLFLRSQEYKKYQTNKTTGNTDKRAFVETWQSFYRKKLKEVWKPAV

SEQ ID NO: 42143 - protein, 978 aa, synthetic construct
  REGION 1..978: note = engineered CasX variant
QEIKRINKIRRRLVKDSNTKKAGKTGPMKTLLVPVMTPDLRERLENLRKKPENIPQPISNTSRANLNKLLTDYTEMKKAILHVYWEEFQKDPVGLMSRVAQPASKKIDQNKLKPEMDEKGNLTTAGFACSQCGQPLFVYKLEQVSEKGKAYTNYFGRCNVAEHEKLILLAQLKPEKDSDEAVTYSLGKFGQRALDFYSIHVTKESTHPVKPLAQIAGNRYASVPVGKALSDACMGTIASFLSKYQDIIIEHQKVVKGNQKRLESLRELAGKENLEYPSVTLPPQPHTKEGVDAYNEVIARVRMWVNLNLWQKLKLSRDDAKPLLRLKNFPSFPLVERQANEVDWWDMVCNVKKLINEKKEDGKVFWQNLAGYKRQEALRPYLSSEEDRKKGKKFARYQLGDLLLHLEKKHGEDWGKVYDEAWERIDKKVEGLSKHIKLEEERRSEDAQSKAALTDWLRAKASFVIEGLKEADKDEFCRCELKLQKWYGDLRGKPFAIEAENSILDISGFSKQYNCAFIWQKDGVKKLNLYLIINYFKGGKLRFKKIKPEAFEANRFYTVINKKSGEIVPMEVNFNFDDPNLIILPLAFGKRQGREFIWNDLLSLETGSLKLANGRVIEKTLYNRRTRQDEPALFVALTFERREVLDSSNIKPMNLIGVDRGENIPAVIALTDPEGCPLSRFKDSLGNPTHILRIGESYKEKQRTIQAKKEVEQRRAGGYSRKYASKAKNLADDMVRNTARDLLYYAVTQDAMLIFENLSRGFGRQGKRTFMAERQYTRMEDWLTAKLAYEGLPSKTYLSKTLAQYTSKTCSNCGFTITSADYDRVLEKLKKTATGWMTTINGKELKVEGQITYYNRYKRQNVVKDLSVELDRLSEESVNNDISSWTKGRSGEALSLLKKRFSHRPVQEKFVCLNCGFETHADEQAALNIARSWLFLRSQEYKKYQTNKTTGNTDKRAFVETWQSFYRKKLKEVWKPAV

SEQ ID NO: 42144 - protein, 978 aa, synthetic construct
  REGION 1..978: note = engineered CasX variant
QEIKRINKIRRRLVKDSNTKKAGKTGPMKTLLVPVMTPDLRERLENLRKKPENIPQPISNTSRANLNKLLTDYTEMKKAILHVYWEEFQKDPVGLMSRVAQPASKKIDQNKLKPEMDEKGNLTTAGFACSQCGQPLFVYKLEQVSEKGKAYTNYFGRCNVAEHEKLIKLAQLKPEKDSDEAVTYSLGKFGQRALDFYSIHVTKESTHPVKPLAQIAGNRYASGPVGKALSDACMGTIASFLSKYQDIIIEHQKVVKGNQKRLESLRELAGKENLEYPSVTLPPQPHTKEGVDAYNEVIARVRMWVNLNLWQKLKLSRDDAKPLLRLKNFPSFPLVERQANEVDWWDMVCNVKKLINEKKEDGKVFWQNLAGYKRQEALRPYLSSEEDRKKGKKFARYQLGDLLLHLEKKHGEDWGKVYDEAWERIDKKVEGLSKHIKLEEERRSEDAQSKAALTDWLRAKASFVIEGLKEADKDEFCRCELKLQKWYGDLRGKPFAIEAENSILDISGFSKQYNCAFIWQKDGVKKLNLYLIINYFKGGKLRFKKIKPEAFEANRFYTVINKKSGEIVPMEVNFNFDDPNLIILPLAFGKRQGREFIWNDLLSLETGSLKLANGRVIEKTLYNRRTRQDEPALFVALTFERREVLDSSNIKPMNLIGVDRGENIPAVIALTDPEGCPLSRFKDSLGNPTHILRIGESYKEKQRTIQAKKEVEQRRAGGYSRKYASKAKNLADDMVRNTARDLLYYAVTQDAMLIFENLSRGFGRQGKRTFMAERQYTRMEDWLTAKLAYEGLPSKTYLSKTLAQYTSKTCSNCGFTITSADYDRVLEKLKKTATGWMTTINGKELKVEGQITYYNRYKRQNVVKDLSVELDRLSEESVNNDISSWTKGRSGEALSLLKKRFSHRPVQEKFVCLNCGFETHADEQAALNIARSWLFLRSQEYKKYQTNKTTGNTDKRAFVETWQSFYRKKLKEVWKPAV

SEQ ID NO: 42145 - protein, 977 aa, synthetic construct
  REGION 1..977: note = engineered CasX variant
QEIKRINKIRRRLVKDSNTKKAGKTGPMKTLLVPVMTPDLRERLENLRKKPENIPQPISNTSRANLNKLLTDYTEMKKAILHVYWEEFQKDPVGLMSRVAQPASKKIDQNKLKPEMDEKGNLTTAGFACSQCGQPLFVYKLEQVSEKGKAYTNYFGRCNVAEHEKLILLAQLKPEKDSDEAVTYSLGKFGQRALDFYSIHVTKESTHPVKPLAQIAGNRYASPVGKALSDACMGTIASFLSKYQDIIIEHQKVVKGNQKRLESLRELAGKENLEYPSVTLPPQPHTKEGVDAYNEVIARVRMWVNLNLWQKLKLSRDDAKPLLRLKNFPSFPLVERQANEVDWWDMVCNVKKLINEKKEDGKVFWQNLAGYKRQEALRPYLSSEEDRKKGKKFARYQLGDLLLHLEKKHGEDWGKVYDEAWERIDKKVEGLSKHIKLEEERRSEDAQSKAALTDWLRAKASFVIEGLKEADKDEFCRCELKLQKWYGDLRGKPFAIEAENSILDISGFSKQYNCAFIWQKDGVKKLNLYLIINYFKGGKLRFKKIKPEAFEANRFYTVINKKSGEIVPMEVNFNFDDPNLIILPLAFGKRQGREFIWNDLLSLETGSLKLANGRVIEKTLYNRRTRQDEPALFVALTFERREVLDSSNIKPMNLIGVDRGENIPAVIALTDPEGCPLSRFKDSLGNPTHILRIGESYKEKQRTIQAKKEVEQRRAGGYSRKYASKAKNLADDMVRNTARDLLYYAVTQDAMLIFENLSRGFGRQGKRTFMAERQYTRMEDWLTAKLAYEGLPSKTYLSKTLAQYTSKTCSNCGFTITSADYDRVLEKLKKTATGWMTTINGKELKVEGQITYYNRYKRQNVVKDLSVELDRLSEESVNNDISSWTKGRSGEALSLLKKRFSHRPVQEKFVCLNCGFETHADEQAALNIARSWLFLRSQEYKKYQTNKTTGNTDKRAFVETWQSFYRKKLKEVWKPAV

SEQ ID NO: 42146 - protein, 978 aa, synthetic construct
  REGION 1..978: note = engineered CasX variant
QEIKRINKIRRRLVKDSNTKKAGKTGPMKTLLVPVMTPDLRERLENLRKKPENIPQPISNTSRANLNKLLTDYTEMKKAILHVYWEEFQKDPVGLMSRVAQPASKKIDQNKLKPEMDEKGNLTTAGFACSQCGQPLFVYKLEQVSEKGKAYTNYFGRCNVAEHEKLILLAQLKPEKDSDEAVTYSLGKFGQRALDFYSIHVTKESTHPVKPLAQIAGNRYASYPVGKALSDACMGTIASFLSKYQDIIIEHQKVVKGNQKRLESLRELAGKENLEYPSVTLPPQPHTKEGVDAYNEVIARVRMWVNLNLWQKLKLSRDDAKPLLRLKGFPSFPLVERQANEVDWWDMVCNVKKLINEKKEDGKVFWQNLAGYKRQEALRPYLSSEEDRKKGKKFARYQLGDLLNHLEKKHGEDWGKVYDEAWERIDKKVEGLSKHIKLEEERRSEDAQSKAALTDWLRAKASFVIEGLKEADKDEFCRCELKLQKWYGDLRGKPFAIEAENSILDISGFSKQYNCAFIWQKDGVKKLNLYLIINYFKGGKLRFKKIKPEAFEANRFYTVINKKSGEIVPMEVNFNFDDPNLIILPLAFGKRQGREFIWNDLLSLETGSLKLANGRVIEKTLYNRRTRQDEPALFVALTFERREVLDSSNIKPMNLIGVDRGENIPAVIALTDPEGCPLSRFKDSLGNPTHILRIGESYKEKQRTIQAKKEVEQRRAGGYSRKYASKAKNLADDMVRNTARDLLYYAVTQDAMLIFENLSRGFGRQGKRTFMAERQYTRMEDWLTAKLAYEGLPSKTYLSKTLAQYTSKTCSNCGFTITSADYDRVLEKLKKTATGWMTTINGKELKVEGQITYYNRYKRQNVVKDLSVELDRLSEESVNNDISSWTKGRSGEALSLLKKRFSHRPVQEKFVCLNCGFETHADEQAALNIARSWLFLRSQEYKKYQTNKTTGNTDKRAFVETWQSFYRKKLKEVWKPAV

SEQ ID NO: 42147 - protein, 978 aa, synthetic construct
  REGION 1..978: note = engineered CasX variant
QEIKRINKIRRRLVKDSNTKKAGKTGPMKTLLVPVMTPDLRERLENLRKKPENIPQPISNTSRANLNKLLTDYTEMKKAILHVYWEEFQKDPVGLMSRVAQPASKKIDQNKLKPEMDEKGNLTTAGFACSQCGQPLFVYKLEQVSEKGKAYTNYFGRCNVAEHEKLILLAQLKPEKDSDEAVTYSLGKFGQRALDFYSIHVTKESTHPVKPLAQIAGNRYASHPVGKALSDACMGTIASFLSKYQDIIIEHQKVVKGNQKRLESLRELAGKENLEYPSVTLPPQPHTKEGVDAYNEVIARVRMWVNLNLWQKLKLSRDDAKPLLRLKGFPSFPLVERQANEVDWWDMVCNVKKLINEKKEDGKVFWQNLAGYKRQEALRPYLSSEEDRKKGKKFARYQLGDLLNHLEKKHGEDWGKVYDEAWERIDKKVEGLSKHIKLEEERRSEDAQSKAALTDWLRAKASFVIEGLKEADKDEFCRCELKLQKWYGDLRGKPFAIEAENSILDISGFSKQYNCAFIWQKDGVKKLNLYLIINYFKGGKLRFKKIKPEAFEANRFYTVINKKSGEIVPMEVNFNFDDPNLIILPLAFGKRQGREFIWNDLLSLETGSLKLANGRVIEKTLYNRRTRQDEPALFVALTFERREVLDSSNIKPMNLIGVDRGENIPAVIALTDPEGCPLSRFKDSLGNPTHILRIGESYKEKQRTIQAKKEVEQRRAGGYSRKYASKAKNLADDMVRNTARDLLYYAVTQDAMLIFENLSRGFGRQGKRTFMAERQYTRMEDWLTAKLAYEGLPSKTYLSKTLAQYTSKTCSNCGFTITSADYDRVLEKLKKTATGWMTTINGKELKVEGQITYYNRYKRQNVVKDLSVELDRLSEESVNNDISSWTKGRSGEALSLLKKRFSHRPVQEKFVCLNCGFETHADEQAALNIARSWLFLRSQEYKKYQTNKTTGNTDKRAFVETWQSFYRKKLKEVWKPAV

SEQ ID NO: 42148 - protein, 978 aa, synthetic construct
  REGION 1..978: note = engineered CasX variant
QEIKRINKIRRRLVKDSNTKKAGKTGPMKTLLVPVMTPDLRERLENLRKKPENIPQPISNTSRANLNKLLTDYTEMKKAILHVYWEEFQKDPVGLMSRVAQPASKKIDQNKLKPEMDEKGNLTTAGFACSQCGQPLFVYKLEQVSEKGKAYTNYFGRCNVAEHEKLILLAQLKPEKDSDEAVTYSLGKFGQRALDFYSIHVTKESTHPVKPLAQIAGNRYASSPVGKALSDACMGTIASFLSKYQDIIIEHQKVVKGNQKRLESLRELAGKENLEYPSVTLPPQPHTKEGVDAYNEVIARVRMWVNLNLWQKLKLSRDDAKPLLRLKGFPSFPLVERQANEVDWWDMVCNVKKLINEKKEDGKVFWQNLAGYKRQEALRPYLSSEEDRKKGKKFARYQLGDLLNHLEKKHGEDWGKVYDEAWERIDKKVEGLSKHIKLEEERRSEDAQSKAALTDWLRAKASFVIEGLKEADKDEFCRCELKLQKWYGDLRGKPFAIEAENSILDISGFSKQYNCAFIWQKDGVKKLNLYLIINYFKGGKLRFKKIKPEAFEANRFYTVINKKSGEIVPMEVNFNFDDPNLIILPLAFGKRQGREFIWNDLLSLETGSLKLANGRVIEKTLYNRRTRQDEPALFVALTFERREVLDSSNIKPMNLIGVDRGENIPAVIALTDPEGCPLSRFKDSLGNPTHILRIGESYKEKQRTIQAKKEVEQRRAGGYSRKYASKAKNLADDMVRNTARDLLYYAVTQDAMLIFENLSRGFGRQGKRTFMAERQYTRMEDWLTAKLAYEGLPSKTYLSKTLAQYTSKTCSNCGFTITSADYDRVLEKLKKTATGWMTTINGKELKVEGQITYYNRYKRQNVVKDLSVELDRLSEESVNNDISSWTKGRSGEALSLLKKRFSHRPVQEKFVCLNCGFETHADEQAALNIARSWLFLRSQEYKKYQTNKTTGNTDKRAFVETWQSFYRKKLKEVWKPAV

SEQ ID NO: 42149 - protein, 978 aa, synthetic construct
  REGION 1..978: note = engineered CasX variant
QEIKRINKIRRRLVKDSNTKKAGKTGPMKTLLVPVMTPDLRERLENLRKKPENIPQPISNTSRANLNKLLTDYTEMKKAILHVYWEEFQKDPVGLMSRVAQPASKKIDQNKLKPEMDEKGNLTTAGFACSQCGQPLFVYKLEQVSEKGKAYTNYFGRCNVAEHEKLILLAQLKPEKDSDEAVTYSLGKFGQRALDFYSIHVTKESTHPVKPLAQIAGNRYASTPVGKALSDACMGTIASFLSKYQDIIIEHQKVVKGNQKRLESLRELAGKENLEYPSVTLPPQPHTKEGVDAYNEVIARVRMWVNLNLWQKLKLSRDDAKPLLRLKGFPSFPLVERQANEVDWWDMVCNVKKLINEKKEDGKVFWQNLAGYKRQEALRPYLSSEEDRKKGKKFARYQLGDLLNHLEKKHGEDWGKVYDEAWERIDKKVEGLSKHIKLEEERRSEDAQSKAALTDWLRAKASFVIEGLKEADKDEFCRCELKLQKWYGDLRGKPFAIEAENSILDISGFSKQYNCAFIWQKDGVKKLNLYLIINYFKGGKLRFKKIKPEAFEANRFYTVINKKSGEIVPMEVNFNFDDPNLIILPLAFGKRQGREFIWNDLLSLETGSLKLANGRVIEKTLYNRRTRQDEPALFVALTFERREVLDSSNIKPMNLIGVDRGENIPAVIALTDPEGCPLSRFKDSLGNPTHILRIGESYKEKQRTIQAKKEVEQRRAGGYSRKYASKAKNLADDMVRNTARDLLYYAVTQDAMLIFENLSRGFGRQGKRTFMAERQYTRMEDWLTAKLAYEGLPSKTYLSKTLAQYTSKTCSNCGFTITSADYDRVLEKLKKTATGWMTTINGKELKVEGQITYYNRYKRQNVVKDLSVELDRLSEESVNNDISSWTKGRSGEALSLLKKRFSHRPVQEKFVCLNCGFETHADEQAALNIARSWLFLRSQEYKKYQTNKTTGNTDKRAFVETWQSFYRKKLKEVWKPAV

SEQ ID NO: 42150 - protein, 978 aa, synthetic construct
  REGION 1..978: note = engineered CasX variant
QEIKRINKIRRRLVKDSNTKKAGKTGPMKTLLVPVMTPDLRERLENLRKKPENIPQPISNTSRANLNKLLTDYTEMKKAILHVYWEEFQKDPVGLMSRVAQPASKKIDQNKLKPEMDEKGNLTTAGFACSQCGQPLFVYKLEQVSEKGKAYTNYFGRCNVAEHEKLILLAQLKPEKDSDEAVTYSLGKFGQRALDFYSIHVTKESTHPVKPLAQIAGNRYASAPVGKALSDACMGTIASFLSKYQDIIIEHQKVVKGNQKRLESLRELAGKENLEYPSVTLPPQPHTKEGVDAYNEVIARVRMWVNLNLWQKLKLSRDDAKPLLRLKGFPSFPLVERQANEVDWWDMVCNVKKLINEKKEDGKVFWQNLAGYKRQEALRPYLSSEEDRKKGKKFARYQLGDLLNHLEKKHGEDWGKVYDEAWERIDKKVEGLSKHIKLEEERRSEDAQSKAALTDWLRAKASFVIEGLKEADKDEFCRCELKLQKWYGDLRGKPFAIEAENSILDISGFSKQYNCAFIWQKDGVKKLNLYLIINYFKGGKLRFKKIKPEAFEANRFYTVINKKSGEIVPMEVNFNFDDPNLIILPLAFGKRQGREFIWNDLLSLETGSLKLANGRVIEKTLYNRRTRQDEPALFVALTFERREVLDSSNIKPMNLIGVDRGENIPAVIALTDPEGCPLSRFKDSLGNPTHILRIGESYKEKQRTIQAKKEVEQRRAGGYSRKYASKAKNLADDMVRNTARDLLYYAVTQDAMLIFENLSRGFGRQGKRTFMAERQYTRMEDWLTAKLAYEGLPSKTYLSKTLAQYTSKTCSNCGFTITSADYDRVLEKLKKTATGWMTTINGKELKVEGQITYYNRYKRQNVVKDLSVELDRLSEESVNNDISSWTKGRSGEALSLLKKRFSHRPVQEKFVCLNCGFETHADEQAALNIARSWLFLRSQEYKKYQTNKTTGNTDKRAFVETWQSFYRKKLKEVWKPAV

SEQ ID NO: 42151 - protein, 978 aa, synthetic construct
  REGION 1..978: note = engineered CasX variant
QEIKRINKIRRRLVKDSNTKKAGKTGPMKTLLVPVMTPDLRERLENLRKKPENIPQPISNTSRANLNKLLTDYTEMKKAILHVYWEEFQKDPVGLMSRVAQPASKKIDQNKLKPEMDEKGNLTTAGFACSQCGQPLFVYKLEQVSEKGKAYTNYFGRCNVAEHEKLILLAQLKPEKDSDEAVTYSLGKFGQRALDFYSIHVTKESTHPVKPLAQIAGNRYASVPVGKALSDACMGTIASFLSKYQDIIIEHQKVVKGNQKRLESLRELAGKENLEYPSVTLPPQPHTKEGVDAYNEVIARVRMWVNLNLWQKLKLSRDDAKPLLRLKGFPSFPLVERQANEVDWWDMVCNVKKLINEKKEDGKVFWQNLAGYKRQEALRPYLSSEEDRKKGKKFARYQLGDLLNHLEKKHGEDWGKVYDEAWERIDKKVEGLSKHIKLEEERRSEDAQSKAALTDWLRAKASFVIEGLKEADKDEFCRCELKLQKWYGDLRGKPFAIEAENSILDISGFSKQYNCAFIWQKDGVKKLNLYLIINYFKGGKLRFKKIKPEAFEANRFYTVINKKSGEIVPMEVNFNFDDPNLIILPLAFGKRQGREFIWNDLLSLETGSLKLANGRVIEKTLYNRRTRQDEPALFVALTFERREVLDSSNIKPMNLIGVDRGENIPAVIALTDPEGCPLSRFKDSLGNPTHILRIGESYKEKQRTIQAKKEVEQRRAGGYSRKYASKAKNLADDMVRNTARDLLYYAVTQDAMLIFENLSRGFGRQGKRTFMAERQYTRMEDWLTAKLAYEGLPSKTYLSKTLAQYTSKTCSNCGFTITSADYDRVLEKLKKTATGWMTTINGKELKVEGQITYYNRYKRQNVVKDLSVELDRLSEESVNNDISSWTKGRSGEALSLLKKRFSHRPVQEKFVCLNCGFETHADEQAALNIARSWLFLRSQEYKKYQTNKTTGNTDKRAFVETWQSFYRKKLKEVWKPAV

SEQ ID NO: 42152 - protein, 978 aa, synthetic construct
  REGION 1..978: note = engineered CasX variant
QEIKRINKIRRRLVKDSNTKKAGKTGPMKTLLVPVMTPDLRERLENLRKKPENIPQPISNTSRANLNKLLTDYTEMKKAILHVYWEEFQKDPVGLMSRVAQPASKKIDQNKLKPEMDEKGNLTTAGFACSQCGQPLFVYKLEQVSEKGKAYTNYFGRCNVAEHEKLIKLAQLKPEKDSDEAVTYSLGKFGQRALDFYSIHVTKESTHPVKPLAQIAGNRYASGPVGKALSDACMGTIASFLSKYQDIIIEHQKVVKGNQKRLESLRELAGKENLEYPSVTLPPQPHTKEGVDAYNEVIARVRMWVNLNLWQKLKLSRDDAKPLLRLKGFPSFPLVERQANEVDWWDMVCNVKKLINEKKEDGKVFWQNLAGYKRQEALRPYLSSEEDRKKGKKFARYQLGDLLNHLEKKHGEDWGKVYDEAWERIDKKVEGLSKHIKLEEERRSEDAQSKAALTDWLRAKASFVIEGLKEADKDEFCRCELKLQKWYGDLRGKPFAIEAENSILDISGFSKQYNCAFIWQKDGVKKLNLYLIINYFKGGKLRFKKIKPEAFEANRFYTVINKKSGEIVPMEVNFNFDDPNLIILPLAFGKRQGREFIWNDLLSLETGSLKLANGRVIEKTLYNRRTRQDEPALFVALTFERREVLDSSNIKPMNLIGVDRGENIPAVIALTDPEGCPLSRFKDSLGNPTHILRIGESYKEKQRTIQAKKEVEQRRAGGYSRKYASKAKNLADDMVRNTARDLLYYAVTQDAMLIFENLSRGFGRQGKRTFMAERQYTRMEDWLTAKLAYEGLPSKTYLSKTLAQYTSKTCSNCGFTITSADYDRVLEKLKKTATGWMTTINGKELKVEGQITYYNRYKRQNVVKDLSVELDRLSEESVNNDISSWTKGRSGEALSLLKKRFSHRPVQEKFVCLNCGFETHADEQAALNIARSWLFLRSQEYKKYQTNKTTGNTDKRAFVETWQSFYRKKLKEVWKPAV

SEQ ID NO: 42153 - protein, 977 aa, synthetic construct
  REGION 1..977: note = engineered CasX variant
QEIKRINKIRRRLVKDSNTKKAGKTGPMKTLLVPVMTPDLRERLENLRKKPENIPQPISNTSRANLNKLLTDYTEMKKAILHVYWEEFQKDPVGLMSRVAQPASKKIDQNKLKPEMDEKGNLTTAGFACSQCGQPLFVYKLEQVSEKGKAYTNYFGRCNVAEHEKLILLAQLKPEKDSDEAVTYSLGKFGQRALDFYSIHVTKESTHPVKPLAQIAGNRYASPVGKALSDACMGTIASFLSKYQDIIIEHQKVVKGNQKRLESLRELAGKENLEYPSVTLPPQPHTKEGVDAYNEVIARVRMWVNLNLWQKLKLSRDDAKPLLRLKGFPSFPLVERQANEVDWWDMVCNVKKLINEKKEDGKVFWQNLAGYKRQEALRPYLSSEEDRKKGKKFARYQLGDLLNHLEKKHGEDWGKVYDEAWERIDKKVEGLSKHIKLEEERRSEDAQSKAALTDWLRAKASFVIEGLKEADKDEFCRCELKLQKWYGDLRGKPFAIEAENSILDISGFSKQYNCAFIWQKDGVKKLNLYLIINYFKGGKLRFKKIKPEAFEANRFYTVINKKSGEIVPMEVNFNFDDPNLIILPLAFGKRQGREFIWNDLLSLETGSLKLANGRVIEKTLYNRRTRQDEPALFVALTFERREVLDSSNIKPMNLIGVDRGENIPAVIALTDPEGCPLSRFKDSLGNPTHILRIGESYKEKQRTIQAKKEVEQRRAGGYSRKYASKAKNLADDMVRNTARDLLYYAVTQDAMLIFENLSRGFGRQGKRTFMAERQYTRMEDWLTAKLAYEGLPSKTYLSKTLAQYTSKTCSNCGFTITSADYDRVLEKLKKTATGWMTTINGKELKVEGQITYYNRYKRQNVVKDLSVELDRLSEESVNNDISSWTKGRSGEALSLLKKRFSHRPVQEKFVCLNCGFETHADEQAALNIARSWLFLRSQEYKKYQTNKTTGNTDKRAFVETWQSFYRKKLKEVWKPAV

SEQ ID NO: 42154 - protein, 978 aa, synthetic construct
  REGION 1..978: note = engineered CasX variant
QEIKRINKIRRRLVKDSNTKKAGKTGPMKTLLVPVMTPDLRERLENLRKKPENIPQPISNTSRANLNKLLTDYTEMKKAILHVYWEEFQKDPVGLMSRVAQPASKKIDQNKLKPEMDEKGNLTTAGFACSQCGQPLFVYKLEQVSEKGKAYTNYFGRCNVAEHEKLILLAQLKPEKDSDEAVTYSLGKFGQRALDFYSIHVTKESTHPVKPLAQIAGNRYASYPVGKALSDACMGTIASFLSKYQDIIIEHQKVVKGNQKRLESLRELAGKENLEYPSVTLPPQPHTKEGVDAYNEVIARVRMWVNLNLWQKLKLSRDDAKPLLRLKGFPSFPLVERQANEVDWWDMVCNVKKLINEKKEDGKVFWQNLAGYKRQEALRPYLSSEEDRKKGKKFARYQLGDLLWHLEKKHGEDWGKVYDEAWERIDKKVEGLSKHIKLEEERRSEDAQSKAALTDWLRAKASFVIEGLKEADKDEFCRCELKLQKWYGDLRGKPFAIEAENSILDISGFSKQYNCAFIWQKDGVKKLNLYLIINYFKGGKLRFKKIKPEAFEANRFYTVINKKSGEIVPMEVNFNFDDPNLIILPLAFGKRQGREFIWNDLLSLETGSLKLANGRVIEKTLYNRRTRQDEPALFVALTFERREVLDSSNIKPMNLIGVDRGENIPAVIALTDPEGCPLSRFKDSLGNPTHILRIGESYKEKQRTIQAKKEVEQRRAGGYSRKYASKAKNLADDMVRNTARDLLYYAVTQDAMLIFENLSRGFGRQGKRTFMAERQYTRMEDWLTAKLAYEGLPSKTYLSKTLAQYTSKTCSNCGFTITSADYDRVLEKLKKTATGWMTTINGKELKVEGQITYYNRYKRQNVVKDLSVELDRLSEESVNNDISSWTKGRSGEALSLLKKRFSHRPVQEKFVCLNCGFETHADEQAALNIARSWLFLRSQEYKKYQTNKTTGNTDKRAFVETWQSFYRKKLKEVWKPAV

SEQ ID NO: 42155 - protein, 978 aa, synthetic construct
  REGION 1..978: note = engineered CasX variant
QEIKRINKIRRRLVKDSNTKKAGKTGPMKTLLVPVMTPDLRERLENLRKKPENIPQPISNTSRANLNKLLTDYTEMKKAILHVYWEEFQKDPVGLMSRVAQPASKKIDQNKLKPEMDEKGNLTTAGFACSQCGQPLFVYKLEQVSEKGKAYTNYFGRCNVAEHEKLILLAQLKPEKDSDEAVTYSLGKFGQRALDFYSIHVTKESTHPVKPLAQIAGNRYASHPVGKALSDACMGTIASFLSKYQDIIIEHQKVVKGNQKRLESLRELAGKENLEYPSVTLPPQPHTKEGVDAYNEVIARVRMWVNLNLWQKLKLSRDDAKPLLRLKGFPSFPLVERQANEVDWWDMVCNVKKLINEKKEDGKVFWQNLAGYKRQEALRPYLSSEEDRKKGKKFARYQLGDLLWHLEKKHGEDWGKVYDEAWERIDKKVEGLSKHIKLEEERRSEDAQSKAALTDWLRAKASFVIEGLKEADKDEFCRCELKLQKWYGDLRGKPFAIEAENSILDISGFSKQYNCAFIWQKDGVKKLNLYLIINYFKGGKLRFKKIKPEAFEANRFYTVINKKSGEIVPMEVNFNFDDPNLIILPLAFGKRQGREFIWNDLLSLETGSLKLANGRVIEKTLYNRRTRQDEPALFVALTFERREVLDSSNIKPMNLIGVDRGENIPAVIALTDPEGCPLSRFKDSLGNPTHILRIGESYKEKQRTIQAKKEVEQRRAGGYSRKYASKAKNLADDMVRNTARDLLYYAVTQDAMLIFENLSRGFGRQGKRTFMAERQYTRMEDWLTAKLAYEGLPSKTYLSKTLAQYTSKTCSNCGFTITSADYDRVLEKLKKTATGWMTTINGKELKVEGQITYYNRYKRQNVVKDLSVELDRLSEESVNNDISSWTKGRSGEALSLLKKRFSHRPVQEKFVCLNCGFETHADEQAALNIARSWLFLRSQEYKKYQTNKTTGNTDKRAFVETWQSFYRKKLKEVWKPAV

SEQ ID NO: 42156 - protein, 978 aa, synthetic construct
  REGION 1..978: note = engineered CasX variant
QEIKRINKIRRRLVKDSNTKKAGKTGPMKTLLVPVMTPDLRERLENLRKKPENIPQPISNTSRANLNKLLTDYTEMKKAILHVYWEEFQKDPVGLMSRVAQPASKKIDQNKLKPEMDEKGNLTTAGFACSQCGQPLFVYKLEQVSEKGKAYTNYFGRCNVAEHEKLILLAQLKPEKDSDEAVTYSLGKFGQRALDFYSIHVTKESTHPVKPLAQIAGNRYASSPVGKALSDACMGTIASFLSKYQDIIIEHQKVVKGNQKRLESLRELAGKENLEYPSVTLPPQPHTKEGVDAYNEVIARVRMWVNLNLWQKLKLSRDDAKPLLRLKGFPSFPLVERQANEVDWWDMVCNVKKLINEKKEDGKVFWQNLAGYKRQEALRPYLSSEEDRKKGKKFARYQLGDLLWHLEKKHGEDWGKVYDEAWERIDKKVEGLSKHIKLEEERRSEDAQSKAALTDWLRAKASFVIEGLKEADKDEFCRCELKLQKWYGDLRGKPFAIEAENSILDISGFSKQYNCAFIWQKDGVKKLNLYLIINYFKGGKLRFKKIKPEAFEANRFYTVINKKSGEIVPMEVNFNFDDPNLIILPLAFGKRQGREFIWNDLLSLETGSLKLANGRVIEKTLYNRRTRQDEPALFVALTFERREVLDSSNIKPMNLIGVDRGENIPAVIALTDPEGCPLSRFKDSLGNPTHILRIGESYKEKQRTIQAKKEVEQRRAGGYSRKYASKAKNLADDMVRNTARDLLYYAVTQDAMLIFENLSRGFGRQGKRTFMAERQYTRMEDWLTAKLAYEGLPSKTYLSKTLAQYTSKTCSNCGFTITSADYDRVLEKLKKTATGWMTTINGKELKVEGQITYYNRYKRQNVVKDLSVELDRLSEESVNNDISSWTKGRSGEALSLLKKRFSHRPVQEKFVCLNCGFETHADEQAALNIARSWLFLRSQEYKKYQTNKTTGNTDKRAFVETWQSFYRKKLKEVWKPAV

SEQ ID NO: 42157 - protein, 978 aa, synthetic construct
  REGION 1..978: note = engineered CasX variant
QEIKRINKIRRRLVKDSNTKKAGKTGPMKTLLVPVMTPDLRERLENLRKKPENIPQPISNTSRANLNKLLTDYTEMKKAILHVYWEEFQKDPVGLMSRVAQPASKKIDQNKLKPEMDEKGNLTTAGFACSQCGQPLFVYKLEQVSEKGKAYTNYFGRCNVAEHEKLILLAQLKPEKDSDEAVTYSLGKFGQRALDFYSIHVTKESTHPVKPLAQIAGNRYASTPVGKALSDACMGTIASFLSKYQDIIIEHQKVVKGNQKRLESLRELAGKENLEYPSVTLPPQPHTKEGVDAYNEVIARVRMWVNLNLWQKLKLSRDDAKPLLRLKGFPSFPLVERQANEVDWWDMVCNVKKLINEKKEDGKVFWQNLAGYKRQEALRPYLSSEEDRKKGKKFARYQLGDLLWHLEKKHGEDWGKVYDEAWERIDKKVEGLSKHIKLEEERRSEDAQSKAALTDWLRAKASFVIEGLKEADKDEFCRCELKLQKWYGDLRGKPFAIEAENSILDISGFSKQYNCAFIWQKDGVKKLNLYLIINYFKGGKLRFKKIKPEAFEANRFYTVINKKSGEIVPMEVNFNFDDPNLIILPLAFGKRQGREFIWNDLLSLETGSLKLANGRVIEKTLYNRRTRQDEPALFVALTFERREVLDSSNIKPMNLIGVDRGENIPAVIALTDPEGCPLSRFKDSLGNPTHILRIGESYKEKQRTIQAKKEVEQRRAGGYSRKYASKAKNLADDMVRNTARDLLYYAVTQDAMLIFENLSRGFGRQGKRTFMAERQYTRMEDWLTAKLAYEGLPSKTYLSKTLAQYTSKTCSNCGFTITSADYDRVLEKLKKTATGWMTTINGKELKVEGQITYYNRYKRQNVVKDLSVELDRLSEESVNNDISSWTKGRSGEALSLLKKRFSHRPVQEKFVCLNCGFETHADEQAALNIARSWLFLRSQEYKKYQTNKTTGNTDKRAFVETWQSFYRKKLKEVWKPAV

SEQ ID NO: 42158 - protein, 978 aa, synthetic construct
  REGION 1..978: note = engineered CasX variant
QEIKRINKIRRRLVKDSNTKKAGKTGPMKTLLVPVMTPDLRERLENLRKKPENIPQPISNTSRANLNKLLTDYTEMKKAILHVYWEEFQKDPVGLMSRVAQPASKKIDQNKLKPEMDEKGNLTTAGFACSQCGQPLFVYKLEQVSEKGKAYTNYFGRCNVAEHEKLILLAQLKPEKDSDEAVTYSLGKFGQRALDFYSIHVTKESTHPVKPLAQIAGNRYASAPVGKALSDACMGTIASFLSKYQDIIIEHQKVVKGNQKRLESLRELAGKENLEYPSVTLPPQPHTKEGVDAYNEVIARVRMWVNLNLWQKLKLSRDDAKPLLRLKGFPSFPLVERQANEVDWWDMVCNVKKLINEKKEDGKVFWQNLAGYKRQEALRPYLSSEEDRKKGKKFARYQLGDLLWHLEKKHGEDWGKVYDEAWERIDKKVEGLSKHIKLEEERRSEDAQSKAALTDWLRAKASFVIEGLKEADKDEFCRCELKLQKWYGDLRGKPFAIEAENSILDISGFSKQYNCAFIWQKDGVKKLNLYLIINYFKGGKLRFKKIKPEAFEANRFYTVINKKSGEIVPMEVNFNFDDPNLIILPLAFGKRQGREFIWNDLLSLETGSLKLANGRVIEKTLYNRRTRQDEPALFVALTFERREVLDSSNIKPMNLIGVDRGENIPAVIALTDPEGCPLSRFKDSLGNPTHILRIGESYKEKQRTIQAKKEVEQRRAGGYSRKYASKAKNLADDMVRNTARDLLYYAVTQDAMLIFENLSRGFGRQGKRTFMAERQYTRMEDWLTAKLAYEGLPSKTYLSKTLAQYTSKTCSNCGFTITSADYDRVLEKLKKTATGWMTTINGKELKVEGQITYYNRYKRQNVVKDLSVELDRLSEESVNNDISSWTKGRSGEALSLLKKRFSHRPVQEKFVCLNCGFETHADEQAALNIARSWLFLRSQEYKKYQTNKTTGNTDKRAFVETWQSFYRKKLKEVWKPAV

SEQ ID NO: 42159 - protein, 978 aa, synthetic construct
  REGION 1..978: note = engineered CasX variant
QEIKRINKIRRRLVKDSNTKKAGKTGPMKTLLVPVMTPDLRERLENLRKKPENIPQPISNTSRANLNKLLTDYTEMKKAILHVYWEEFQKDPVGLMSRVAQPASKKIDQNKLKPEMDEKGNLTTAGFACSQCGQPLFVYKLEQVSEKGKAYTNYFGRCNVAEHEKLILLAQLKPEKDSDEAVTYSLGKFGQRALDFYSIHVTKESTHPVKPLAQIAGNRYASVPVGKALSDACMGTIASFLSKYQDIIIEHQKVVKGNQKRLESLRELAGKENLEYPSVTLPPQPHTKEGVDAYNEVIARVRMWVNLNLWQKLKLSRDDAKPLLRLKGFPSFPLVERQANEVDWWDMVCNVKKLINEKKEDGKVFWQNLAGYKRQEALRPYLSSEEDRKKGKKFARYQLGDLLWHLEKKHGEDWGKVYDEAWERIDKKVEGLSKHIKLEEERRSEDAQSKAALTDWLRAKASFVIEGLKEADKDEFCRCELKLQKWYGDLRGKPFAIEAENSILDISGFSKQYNCAFIWQKDGVKKLNLYLIINYFKGGKLRFKKIKPEAFEANRFYTVINKKSGEIVPMEVNFNFDDPNLIILPLAFGKRQGREFIWNDLLSLETGSLKLANGRVIEKTLYNRRTRQDEPALFVALTFERREVLDSSNIKPMNLIGVDRGENIPAVIALTDPEGCPLSRFKDSLGNPTHILRIGESYKEKQRTIQAKKEVEQRRAGGYSRKYASKAKNLADDMVRNTARDLLYYAVTQDAMLIFENLSRGFGRQGKRTFMAERQYTRMEDWLTAKLAYEGLPSKTYLSKTLAQYTSKTCSNCGFTITSADYDRVLEKLKKTATGWMTTINGKELKVEGQITYYNRYKRQNVVKDLSVELDRLSEESVNNDISSWTKGRSGEALSLLKKRFSHRPVQEKFVCLNCGFETHADEQAALNIARSWLFLRSQEYKKYQTNKTTGNTDKRAFVETWQSFYRKKLKEVWKPAV

SEQ ID NO: 42160 - protein, 978 aa, synthetic construct
  REGION 1..978: note = engineered CasX variant
QEIKRINKIRRRLVKDSNTKKAGKTGPMKTLLVPVMTPDLRERLENLRKKPENIPQPISNTSRANLNKLLTDYTEMKKAILHVYWEEFQKDPVGLMSRVAQPASKKIDQNKLKPEMDEKGNLTTAGFACSQCGQPLFVYKLEQVSEKGKAYTNYFGRCNVAEHEKLIKLAQLKPEKDSDEAVTYSLGKFGQRALDFYSIHVTKESTHPVKPLAQIAGNRYASGPVGKALSDACMGTIASFLSKYQDIIIEHQKVVKGNQKRLESLRELAGKENLEYPSVTLPPQPHTKEGVDAYNEVIARVRMWVNLNLWQKLKLSRDDAKPLLRLKGFPSFPLVERQANEVDWWDMVCNVKKLINEKKEDGKVFWQNLAGYKRQEALRPYLSSEEDRKKGKKFARYQLGDLLWHLEKKHGEDWGKVYDEAWERIDKKVEGLSKHIKLEEERRSEDAQSKAALTDWLRAKASFVIEGLKEADKDEFCRCELKLQKWYGDLRGKPFAIEAENSILDISGFSKQYNCAFIWQKDGVKKLNLYLIINYFKGGKLRFKKIKPEAFEANRFYTVINKKSGEIVPMEVNFNFDDPNLIILPLAFGKRQGREFIWNDLLSLETGSLKLANGRVIEKTLYNRRTRQDEPALFVALTFERREVLDSSNIKPMNLIGVDRGENIPAVIALTDPEGCPLSRFKDSLGNPTHILRIGESYKEKQRTIQAKKEVEQRRAGGYSRKYASKAKNLADDMVRNTARDLLYYAVTQDAMLIFENLSRGFGRQGKRTFMAERQYTRMEDWLTAKLAYEGLPSKTYLSKTLAQYTSKTCSNCGFTITSADYDRVLEKLKKTATGWMTTINGKELKVEGQITYYNRYKRQNVVKDLSVELDRLSEESVNNDISSWTKGRSGEALSLLKKRFSHRPVQEKFVCLNCGFETHADEQAALNIARSWLFLRSQEYKKYQTNKTTGNTDKRAFVETWQSFYRKKLKEVWKPAV

SEQ ID NO: 42161 - protein, 977 aa, synthetic construct
  REGION 1..977: note = engineered CasX variant
QEIKRINKIRRRLVKDSNTKKAGKTGPMKTLLVPVMTPDLRERLENLRKKPENIPQPISNTSRANLNKLLTDYTEMKKAILHVYWEEFQKDPVGLMSRVAQPASKKIDQNKLKPEMDEKGNLTTAGFACSQCGQPLFVYKLEQVSEKGKAYTNYFGRCNVAEHEKLILLAQLKPEKDSDEAVTYSLGKFGQRALDFYSIHVTKESTHPVKPLAQIAGNRYASPVGKALSDACMGTIASFLSKYQDIIIEHQKVVKGNQKRLESLRELAGKENLEYPSVTLPPQPHTKEGVDAYNEVIARVRMWVNLNLWQKLKLSRDDAKPLLRLKGFPSFPLVERQANEVDWWDMVCNVKKLINEKKEDGKVFWQNLAGYKRQEALRPYLSSEEDRKKGKKFARYQLGDLLWHLEKKHGEDWGKVYDEAWERIDKKVEGLSKHIKLEEERRSEDAQSKAALTDWLRAKASFVIEGLKEADKDEFCRCELKLQKWYGDLRGKPFAIEAENSILDISGFSKQYNCAFIWQKDGVKKLNLYLIINYFKGGKLRFKKIKPEAFEANRFYTVINKKSGEIVPMEVNFNFDDPNLIILPLAFGKRQGREFIWNDLLSLETGSLKLANGRVIEKTLYNRRTRQDEPALFVALTFERREVLDSSNIKPMNLIGVDRGENIPAVIALTDPEGCPLSRFKDSLGNPTHILRIGESYKEKQRTIQAKKEVEQRRAGGYSRKYASKAKNLADDMVRNTARDLLYYAVTQDAMLIFENLSRGFGRQGKRTFMAERQYTRMEDWLTAKLAYEGLPSKTYLSKTLAQYTSKTCSNCGFTITSADYDRVLEKLKKTATGWMTTINGKELKVEGQITYYNRYKRQNVVKDLSVELDRLSEESVNNDISSWTKGRSGEALSLLKKRFSHRPVQEKFVCLNCGFETHADEQAALNIARSWLFLRSQEYKKYQTNKTTGNTDKRAFVETWQSFYRKKLKEVWKPAV

SEQ ID NO: 42162 - protein, 978 aa, synthetic construct
  REGION 1..978: note = engineered CasX variant
QEIKRINKIRRRLVKDSNTKKAGKTGPMKTLLVPVMTPDLRERLENLRKKPENIPQPISNTSRANLNKLLTDYTEMKKAILHVYWEEFQKDPVGLMSRVAQPASKKIDQNKLKPEMDEKGNLTTAGFACSQCGQPLFVYKLEQVSEKGKAYTNYFGRCNVAEHEKLILLAQLKPEKDSDEAVTYSLGKFGQRALDFYSIHVTKESTHPVKPLAQIAGNRYASYPVGKALSDACMGTIASFLSKYQDIIIEHQKVVKGNQKRLESLRELAGKENLEYPSVTLPPQPHTKEGVDAYNEVIARVRMWVNLNLWQKLKLSRDDAKPLLRLKGFPSFPLVERQANEVDWWDMVCNVKKLINEKKEDGKVFWQNLAGYKRQEALRPYLSSEEDRKKGKKFARYQLGDLLLHLYKKHGEDWGKVYDEAWERIDKKVEGLSKHIKLEEERRSEDAQSKAALTDWLRAKASFVIEGLKEADKDEFCRCELKLQKWYGDLRGKPFAIEAENSILDISGFSKQYNCAFIWQKDGVKKLNLYLIINYFKGGKLRFKKIKPEAFEANRFYTVINKKSGEIVPMEVNFNFDDPNLIILPLAFGKRQGREFIWNDLLSLETGSLKLANGRVIEKTLYNRRTRQDEPALFVALTFERREVLDSSNIKPMNLIGVDRGENIPAVIALTDPEGCPLSRFKDSLGNPTHILRIGESYKEKQRTIQAKKEVEQRRAGGYSRKYASKAKNLADDMVRNTARDLLYYAVTQDAMLIFENLSRGFGRQGKRTFMAERQYTRMEDWLTAKLAYEGLPSKTYLSKTLAQYTSKTCSNCGFTITSADYDRVLEKLKKTATGWMTTINGKELKVEGQITYYNRYKRQNVVKDLSVELDRLSEESVNNDISSWTKGRSGEALSLLKKRFSHRPVQEKFVCLNCGFETHADEQAALNIARSWLFLRSQEYKKYQTNKTTGNTDKRAFVETWQSFYRKKLKEVWKPAV

SEQ ID NO: 42163 - protein, 978 aa, synthetic construct
  REGION 1..978: note = engineered CasX variant
QEIKRINKIRRRLVKDSNTKKAGKTGPMKTLLVPVMTPDLRERLENLRKKPENIPQPISNTSRANLNKLLTDYTEMKKAILHVYWEEFQKDPVGLMSRVAQPASKKIDQNKLKPEMDEKGNLTTAGFACSQCGQPLFVYKLEQVSEKGKAYTNYFGRCNVAEHEKLILLAQLKPEKDSDEAVTYSLGKFGQRALDFYSIHVTKESTHPVKPLAQIAGNRYASHPVGKALSDACMGTIASFLSKYQDIIIEHQKVVKGNQKRLESLRELAGKENLEYPSVTLPPQPHTKEGVDAYNEVIARVRMWVNLNLWQKLKLSRDDAKPLLRLKGFPSFPLVERQANEVDWWDMVCNVKKLINEKKEDGKVFWQNLAGYKRQEALRPYLSSEEDRKKGKKFARYQLGDLLLHLYKKHGEDWGKVYDEAWERIDKKVEGLSKHIKLEEERRSEDAQSKAALTDWLRAKASFVIEGLKEADKDEFCRCELKLQKWYGDLRGKPFAIEAENSILDISGFSKQYNCAFIWQKDGVKKLNLYLIINYFKGGKLRFKKIKPEAFEANRFYTVINKKSGEIVPMEVNFNFDDPNLIILPLAFGKRQGREFIWNDLLSLETGSLKLANGRVIEKTLYNRRTRQDEPALFVALTFERREVLDSSNIKPMNLIGVDRGENIPAVIALTDPEGCPLSRFKDSLGNPTHILRIGESYKEKQRTIQAKKEVEQRRAGGYSRKYASKAKNLADDMVRNTARDLLYYAVTQDAMLIFENLSRGFGRQGKRTFMAERQYTRMEDWLTAKLAYEGLPSKTYLSKTLAQYTSKTCSNCGFTITSADYDRVLEKLKKTATGWMTTINGKELKVEGQITYYNRYKRQNVVKDLSVELDRLSEESVNNDISSWTKGRSGEALSLLKKRFSHRPVQEKFVCLNCGFETHADEQAALNIARSWLFLRSQEYKKYQTNKTTGNTDKRAFVETWQSFYRKKLKEVWKPAV

SEQ ID NO: 42164 - protein, 978 aa, synthetic construct
  REGION 1..978: note = engineered CasX variant
QEIKRINKIRRRLVKDSNTKKAGKTGPMKTLLVPVMTPDLRERLENLRKKPENIPQPISNTSRANLNKLLTDYTEMKKAILHVYWEEFQKDPVGLMSRVAQPASKKIDQNKLKPEMDEKGNLTTAGFACSQCGQPLFVYKLEQVSEKGKAYTNYFGRCNVAEHEKLILLAQLKPEKDSDEAVTYSLGKFGQRALDFYSIHVTKESTHPVKPLAQIAGNRYASSPVGKALSDACMGTIASFLSKYQDIIIEHQKVVKGNQKRLESLRELAGKENLEYPSVTLPPQPHTKEGVDAYNEVIARVRMWVNLNLWQKLKLSRDDAKPLLRLKGFPSFPLVERQANEVDWWDMVCNVKKLINEKKEDGKVFWQNLAGYKRQEALRPYLSSEEDRKKGKKFARYQLGDLLLHLYKKHGEDWGKVYDEAWERIDKKVEGLSKHIKLEEERRSEDAQSKAALTDWLRAKASFVIEGLKEADKDEFCRCELKLQKWYGDLRGKPFAIEAENSILDISGFSKQYNCAFIWQKDGVKKLNLYLIINYFKGGKLRFKKIKPEAFEANRFYTVINKKSGEIVPMEVNFNFDDPNLIILPLAFGKRQGREFIWNDLLSLETGSLKLANGRVIEKTLYNRRTRQDEPALFVALTFERREVLDSSNIKPMNLIGVDRGENIPAVIALTDPEGCPLSRFKDSLGNPTHILRIGESYKEKQRTIQAKKEVEQRRAGGYSRKYASKAKNLADDMVRNTARDLLYYAVTQDAMLIFENLSRGFGRQGKRTFMAERQYTRMEDWLTAKLAYEGLPSKTYLSKTLAQYTSKTCSNCGFTITSADYDRVLEKLKKTATGWMTTINGKELKVEGQITYYNRYKRQNVVKDLSVELDRLSEESVNNDISSWTKGRSGEALSLLKKRFSHRPVQEKFVCLNCGFETHADEQAALNIARSWLFLRSQEYKKYQTNKTTGNTDKRAFVETWQSFYRKKLKEVWKPAV

SEQ ID NO: 42165 - protein, 978 aa, synthetic construct
  REGION 1..978: note = engineered CasX variant
QEIKRINKIRRRLVKDSNTKKAGKTGPMKTLLVPVMTPDLRERLENLRKKPENIPQPISNTSRANLNKLLTDYTEMKKAILHVYWEEFQKDPVGLMSRVAQPASKKIDQNKLKPEMDEKGNLTTAGFACSQCGQPLFVYKLEQVSEKGKAYTNYFGRCNVAEHEKLILLAQLKPEKDSDEAVTYSLGKFGQRALDFYSIHVTKESTHPVKPLAQIAGNRYASTPVGKALSDACMGTIASFLSKYQDIIIEHQKVVKGNQKRLESLRELAGKENLEYPSVTLPPQPHTKEGVDAYNEVIARVRMWVNLNLWQKLKLSRDDAKPLLRLKGFPSFPLVERQANEVDWWDMVCNVKKLINEKKEDGKVFWQNLAGYKRQEALRPYLSSEEDRKKGKKFARYQLGDLLLHLYKKHGEDWGKVYDEAWERIDKKVEGLSKHIKLEEERRSEDAQSKAALTDWLRAKASFVIEGLKEADKDEFCRCELKLQKWYGDLRGKPFAIEAENSILDISGFSKQYNCAFIWQKDGVKKLNLYLIINYFKGGKLRFKKIKPEAFEANRFYTVINKKSGEIVPMEVNFNFDDPNLIILPLAFGKRQGREFIWNDLLSLETGSLKLANGRVIEKTLYNRRTRQDEPALFVALTFERREVLDSSNIKPMNLIGVDRGENIPAVIALTDPEGCPLSRFKDSLGNPTHILRIGESYKEKQRTIQAKKEVEQRRAGGYSRKYASKAKNLADDMVRNTARDLLYYAVTQDAMLIFENLSRGFGRQGKRTFMAERQYTRMEDWLTAKLAYEGLPSKTYLSKTLAQYTSKTCSNCGFTITSADYDRVLEKLKKTATGWMTTINGKELKVEGQITYYNRYKRQNVVKDLSVELDRLSEESVNNDISSWTKGRSGEALSLLKKRFSHRPVQEKFVCLNCGFETHADEQAALNIARSWLFLRSQEYKKYQTNKTTGNTDKRAFVETWQSFYRKKLKEVWKPAV

SEQ ID NO: 42166 - protein, 978 aa, synthetic construct
  REGION 1..978: note = engineered CasX variant
QEIKRINKIRRRLVKDSNTKKAGKTGPMKTLLVPVMTPDLRERLENLRKKPENIPQPISNTSRANLNKLLTDYTEMKKAILHVYWEEFQKDPVGLMSRVAQPASKKIDQNKLKPEMDEKGNLTTAGFACSQCGQPLFVYKLEQVSEKGKAYTNYFGRCNVAEHEKLILLAQLKPEKDSDEAVTYSLGKFGQRALDFYSIHVTKESTHPVKPLAQIAGNRYASAPVGKALSDACMGTIASFLSKYQDIIIEHQKVVKGNQKRLESLRELAGKENLEYPSVTLPPQPHTKEGVDAYNEVIARVRMWVNLNLWQKLKLSRDDAKPLLRLKGFPSFPLVERQANEVDWWDMVCNVKKLINEKKEDGKVFWQNLAGYKRQEALRPYLSSEEDRKKGKKFARYQLGDLLLHLYKKHGEDWGKVYDEAWERIDKKVEGLSKHIKLEEERRSEDAQSKAALTDWLRAKASFVIEGLKEADKDEFCRCELKLQKWYGDLRGKPFAIEAENSILDISGFSKQYNCAFIWQKDGVKKLNLYLIINYFKGGKLRFKKIKPEAFEANRFYTVINKKSGEIVPMEVNFNFDDPNLIILPLAFGKRQGREFIWNDLLSLETGSLKLANGRVIEKTLYNRRTRQDEPALFVALTFERREVLDSSNIKPMNLIGVDRGENIPAVIALTDPEGCPLSRFKDSLGNPTHILRIGESYKEKQRTIQAKKEVEQRRAGGYSRKYASKAKNLADDMVRNTARDLLYYAVTQDAMLIFENLSRGFGRQGKRTFMAERQYTRMEDWLTAKLAYEGLPSKTYLSKTLAQYTSKTCSNCGFTITSADYDRVLEKLKKTATGWMTTINGKELKVEGQITYYNRYKRQNVVKDLSVELDRLSEESVNNDISSWTKGRSGEALSLLKKRFSHRPVQEKFVCLNCGFETHADEQAALNIARSWLFLRSQEYKKYQTNKTTGNTDKRAFVETWQSFYRKKLKEVWKPAV

SEQ ID NO: 42167 - protein, 978 aa, synthetic construct
  REGION 1..978: note = engineered CasX variant
QEIKRINKIRRRLVKDSNTKKAGKTGPMKTLLVPVMTPDLRERLENLRKKPENIPQPISNTSRANLNKLLTDYTEMKKAILHVYWEEFQKDPVGLMSRVAQPASKKIDQNKLKPEMDEKGNLTTAGFACSQCGQPLFVYKLEQVSEKGKAYTNYFGRCNVAEHEKLILLAQLKPEKDSDEAVTYSLGKFGQRALDFYSIHVTKESTHPVKPLAQIAGNRYASVPVGKALSDACMGTIASFLSKYQDIIIEHQKVVKGNQKRLESLRELAGKENLEYPSVTLPPQPHTKEGVDAYNEVIARVRMWVNLNLWQKLKLSRDDAKPLLRLKGFPSFPLVERQANEVDWWDMVCNVKKLINEKKEDGKVFWQNLAGYKRQEALRPYLSSEEDRKKGKKFARYQLGDLLLHLYKKHGEDWGKVYDEAWERIDKKVEGLSKHIKLEEERRSEDAQSKAALTDWLRAKASFVIEGLKEADKDEFCRCELKLQKWYGDLRGKPFAIEAENSILDISGFSKQYNCAFIWQKDGVKKLNLYLIINYFKGGKLRFKKIKPEAFEANRFYTVINKKSGEIVPMEVNFNFDDPNLIILPLAFGKRQGREFIWNDLLSLETGSLKLANGRVIEKTLYNRRTRQDEPALFVALTFERREVLDSSNIKPMNLIGVDRGENIPAVIALTDPEGCPLSRFKDSLGNPTHILRIGESYKEKQRTIQAKKEVEQRRAGGYSRKYASKAKNLADDMVRNTARDLLYYAVTQDAMLIFENLSRGFGRQGKRTFMAERQYTRMEDWLTAKLAYEGLPSKTYLSKTLAQYTSKTCSNCGFTITSADYDRVLEKLKKTATGWMTTINGKELKVEGQITYYNRYKRQNVVKDLSVELDRLSEESVNNDISSWTKGRSGEALSLLKKRFSHRPVQEKFVCLNCGFETHADEQAALNIARSWLFLRSQEYKKYQTNKTTGNTDKRAFVETWQSFYRKKLKEVWKPAV

SEQ ID NO: 42168 - protein, 978 aa, synthetic construct
  REGION 1..978: note = engineered CasX variant
QEIKRINKIRRRLVKDSNTKKAGKTGPMKTLLVPVMTPDLRERLENLRKKPENIPQPISNTSRANLNKLLTDYTEMKKAILHVYWEEFQKDPVGLMSRVAQPASKKIDQNKLKPEMDEKGNLTTAGFACSQCGQPLFVYKLEQVSEKGKAYTNYFGRCNVAEHEKLIKLAQLKPEKDSDEAVTYSLGKFGQRALDFYSIHVTKESTHPVKPLAQIAGNRYASGPVGKALSDACMGTIASFLSKYQDIIIEHQKVVKGNQKRLESLRELAGKENLEYPSVTLPPQPHTKEGVDAYNEVIARVRMWVNLNLWQKLKLSRDDAKPLLRLKGFPSFPLVERQANEVDWWDMVCNVKKLINEKKEDGKVFWQNLAGYKRQEALRPYLSSEEDRKKGKKFARYQLGDLLLHLYKKHGEDWGKVYDEAWERIDKKVEGLSKHIKLEEERRSEDAQSKAALTDWLRAKASFVIEGLKEADKDEFCRCELKLQKWYGDLRGKPFAIEAENSILDISGFSKQYNCAFIWQKDGVKKLNLYLIINYFKGGKLRFKKIKPEAFEANRFYTVINKKSGEIVPMEVNFNFDDPNLIILPLAFGKRQGREFIWNDLLSLETGSLKLANGRVIEKTLYNRRTRQDEPALFVALTFERREVLDSSNIKPMNLIGVDRGENIPAVIALTDPEGCPLSRFKDSLGNPTHILRIGESYKEKQRTIQAKKEVEQRRAGGYSRKYASKAKNLADDMVRNTARDLLYYAVTQDAMLIFENLSRGFGRQGKRTFMAERQYTRMEDWLTAKLAYEGLPSKTYLSKTLAQYTSKTCSNCGFTITSADYDRVLEKLKKTATGWMTTINGKELKVEGQITYYNRYKRQNVVKDLSVELDRLSEESVNNDISSWTKGRSGEALSLLKKRFSHRPVQEKFVCLNCGFETHADEQAALNIARSWLFLRSQEYKKYQTNKTTGNTDKRAFVETWQSFYRKKLKEVWKPAV

SEQ ID NO: 42169 - protein, 977 aa, synthetic construct
  REGION 1..977: note = engineered CasX variant
QEIKRINKIRRRLVKDSNTKKAGKTGPMKTLLVPVMTPDLRERLENLRKKPENIPQPISNTSRANLNKLLTDYTEMKKAILHVYWEEFQKDPVGLMSRVAQPASKKIDQNKLKPEMDEKGNLTTAGFACSQCGQPLFVYKLEQVSEKGKAYTNYFGRCNVAEHEKLILLAQLKPEKDSDEAVTYSLGKFGQRALDFYSIHVTKESTHPVKPLAQIAGNRYASPVGKALSDACMGTIASFLSKYQDIIIEHQKVVKGNQKRLESLRELAGKENLEYPSVTLPPQPHTKEGVDAYNEVIARVRMWVNLNLWQKLKLSRDDAKPLLRLKGFPSFPLVERQANEVDWWDMVCNVKKLINEKKEDGKVFWQNLAGYKRQEALRPYLSSEEDRKKGKKFARYQLGDLLLHLYKKHGEDWGKVYDEAWERIDKKVEGLSKHIKLEEERRSEDAQSKAALTDWLRAKASFVIEGLKEADKDEFCRCELKLQKWYGDLRGKPFAIEAENSILDISGFSKQYNCAFIWQKDGVKKLNLYLIINYFKGGKLRFKKIKPEAFEANRFYTVINKKSGEIVPMEVNFNFDDPNLIILPLAFGKRQGREFIWNDLLSLETGSLKLANGRVIEKTLYNRRTRQDEPALFVALTFERREVLDSSNIKPMNLIGVDRGENIPAVIALTDPEGCPLSRFKDSLGNPTHILRIGESYKEKQRTIQAKKEVEQRRAGGYSRKYASKAKNLADDMVRNTARDLLYYAVTQDAMLIFENLSRGFGRQGKRTFMAERQYTRMEDWLTAKLAYEGLPSKTYLSKTLAQYTSKTCSNCGFTITSADYDRVLEKLKKTATGWMTTINGKELKVEGQITYYNRYKRQNVVKDLSVELDRLSEESVNNDISSWTKGRSGEALSLLKKRFSHRPVQEKFVCLNCGFETHADEQAALNIARSWLFLRSQEYKKYQTNKTTGNTDKRAFVETWQSFYRKKLKEVWKPAV

SEQ ID NO: 42170 - protein, 978 aa, synthetic construct
  REGION 1..978: note = engineered CasX variant
QEIKRINKIRRRLVKDSNTKKAGKTGPMKTLLVPVMTPDLRERLENLRKKPENIPQPISNTSRANLNKLLTDYTEMKKAILHVYWEEFQKDPVGLMSRVAQPASKKIDQNKLKPEMDEKGNLTTAGFACSQCGQPLFVYKLEQVSEKGKAYTNYFGRCNVAEHEKLILLAQLKPEKDSDEAVTYSLGKFGQRALDFYSIHVTKESTHPVKPLAQIAGNRYASYPVGKALSDACMGTIASFLSKYQDIIIEHQKVVKGNQKRLESLRELAGKENLEYPSVTLPPQPHTKEGVDAYNEVIARVRMWVNLNLWQKLKLSRDDAKPLLRLKGFPSFPLVERQANEVDWWDMVCNVKKLINEKKEDGKVFWQNLAGYKRQEALRPYLSSEEDRKKGKKFARYQLGDLLLHLEKKHPEDWGKVYDEAWERIDKKVEGLSKHIKLEEERRSEDAQSKAALTDWLRAKASFVIEGLKEADKDEFCRCELKLQKWYGDLRGKPFAIEAENSILDISGFSKQYNCAFIWQKDGVKKLNLYLIINYFKGGKLRFKKIKPEAFEANRFYTVINKKSGEIVPMEVNFNFDDPNLIILPLAFGKRQGREFIWNDLLSLETGSLKLANGRVIEKTLYNRRTRQDEPALFVALTFERREVLDSSNIKPMNLIGVDRGENIPAVIALTDPEGCPLSRFKDSLGNPTHILRIGESYKEKQRTIQAKKEVEQRRAGGYSRKYASKAKNLADDMVRNTARDLLYYAVTQDAMLIFENLSRGFGRQGKRTFMAERQYTRMEDWLTAKLAYEGLPSKTYLSKTLAQYTSKTCSNCGFTITSADYDRVLEKLKKTATGWMTTINGKELKVEGQITYYNRYKRQNVVKDLSVELDRLSEESVNNDISSWTKGRSGEALSLLKKRFSHRPVQEKFVCLNCGFETHADEQAALNIARSWLFLRSQEYKKYQTNKTTGNTDKRAFVETWQSFYRKKLKEVWKPAV

SEQ ID NO: 42171 - protein, 978 aa, synthetic construct
  REGION 1..978: note = engineered CasX variant
QEIKRINKIRRRLVKDSNTKKAGKTGPMKTLLVPVMTPDLRERLENLRKKPENIPQPISNTSRANLNKLLTDYTEMKKAILHVYWEEFQKDPVGLMSRVAQPASKKIDQNKLKPEMDEKGNLTTAGFACSQCGQPLFVYKLEQVSEKGKAYTNYFGRCNVAEHEKLILLAQLKPEKDSDEAVTYSLGKFGQRALDFYSIHVTKESTHPVKPLAQIAGNRYASHPVGKALSDACMGTIASFLSKYQDIIIEHQKVVKGNQKRLESLRELAGKENLEYPSVTLPPQPHTKEGVDAYNEVIARVRMWVNLNLWQKLKLSRDDAKPLLRLKGFPSFPLVERQANEVDWWDMVCNVKKLINEKKEDGKVFWQNLAGYKRQEALRPYLSSEEDRKKGKKFARYQLGDLLLHLEKKHPEDWGKVYDEAWERIDKKVEGLSKHIKLEEERRSEDAQSKAALTDWLRAKASFVIEGLKEADKDEFCRCELKLQKWYGDLRGKPFAIEAENSILDISGFSKQYNCAFIWQKDGVKKLNLYLIINYFKGGKLRFKKIKPEAFEANRFYTVINKKSGEIVPMEVNFNFDDPNLIILPLAFGKRQGREFIWNDLLSLETGSLKLANGRVIEKTLYNRRTRQDEPALFVALTFERREVLDSSNIKPMNLIGVDRGENIPAVIALTDPEGCPLSRFKDSLGNPTHILRIGESYKEKQRTIQAKKEVEQRRAGGYSRKYASKAKNLADDMVRNTARDLLYYAVTQDAMLIFENLSRGFGRQGKRTFMAERQYTRMEDWLTAKLAYEGLPSKTYLSKTLAQYTSKTCSNCGFTITSADYDRVLEKLKKTATGWMTTINGKELKVEGQITYYNRYKRQNVVKDLSVELDRLSEESVNNDISSWTKGRSGEALSLLKKRFSHRPVQEKFVCLNCGFETHADEQAALNIARSWLFLRSQEYKKYQTNKTTGNTDKRAFVETWQSFYRKKLKEVWKPAV

SEQ ID NO: 42172 - protein, 978 aa, synthetic construct
  REGION 1..978: note = engineered CasX variant
QEIKRINKIRRRLVKDSNTKKAGKTGPMKTLLVPVMTPDLRERLENLRKKPENIPQPISNTSRANLNKLLTDYTEMKKAILHVYWEEFQKDPVGLMSRVAQPASKKIDQNKLKPEMDEKGNLTTAGFACSQCGQPLFVYKLEQVSEKGKAYTNYFGRCNVAEHEKLILLAQLKPEKDSDEAVTYSLGKFGQRALDFYSIHVTKESTHPVKPLAQIAGNRYASSPVGKALSDACMGTIASFLSKYQDIIIEHQKVVKGNQKRLESLRELAGKENLEYPSVTLPPQPHTKEGVDAYNEVIARVRMWVNLNLWQKLKLSRDDAKPLLRLKGFPSFPLVERQANEVDWWDMVCNVKKLINEKKEDGKVFWQNLAGYKRQEALRPYLSSEEDRKKGKKFARYQLGDLLLHLEKKHPEDWGKVYDEAWERIDKKVEGLSKHIKLEEERRSEDAQSKAALTDWLRAKASFVIEGLKEADKDEFCRCELKLQKWYGDLRGKPFAIEAENSILDISGFSKQYNCAFIWQKDGVKKLNLYLIINYFKGGKLRFKKIKPEAFEANRFYTVINKKSGEIVPMEVNFNFDDPNLIILPLAFGKRQGREFIWNDLLSLETGSLKLANGRVIEKTLYNRRTRQDEPALFVALTFERREVLDSSNIKPMNLIGVDRGENIPAVIALTDPEGCPLSRFKDSLGNPTHILRIGESYKEKQRTIQAKKEVEQRRAGGYSRKYASKAKNLADDMVRNTARDLLYYAVTQDAMLIFENLSRGFGRQGKRTFMAERQYTRMEDWLTAKLAYEGLPSKTYLSKTLAQYTSKTCSNCGFTITSADYDRVLEKLKKTATGWMTTINGKELKVEGQITYYNRYKRQNVVKDLSVELDRLSEESVNNDISSWTKGRSGEALSLLKKRFSHRPVQEKFVCLNCGFETHADEQAALNIARSWLFLRSQEYKKYQTNKTTGNTDKRAFVETWQSFYRKKLKEVWKPAV

SEQ ID NO: 42173 - protein, 978 aa, synthetic construct
  REGION 1..978: note = engineered CasX variant
QEIKRINKIRRRLVKDSNTKKAGKTGPMKTLLVPVMTPDLRERLENLRKKPENIPQPISNTSRANLNKLLTDYTEMKKAILHVYWEEFQKDPVGLMSRVAQPASKKIDQNKLKPEMDEKGNLTTAGFACSQCGQPLFVYKLEQVSEKGKAYTNYFGRCNVAEHEKLILLAQLKPEKDSDEAVTYSLGKFGQRALDFYSIHVTKESTHPVKPLAQIAGNRYASTPVGKALSDACMGTIASFLSKYQDIIIEHQKVVKGNQKRLESLRELAGKENLEYPSVTLPPQPHTKEGVDAYNEVIARVRMWVNLNLWQKLKLSRDDAKPLLRLKGFPSFPLVERQANEVDWWDMVCNVKKLINEKKEDGKVFWQNLAGYKRQEALRPYLSSEEDRKKGKKFARYQLGDLLLHLEKKHPEDWGKVYDEAWERIDKKVEGLSKHIKLEEERRSEDAQSKAALTDWLRAKASFVIEGLKEADKDEFCRCELKLQKWYGDLRGKPFAIEAENSILDISGFSKQYNCAFIWQKDGVKKLNLYLIINYFKGGKLRFKKIKPEAFEANRFYTVINKKSGEIVPMEVNFNFDDPNLIILPLAFGKRQGREFIWNDLLSLETGSLKLANGRVIEKTLYNRRTRQDEPALFVALTFERREVLDSSNIKPMNLIGVDRGENIPAVIALTDPEGCPLSRFKDSLGNPTHILRIGESYKEKQRTIQAKKEVEQRRAGGYSRKYASKAKNLADDMVRNTARDLLYYAVTQDAMLIFENLSRGFGRQGKRTFMAERQYTRMEDWLTAKLAYEGLPSKTYLSKTLAQYTSKTCSNCGFTITSADYDRVLEKLKKTATGWMTTINGKELKVEGQITYYNRYKRQNVVKDLSVELDRLSEESVNNDISSWTKGRSGEALSLLKKRFSHRPVQEKFVCLNCGFETHADEQAALNIARSWLFLRSQEYKKYQTNKTTGNTDKRAFVETWQSFYRKKLKEVWKPAV

SEQ ID NO: 42174 - protein, 978 aa, synthetic construct
  REGION 1..978: note = engineered CasX variant
QEIKRINKIRRRLVKDSNTKKAGKTGPMKTLLVPVMTPDLRERLENLRKKPENIPQPISNTSRANLNKLLTDYTEMKKAILHVYWEEFQKDPVGLMSRVAQPASKKIDQNKLKPEMDEKGNLTTAGFACSQCGQPLFVYKLEQVSEKGKAYTNYFGRCNVAEHEKLILLAQLKPEKDSDEAVTYSLGKFGQRALDFYSIHVTKESTHPVKPLAQIAGNRYASAPVGKALSDACMGTIASFLSKYQDIIIEHQKVVKGNQKRLESLRELAGKENLEYPSVTLPPQPHTKEGVDAYNEVIARVRMWVNLNLWQKLKLSRDDAKPLLRLKGFPSFPLVERQANEVDWWDMVCNVKKLINEKKEDGKVFWQNLAGYKRQEALRPYLSSEEDRKKGKKFARYQLGDLLLHLEKKHPEDWGKVYDEAWERIDKKVEGLSKHIKLEEERRSEDAQSKAALTDWLRAKASFVIEGLKEADKDEFCRCELKLQKWYGDLRGKPFAIEAENSILDISGFSKQYNCAFIWQKDGVKKLNLYLIINYFKGGKLRFKKIKPEAFEANRFYTVINKKSGEIVPMEVNFNFDDPNLIILPLAFGKRQGREFIWNDLLSLETGSLKLANGRVIEKTLYNRRTRQDEPALFVALTFERREVLDSSNIKPMNLIGVDRGENIPAVIALTDPEGCPLSRFKDSLGNPTHILRIGESYKEKQRTIQAKKEVEQRRAGGYSRKYASKAKNLADDMVRNTARDLLYYAVTQDAMLIFENLSRGFGRQGKRTFMAERQYTRMEDWLTAKLAYEGLPSKTYLSKTLAQYTSKTCSNCGFTITSADYDRVLEKLKKTATGWMTTINGKELKVEGQITYYNRYKRQNVVKDLSVELDRLSEESVNNDISSWTKGRSGEALSLLKKRFSHRPVQEKFVCLNCGFETHADEQAALNIARSWLFLRSQEYKKYQTNKTTGNTDKRAFVETWQSFYRKKLKEVWKPAV

SEQ ID NO: 42175 - protein, 978 aa, synthetic construct
  REGION 1..978: note = engineered CasX variant
QEIKRINKIRRRLVKDSNTKKAGKTGPMKTLLVPVMTPDLRERLENLRKKPENIPQPISNTSRANLNKLLTDYTEMKKAILHVYWEEFQKDPVGLMSRVAQPASKKIDQNKLKPEMDEKGNLTTAGFACSQCGQPLFVYKLEQVSEKGKAYTNYFGRCNVAEHEKLILLAQLKPEKDSDEAVTYSLGKFGQRALDFYSIHVTKESTHPVKPLAQIAGNRYASVPVGKALSDACMGTIASFLSKYQDIIIEHQKVVKGNQKRLESLRELAGKENLEYPSVTLPPQPHTKEGVDAYNEVIARVRMWVNLNLWQKLKLSRDDAKPLLRLKGFPSFPLVERQANEVDWWDMVCNVKKLINEKKEDGKVFWQNLAGYKRQEALRPYLSSEEDRKKGKKFARYQLGDLLLHLEKKHPEDWGKVYDEAWERIDKKVEGLSKHIKLEEERRSEDAQSKAALTDWLRAKASFVIEGLKEADKDEFCRCELKLQKWYGDLRGKPFAIEAENSILDISGFSKQYNCAFIWQKDGVKKLNLYLIINYFKGGKLRFKKIKPEAFEANRFYTVINKKSGEIVPMEVNFNFDDPNLIILPLAFGKRQGREFIWNDLLSLETGSLKLANGRVIEKTLYNRRTRQDEPALFVALTFERREVLDSSNIKPMNLIGVDRGENIPAVIALTDPEGCPLSRFKDSLGNPTHILRIGESYKEKQRTIQAKKEVEQRRAGGYSRKYASKAKNLADDMVRNTARDLLYYAVTQDAMLIFENLSRGFGRQGKRTFMAERQYTRMEDWLTAKLAYEGLPSKTYLSKTLAQYTSKTCSNCGFTITSADYDRVLEKLKKTATGWMTTINGKELKVEGQITYYNRYKRQNVVKDLSVELDRLSEESVNNDISSWTKGRSGEALSLLKKRFSHRPVQEKFVCLNCGFETHADEQAALNIARSWLFLRSQEYKKYQTNKTTGNTDKRAFVETWQSFYRKKLKEVWKPAV

SEQ ID NO: 42176 - protein, 978 aa, synthetic construct
  REGION 1..978: note = engineered CasX variant
QEIKRINKIRRRLVKDSNTKKAGKTGPMKTLLVPVMTPDLRERLENLRKKPENIPQPISNTSRANLNKLLTDYTEMKKAILHVYWEEFQKDPVGLMSRVAQPASKKIDQNKLKPEMDEKGNLTTAGFACSQCGQPLFVYKLEQVSEKGKAYTNYFGRCNVAEHEKLIKLAQLKPEKDSDEAVTYSLGKFGQRALDFYSIHVTKESTHPVKPLAQIAGNRYASGPVGKALSDACMGTIASFLSKYQDIIIEHQKVVKGNQKRLESLRELAGKENLEYPSVTLPPQPHTKEGVDAYNEVIARVRMWVNLNLWQKLKLSRDDAKPLLRLKGFPSFPLVERQANEVDWWDMVCNVKKLINEKKEDGKVFWQNLAGYKRQEALRPYLSSEEDRKKGKKFARYQLGDLLLHLEKKHPEDWGKVYDEAWERIDKKVEGLSKHIKLEEERRSEDAQSKAALTDWLRAKASFVIEGLKEADKDEFCRCELKLQKWYGDLRGKPFAIEAENSILDISGFSKQYNCAFIWQKDGVKKLNLYLIINYFKGGKLRFKKIKPEAFEANRFYTVINKKSGEIVPMEVNFNFDDPNLIILPLAFGKRQGREFIWNDLLSLETGSLKLANGRVIEKTLYNRRTRQDEPALFVALTFERREVLDSSNIKPMNLIGVDRGENIPAVIALTDPEGCPLSRFKDSLGNPTHILRIGESYKEKQRTIQAKKEVEQRRAGGYSRKYASKAKNLADDMVRNTARDLLYYAVTQDAMLIFENLSRGFGRQGKRTFMAERQYTRMEDWLTAKLAYEGLPSKTYLSKTLAQYTSKTCSNCGFTITSADYDRVLEKLKKTATGWMTTINGKELKVEGQITYYNRYKRQNVVKDLSVELDRLSEESVNNDISSWTKGRSGEALSLLKKRFSHRPVQEKFVCLNCGFETHADEQAALNIARSWLFLRSQEYKKYQTNKTTGNTDKRAFVETWQSFYRKKLKEVWKPAV

SEQ ID NO: 42177 - protein, 977 aa, synthetic construct
  REGION 1..977: note = engineered CasX variant
QEIKRINKIRRRLVKDSNTKKAGKTGPMKTLLVPVMTPDLRERLENLRKKPENIPQPISNTSRANLNKLLTDYTEMKKAILHVYWEEFQKDPVGLMSRVAQPASKKIDQNKLKPEMDEKGNLTTAGFACSQCGQPLFVYKLEQVSEKGKAYTNYFGRCNVAEHEKLILLAQLKPEKDSDEAVTYSLGKFGQRALDFYSIHVTKESTHPVKPLAQIAGNRYASPVGKALSDACMGTIASFLSKYQDIIIEHQKVVKGNQKRLESLRELAGKENLEYPSVTLPPQPHTKEGVDAYNEVIARVRMWVNLNLWQKLKLSRDDAKPLLRLKGFPSFPLVERQANEVDWWDMVCNVKKLINEKKEDGKVFWQNLAGYKRQEALRPYLSSEEDRKKGKKFARYQLGDLLLHLEKKHPEDWGKVYDEAWERIDKKVEGLSKHIKLEEERRSEDAQSKAALTDWLRAKASFVIEGLKEADKDEFCRCELKLQKWYGDLRGKPFAIEAENSILDISGFSKQYNCAFIWQKDGVKKLNLYLIINYFKGGKLRFKKIKPEAFEANRFYTVINKKSGEIVPMEVNFNFDDPNLIILPLAFGKRQGREFIWNDLLSLETGSLKLANGRVIEKTLYNRRTRQDEPALFVALTFERREVLDSSNIKPMNLIGVDRGENIPAVIALTDPEGCPLSRFKDSLGNPTHILRIGESYKEKQRTIQAKKEVEQRRAGGYSRKYASKAKNLADDMVRNTARDLLYYAVTQDAMLIFENLSRGFGRQGKRTFMAERQYTRMEDWLTAKLAYEGLPSKTYLSKTLAQYTSKTCSNCGFTITSADYDRVLEKLKKTATGWMTTINGKELKVEGQITYYNRYKRQNVVKDLSVELDRLSEESVNNDISSWTKGRSGEALSLLKKRFSHRPVQEKFVCLNCGFETHADEQAALNIARSWLFLRSQEYKKYQTNKTTGNTDKRAFVETWQSFYRKKLKEVWKPAV

SEQ ID NO: 42178 - protein, 979 aa, synthetic construct
  REGION 1..979: note = engineered CasX variant
QEIKRINKIRRRLVKDSNTKKAGKTGPMKTLLVPVMTPDLRERLENLRKKPENIPQPISNTSRANLNKLLTDYTEMKKAILHVYWEEFQKDPVGLMSRVAQPASKKIDQNKLKPEMDEKGNLTTAGFACSQCGQPLFVYKLEQVSEKGKAYTNYFGRCNVAEHEKLILLAQLKPEKDSDEAVTYSLGKFGQRALDFYSIHVTKESTHPVKPLAQIAGNRYASYPVGKALSDACMGTIASFLSKYQDIIIEHQKVVKGNQKRLESLRELAGKENLEYPSVTLPPQPHTKEGVDAYNEVIARVRMWVNLNLWQKLKLSRDDAKPLLRLKGFPSFPLVERQANEVDWWDMVCNVKKLINEKKEDGKVFWQNLAGYKRQEALRPYLSSEEDRKKGKKFARYQLGDLLLHLEKKHGERDWGKVYDEAWERIDKKVEGLSKHIKLEEERRSEDAQSKAALTDWLRAKASFVIEGLKEADKDEFCRCELKLQKWYGDLRGKPFAIEAENSILDISGFSKQYNCAFIWQKDGVKKLNLYLIINYFKGGKLRFKKIKPEAFEANRFYTVINKKSGEIVPMEVNFNFDDPNLIILPLAFGKRQGREFIWNDLLSLETGSLKLANGRVIEKTLYNRRTRQDEPALFVALTFERREVLDSSNIKPMNLIGVDRGENIPAVIALTDPEGCPLSRFKDSLGNPTHILRIGESYKEKQRTIQAKKEVEQRRAGGYSRKYASKAKNLADDMVRNTARDLLYYAVTQDAMLIFENLSRGFGRQGKRTFMAERQYTRMEDWLTAKLAYEGLPSKTYLSKTLAQYTSKTCSNCGFTITSADYDRVLEKLKKTATGWMTTINGKELKVEGQITYYNRYKRQNVVKDLSVELDRLSEESVNNDISSWTKGRSGEALSLLKKRFSHRPVQEKFVCLNCGFETHADEQAALNIARSWLFLRSQEYKKYQTNKTTGNTDKRAFVETWQSFYRKKLKEVWKPAV

SEQ ID NO: 42179 - protein, 979 aa, synthetic construct
  REGION 1..979: note = engineered CasX variant
QEIKRINKIRRRLVKDSNTKKAGKTGPMKTLLVPVMTPDLRERLENLRKKPENIPQPISNTSRANLNKLLTDYTEMKKAILHVYWEEFQKDPVGLMSRVAQPASKKIDQNKLKPEMDEKGNLTTAGFACSQCGQPLFVYKLEQVSEKGKAYTNYFGRCNVAEHEKLILLAQLKPEKDSDEAVTYSLGKFGQRALDFYSIHVTKESTHPVKPLAQIAGNRYASHPVGKALSDACMGTIASFLSKYQDIIIEHQKVVKGNQKRLESLRELAGKENLEYPSVTLPPQPHTKEGVDAYNEVIARVRMWVNLNLWQKLKLSRDDAKPLLRLKGFPSFPLVERQANEVDWWDMVCNVKKLINEKKEDGKVFWQNLAGYKRQEALRPYLSSEEDRKKGKKFARYQLGDLLLHLEKKHGERDWGKVYDEAWERIDKKVEGLSKHIKLEEERRSEDAQSKAALTDWLRAKASFVIEGLKEADKDEFCRCELKLQKWYGDLRGKPFAIEAENSILDISGFSKQYNCAFIWQKDGVKKLNLYLIINYFKGGKLRFKKIKPEAFEANRFYTVINKKSGEIVPMEVNFNFDDPNLIILPLAFGKRQGREFIWNDLLSLETGSLKLANGRVIEKTLYNRRTRQDEPALFVALTFERREVLDSSNIKPMNLIGVDRGENIPAVIALTDPEGCPLSRFKDSLGNPTHILRIGESYKEKQRTIQAKKEVEQRRAGGYSRKYASKAKNLADDMVRNTARDLLYYAVTQDAMLIFENLSRGFGRQGKRTFMAERQYTRMEDWLTAKLAYEGLPSKTYLSKTLAQYTSKTCSNCGFTITSADYDRVLEKLKKTATGWMTTINGKELKVEGQITYYNRYKRQNVVKDLSVELDRLSEESVNNDISSWTKGRSGEALSLLKKRFSHRPVQEKFVCLNCGFETHADEQAALNIARSWLFLRSQEYKKYQTNKTTGNTDKRAFVETWQSFYRKKLKEVWKPAV

SEQ ID NO: 42180 - protein, 979 aa, synthetic construct
  REGION 1..979: note = engineered CasX variant
QEIKRINKIRRRLVKDSNTKKAGKTGPMKTLLVPVMTPDLRERLENLRKKPENIPQPISNTSRANLNKLLTDYTEMKKAILHVYWEEFQKDPVGLMSRVAQPASKKIDQNKLKPEMDEKGNLTTAGFACSQCGQPLFVYKLEQVSEKGKAYTNYFGRCNVAEHEKLILLAQLKPEKDSDEAVTYSLGKFGQRALDFYSIHVTKESTHPVKPLAQIAGNRYASSPVGKALSDACMGTIASFLSKYQDIIIEHQKVVKGNQKRLESLRELAGKENLEYPSVTLPPQPHTKEGVDAYNEVIARVRMWVNLNLWQKLKLSRDDAKPLLRLKGFPSFPLVERQANEVDWWDMVCNVKKLINEKKEDGKVFWQNLAGYKRQEALRPYLSSEEDRKKGKKFARYQLGDLLLHLEKKHGERDWGKVYDEAWERIDKKVEGLSKHIKLEEERRSEDAQSKAALTDWLRAKASFVIEGLKEADKDEFCRCELKLQKWYGDLRGKPFAIEAENSILDISGFSKQYNCAFIWQKDGVKKLNLYLIINYFKGGKLRFKKIKPEAFEANRFYTVINKKSGEIVPMEVNFNFDDPNLIILPLAFGKRQGREFIWNDLLSLETGSLKLANGRVIEKTLYNRRTRQDEPALFVALTFERREVLDSSNIKPMNLIGVDRGENIPAVIALTDPEGCPLSRFKDSLGNPTHILRIGESYKEKQRTIQAKKEVEQRRAGGYSRKYASKAKNLADDMVRNTARDLLYYAVTQDAMLIFENLSRGFGRQGKRTFMAERQYTRMEDWLTAKLAYEGLPSKTYLSKTLAQYTSKTCSNCGFTITSADYDRVLEKLKKTATGWMTTINGKELKVEGQITYYNRYKRQNVVKDLSVELDRLSEESVNNDISSWTKGRSGEALSLLKKRFSHRPVQEKFVCLNCGFETHADEQAALNIARSWLFLRSQEYKKYQTNKTTGNTDKRAFVETWQSFYRKKLKEVWKPAV

SEQ ID NO: 42181 - protein, 979 aa, synthetic construct
  REGION 1..979: note = engineered CasX variant
QEIKRINKIRRRLVKDSNTKKAGKTGPMKTLLVPVMTPDLRERLENLRKKPENIPQPISNTSRANLNKLLTDYTEMKKAILHVYWEEFQKDPVGLMSRVAQPASKKIDQNKLKPEMDEKGNLTTAGFACSQCGQPLFVYKLEQVSEKGKAYTNYFGRCNVAEHEKLILLAQLKPEKDSDEAVTYSLGKFGQRALDFYSIHVTKESTHPVKPLAQIAGNRYASTPVGKALSDACMGTIASFLSKYQDIIIEHQKVVKGNQKRLESLRELAGKENLEYPSVTLPPQPHTKEGVDAYNEVIARVRMWVNLNLWQKLKLSRDDAKPLLRLKGFPSFPLVERQANEVDWWDMVCNVKKLINEKKEDGKVFWQNLAGYKRQEALRPYLSSEEDRKKGKKFARYQLGDLLLHLEKKHGERDWGKVYDEAWERIDKKVEGLSKHIKLEEERRSEDAQSKAALTDWLRAKASFVIEGLKEADKDEFCRCELKLQKWYGDLRGKPFAIEAENSILDISGFSKQYNCAFIWQKDGVKKLNLYLIINYFKGGKLRFKKIKPEAFEANRFYTVINKKSGEIVPMEVNFNFDDPNLIILPLAFGKRQGREFIWNDLLSLETGSLKLANGRVIEKTLYNRRTRQDEPALFVALTFERREVLDSSNIKPMNLIGVDRGENIPAVIALTDPEGCPLSRFKDSLGNPTHILRIGESYKEKQRTIQAKKEVEQRRAGGYSRKYASKAKNLADDMVRNTARDLLYYAVTQDAMLIFENLSRGFGRQGKRTFMAERQYTRMEDWLTAKLAYEGLPSKTYLSKTLAQYTSKTCSNCGFTITSADYDRVLEKLKKTATGWMTTINGKELKVEGQITYYNRYKRQNVVKDLSVELDRLSEESVNNDISSWTKGRSGEALSLLKKRFSHRPVQEKFVCLNCGFETHADEQAALNIARSWLFLRSQEYKKYQTNKTTGNTDKRAFVETWQSFYRKKLKEVWKPAV

SEQ ID NO: 42182 - protein, 979 aa, synthetic construct
  REGION 1..979: note = engineered CasX variant
QEIKRINKIRRRLVKDSNTKKAGKTGPMKTLLVPVMTPDLRERLENLRKKPENIPQPISNTSRANLNKLLTDYTEMKKAILHVYWEEFQKDPVGLMSRVAQPASKKIDQNKLKPEMDEKGNLTTAGFACSQCGQPLFVYKLEQVSEKGKAYTNYFGRCNVAEHEKLILLAQLKPEKDSDEAVTYSLGKFGQRALDFYSIHVTKESTHPVKPLAQIAGNRYASAPVGKALSDACMGTIASFLSKYQDIIIEHQKVVKGNQKRLESLRELAGKENLEYPSVTLPPQPHTKEGVDAYNEVIARVRMWVNLNLWQKLKLSRDDAKPLLRLKGFPSFPLVERQANEVDWWDMVCNVKKLINEKKEDGKVFWQNLAGYKRQEALRPYLSSEEDRKKGKKFARYQLGDLLLHLEKKHGERDWGKVYDEAWERIDKKVEGLSKHIKLEEERRSEDAQSKAALTDWLRAKASFVIEGLKEADKDEFCRCELKLQKWYGDLRGKPFAIEAENSILDISGFSKQYNCAFIWQKDGVKKLNLYLIINYFKGGKLRFKKIKPEAFEANRFYTVINKKSGEIVPMEVNFNFDDPNLIILPLAFGKRQGREFIWNDLLSLETGSLKLANGRVIEKTLYNRRTRQDEPALFVALTFERREVLDSSNIKPMNLIGVDRGENIPAVIALTDPEGCPLSRFKDSLGNPTHILRIGESYKEKQRTIQAKKEVEQRRAGGYSRKYASKAKNLADDMVRNTARDLLYYAVTQDAMLIFENLSRGFGRQGKRTFMAERQYTRMEDWLTAKLAYEGLPSKTYLSKTLAQYTSKTCSNCGFTITSADYDRVLEKLKKTATGWMTTINGKELKVEGQITYYNRYKRQNVVKDLSVELDRLSEESVNNDISSWTKGRSGEALSLLKKRFSHRPVQEKFVCLNCGFETHADEQAALNIARSWLFLRSQEYKKYQTNKTTGNTDKRAFVETWQSFYRKKLKEVWKPAV

SEQ ID NO: 42183 - protein, 979 aa, synthetic construct
  REGION 1..979: note = engineered CasX variant
QEIKRINKIRRRLVKDSNTKKAGKTGPMKTLLVPVMTPDLRERLENLRKKPENIPQPISNTSRANLNKLLTDYTEMKKAILHVYWEEFQKDPVGLMSRVAQPASKKIDQNKLKPEMDEKGNLTTAGFACSQCGQPLFVYKLEQVSEKGKAYTNYFGRCNVAEHEKLILLAQLKPEKDSDEAVTYSLGKFGQRALDFYSIHVTKESTHPVKPLAQIAGNRYASVPVGKALSDACMGTIASFLSKYQDIIIEHQKVVKGNQKRLESLRELAGKENLEYPSVTLPPQPHTKEGVDAYNEVIARVRMWVNLNLWQKLKLSRDDAKPLLRLKGFPSFPLVERQANEVDWWDMVCNVKKLINEKKEDGKVFWQNLAGYKRQEALRPYLSSEEDRKKGKKFARYQLGDLLLHLEKKHGERDWGKVYDEAWERIDKKVEGLSKHIKLEEERRSEDAQSKAALTDWLRAKASFVIEGLKEADKDEFCRCELKLQKWYGDLRGKPFAIEAENSILDISGFSKQYNCAFIWQKDGVKKLNLYLIINYFKGGKLRFKKIKPEAFEANRFYTVINKKSGEIVPMEVNFNFDDPNLIILPLAFGKRQGREFIWNDLLSLETGSLKLANGRVIEKTLYNRRTRQDEPALFVALTFERREVLDSSNIKPMNLIGVDRGENIPAVIALTDPEGCPLSRFKDSLGNPTHILRIGESYKEKQRTIQAKKEVEQRRAGGYSRKYASKAKNLADDMVRNTARDLLYYAVTQDAMLIFENLSRGFGRQGKRTFMAERQYTRMEDWLTAKLAYEGLPSKTYLSKTLAQYTSKTCSNCGFTITSADYDRVLEKLKKTATGWMTTINGKELKVEGQITYYNRYKRQNVVKDLSVELDRLSEESVNNDISSWTKGRSGEALSLLKKRFSHRPVQEKFVCLNCGFETHADEQAALNIARSWLFLRSQEYKKYQTNKTTGNTDKRAFVETWQSFYRKKLKEVWKPAV

SEQ ID NO: 42184 - protein, 979 aa, synthetic construct
  REGION 1..979: note = engineered CasX variant
QEIKRINKIRRRLVKDSNTKKAGKTGPMKTLLVPVMTPDLRERLENLRKKPENIPQPISNTSRANLNKLLTDYTEMKKAILHVYWEEFQKDPVGLMSRVAQPASKKIDQNKLKPEMDEKGNLTTAGFACSQCGQPLFVYKLEQVSEKGKAYTNYFGRCNVAEHEKLIKLAQLKPEKDSDEAVTYSLGKFGQRALDFYSIHVTKESTHPVKPLAQIAGNRYASGPVGKALSDACMGTIASFLSKYQDIIIEHQKVVKGNQKRLESLRELAGKENLEYPSVTLPPQPHTKEGVDAYNEVIARVRMWVNLNLWQKLKLSRDDAKPLLRLKGFPSFPLVERQANEVDWWDMVCNVKKLINEKKEDGKVFWQNLAGYKRQEALRPYLSSEEDRKKGKKFARYQLGDLLLHLEKKHGERDWGKVYDEAWERIDKKVEGLSKHIKLEEERRSEDAQSKAALTDWLRAKASFVIEGLKEADKDEFCRCELKLQKWYGDLRGKPFAIEAENSILDISGFSKQYNCAFIWQKDGVKKLNLYLIINYFKGGKLRFKKIKPEAFEANRFYTVINKKSGEIVPMEVNFNFDDPNLIILPLAFGKRQGREFIWNDLLSLETGSLKLANGRVIEKTLYNRRTRQDEPALFVALTFERREVLDSSNIKPMNLIGVDRGENIPAVIALTDPEGCPLSRFKDSLGNPTHILRIGESYKEKQRTIQAKKEVEQRRAGGYSRKYASKAKNLADDMVRNTARDLLYYAVTQDAMLIFENLSRGFGRQGKRTFMAERQYTRMEDWLTAKLAYEGLPSKTYLSKTLAQYTSKTCSNCGFTITSADYDRVLEKLKKTATGWMTTINGKELKVEGQITYYNRYKRQNVVKDLSVELDRLSEESVNNDISSWTKGRSGEALSLLKKRFSHRPVQEKFVCLNCGFETHADEQAALNIARSWLFLRSQEYKKYQTNKTTGNTDKRAFVETWQSFYRKKLKEVWKPAV

SEQ ID NO: 42185 - protein, 978 aa, synthetic construct
  REGION 1..978: note = engineered CasX variant
QEIKRINKIRRRLVKDSNTKKAGKTGPMKTLLVPVMTPDLRERLENLRKKPENIPQPISNTSRANLNKLLTDYTEMKKAILHVYWEEFQKDPVGLMSRVAQPASKKIDQNKLKPEMDEKGNLTTAGFACSQCGQPLFVYKLEQVSEKGKAYTNYFGRCNVAEHEKLILLAQLKPEKDSDEAVTYSLGKFGQRALDFYSIHVTKESTHPVKPLAQIAGNRYASPVGKALSDACMGTIASFLSKYQDIIIEHQKVVKGNQKRLESLRELAGKENLEYPSVTLPPQPHTKEGVDAYNEVIARVRMWVNLNLWQKLKLSRDDAKPLLRLKGFPSFPLVERQANEVDWWDMVCNVKKLINEKKEDGKVFWQNLAGYKRQEALRPYLSSEEDRKKGKKFARYQLGDLLLHLEKKHGERDWGKVYDEAWERIDKKVEGLSKHIKLEEERRSEDAQSKAALTDWLRAKASFVIEGLKEADKDEFCRCELKLQKWYGDLRGKPFAIEAENSILDISGFSKQYNCAFIWQKDGVKKLNLYLIINYFKGGKLRFKKIKPEAFEANRFYTVINKKSGEIVPMEVNFNFDDPNLIILPLAFGKRQGREFIWNDLLSLETGSLKLANGRVIEKTLYNRRTRQDEPALFVALTFERREVLDSSNIKPMNLIGVDRGENIPAVIALTDPEGCPLSRFKDSLGNPTHILRIGESYKEKQRTIQAKKEVEQRRAGGYSRKYASKAKNLADDMVRNTARDLLYYAVTQDAMLIFENLSRGFGRQGKRTFMAERQYTRMEDWLTAKLAYEGLPSKTYLSKTLAQYTSKTCSNCGFTITSADYDRVLEKLKKTATGWMTTINGKELKVEGQITYYNRYKRQNVVKDLSVELDRLSEESVNNDISSWTKGRSGEALSLLKKRFSHRPVQEKFVCLNCGFETHADEQAALNIARSWLFLRSQEYKKYQTNKTTGNTDKRAFVETWQSFYRKKLKEVWKPAV

SEQ ID NO: 42186 - protein, 979 aa, synthetic construct
  REGION 1..979: note = engineered CasX variant
QEIKRINKIRRRLVKDSNTKKAGKTGPMKTLLVPVMTPDLRERLENLRKKPENIPQPISNTSRANLNKLLTDYTEMKKAILHVYWEEFQKDPVGLMSRVAQPASKKIDQNKLKPEMDEKGNLTTAGFACSQCGQPLFVYKLEQVSEKGKAYTNYFGRCNVAEHEKLILLAQLKPEKDSDEAVTYSLGKFGQRALDFYSIHVTKESTHPVKPLAQIAGNRYASYPVGKALSDACMGTIASFLSKYQDIIIEHQKVVKGNQKRLESLRELAGKENLEYPSVTLPPQPHTKEGVDAYNEVIARVRMWVNLNLWQKLKLSRDDAKPLLRLKGFPSFPLVERQANEVDWWDMVCNVKKLINEKKEDGKVFWQNLAGYKRQEALRPYLSSEEDRKKGKKFARYQLGDLLLHLEKKHGEYDWGKVYDEAWERIDKKVEGLSKHIKLEEERRSEDAQSKAALTDWLRAKASFVIEGLKEADKDEFCRCELKLQKWYGDLRGKPFAIEAENSILDISGFSKQYNCAFIWQKDGVKKLNLYLIINYFKGGKLRFKKIKPEAFEANRFYTVINKKSGEIVPMEVNFNFDDPNLIILPLAFGKRQGREFIWNDLLSLETGSLKLANGRVIEKTLYNRRTRQDEPALFVALTFERREVLDSSNIKPMNLIGVDRGENIPAVIALTDPEGCPLSRFKDSLGNPTHILRIGESYKEKQRTIQAKKEVEQRRAGGYSRKYASKAKNLADDMVRNTARDLLYYAVTQDAMLIFENLSRGFGRQGKRTFMAERQYTRMEDWLTAKLAYEGLPSKTYLSKTLAQYTSKTCSNCGFTITSADYDRVLEKLKKTATGWMTTINGKELKVEGQITYYNRYKRQNVVKDLSVELDRLSEESVNNDISSWTKGRSGEALSLLKKRFSHRPVQEKFVCLNCGFETHADEQAALNIARSWLFLRSQEYKKYQTNKTTGNTDKRAFVETWQSFYRKKLKEVWKPAV

SEQ ID NO: 42187 - protein, 979 aa, synthetic construct
  REGION 1..979: note = engineered CasX variant
QEIKRINKIRRRLVKDSNTKKAGKTGPMKTLLVPVMTPDLRERLENLRKKPENIPQPISNTSRANLNKLLTDYTEMKKAILHVYWEEFQKDPVGLMSRVAQPASKKIDQNKLKPEMDEKGNLTTAGFACSQCGQPLFVYKLEQVSEKGKAYTNYFGRCNVAEHEKLILLAQLKPEKDSDEAVTYSLGKFGQRALDFYSIHVTKESTHPVKPLAQIAGNRYASHPVGKALSDACMGTIASFLSKYQDIIIEHQKVVKGNQKRLESLRELAGKENLEYPSVTLPPQPHTKEGVDAYNEVIARVRMWVNLNLWQKLKLSRDDAKPLLRLKGFPSFPLVERQANEVDWWDMVCNVKKLINEKKEDGKVFWQNLAGYKRQEALRPYLSSEEDRKKGKKFARYQLGDLLLHLEKKHGEYDWGKVYDEAWERIDKKVEGLSKHIKLEEERRSEDAQSKAALTDWLRAKASFVIEGLKEADKDEFCRCELKLQKWYGDLRGKPFAIEAENSILDISGFSKQYNCAFIWQKDGVKKLNLYLIINYFKGGKLRFKKIKPEAFEANRFYTVINKKSGEIVPMEVNFNFDDPNLIILPLAFGKRQGREFIWNDLLSLETGSLKLANGRVIEKTLYNRRTRQDEPALFVALTFERREVLDSSNIKPMNLIGVDRGENIPAVIALTDPEGCPLSRFKDSLGNPTHILRIGESYKEKQRTIQAKKEVEQRRAGGYSRKYASKAKNLADDMVRNTARDLLYYAVTQDAMLIFENLSRGFGRQGKRTFMAERQYTRMEDWLTAKLAYEGLPSKTYLSKTLAQYTSKTCSNCGFTITSADYDRVLEKLKKTATGWMTTINGKELKVEGQITYYNRYKRQNVVKDLSVELDRLSEESVNNDISSWTKGRSGEALSLLKKRFSHRPVQEKFVCLNCGFETHADEQAALNIARSWLFLRSQEYKKYQTNKTTGNTDKRAFVETWQSFYRKKLKEVWKPAV

SEQ ID NO: 42188 - protein, 979 aa, synthetic construct
  REGION 1..979: note = engineered CasX variant
QEIKRINKIRRRLVKDSNTKKAGKTGPMKTLLVPVMTPDLRERLENLRKKPENIPQPISNTSRANLNKLLTDYTEMKKAILHVYWEEFQKDPVGLMSRVAQPASKKIDQNKLKPEMDEKGNLTTAGFACSQCGQPLFVYKLEQVSEKGKAYTNYFGRCNVAEHEKLILLAQLKPEKDSDEAVTYSLGKFGQRALDFYSIHVTKESTHPVKPLAQIAGNRYASSPVGKALSDACMGTIASFLSKYQDIIIEHQKVVKGNQKRLESLRELAGKENLEYPSVTLPPQPHTKEGVDAYNEVIARVRMWVNLNLWQKLKLSRDDAKPLLRLKGFPSFPLVERQANEVDWWDMVCNVKKLINEKKEDGKVFWQNLAGYKRQEALRPYLSSEEDRKKGKKFARYQLGDLLLHLEKKHGEYDWGKVYDEAWERIDKKVEGLSKHIKLEEERRSEDAQSKAALTDWLRAKASFVIEGLKEADKDEFCRCELKLQKWYGDLRGKPFAIEAENSILDISGFSKQYNCAFIWQKDGVKKLNLYLIINYFKGGKLRFKKIKPEAFEANRFYTVINKKSGEIVPMEVNFNFDDPNLIILPLAFGKRQGREFIWNDLLSLETGSLKLANGRVIEKTLYNRRTRQDEPALFVALTFERREVLDSSNIKPMNLIGVDRGENIPAVIALTDPEGCPLSRFKDSLGNPTHILRIGESYKEKQRTIQAKKEVEQRRAGGYSRKYASKAKNLADDMVRNTARDLLYYAVTQDAMLIFENLSRGFGRQGKRTFMAERQYTRMEDWLTAKLAYEGLPSKTYLSKTLAQYTSKTCSNCGFTITSADYDRVLEKLKKTATGWMTTINGKELKVEGQITYYNRYKRQNVVKDLSVELDRLSEESVNNDISSWTKGRSGEALSLLKKRFSHRPVQEKFVCLNCGFETHADEQAALNIARSWLFLRSQEYKKYQTNKTTGNTDKRAFVETWQSFYRKKLKEVWKPAV

SEQ ID NO: 42189 - protein, 979 aa, synthetic construct
  REGION 1..979: note = engineered CasX variant
QEIKRINKIRRRLVKDSNTKKAGKTGPMKTLLVPVMTPDLRERLENLRKKPENIPQPISNTSRANLNKLLTDYTEMKKAILHVYWEEFQKDPVGLMSRVAQPASKKIDQNKLKPEMDEKGNLTTAGFACSQCGQPLFVYKLEQVSEKGKAYTNYFGRCNVAEHEKLILLAQLKPEKDSDEAVTYSLGKFGQRALDFYSIHVTKESTHPVKPLAQIAGNRYASTPVGKALSDACMGTIASFLSKYQDIIIEHQKVVKGNQKRLESLRELAGKENLEYPSVTLPPQPHTKEGVDAYNEVIARVRMWVNLNLWQKLKLSRDDAKPLLRLKGFPSFPLVERQANEVDWWDMVCNVKKLINEKKEDGKVFWQNLAGYKRQEALRPYLSSEEDRKKGKKFARYQLGDLLLHLEKKHGEYDWGKVYDEAWERIDKKVEGLSKHIKLEEERRSEDAQSKAALTDWLRAKASFVIEGLKEADKDEFCRCELKLQKWYGDLRGKPFAIEAENSILDISGFSKQYNCAFIWQKDGVKKLNLYLIINYFKGGKLRFKKIKPEAFEANRFYTVINKKSGEIVPMEVNFNFDDPNLIILPLAFGKRQGREFIWNDLLSLETGSLKLANGRVIEKTLYNRRTRQDEPALFVALTFERREVLDSSNIKPMNLIGVDRGENIPAVIALTDPEGCPLSRFKDSLGNPTHILRIGESYKEKQRTIQAKKEVEQRRAGGYSRKYASKAKNLADDMVRNTARDLLYYAVTQDAMLIFENLSRGFGRQGKRTFMAERQYTRMEDWLTAKLAYEGLPSKTYLSKTLAQYTSKTCSNCGFTITSADYDRVLEKLKKTATGWMTTINGKELKVEGQITYYNRYKRQNVVKDLSVELDRLSEESVNNDISSWTKGRSGEALSLLKKRFSHRPVQEKFVCLNCGFETHADEQAALNIARSWLFLRSQEYKKYQTNKTTGNTDKRAFVETWQSFYRKKLKEVWKPAV

SEQ ID NO: 42190 - protein, 979 aa, synthetic construct
  REGION 1..979: note = engineered CasX variant
QEIKRINKIRRRLVKDSNTKKAGKTGPMKTLLVPVMTPDLRERLENLRKKPENIPQPISNTSRANLNKLLTDYTEMKKAILHVYWEEFQKDPVGLMSRVAQPASKKIDQNKLKPEMDEKGNLTTAGFACSQCGQPLFVYKLEQVSEKGKAYTNYFGRCNVAEHEKLILLAQLKPEKDSDEAVTYSLGKFGQRALDFYSIHVTKESTHPVKPLAQIAGNRYASAPVGKALSDACMGTIASFLSKYQDIIIEHQKVVKGNQKRLESLRELAGKENLEYPSVTLPPQPHTKEGVDAYNEVIARVRMWVNLNLWQKLKLSRDDAKPLLRLKGFPSFPLVERQANEVDWWDMVCNVKKLINEKKEDGKVFWQNLAGYKRQEALRPYLSSEEDRKKGKKFARYQLGDLLLHLEKKHGEYDWGKVYDEAWERIDKKVEGLSKHIKLEEERRSEDAQSKAALTDWLRAKASFVIEGLKEADKDEFCRCELKLQKWYGDLRGKPFAIEAENSILDISGFSKQYNCAFIWQKDGVKKLNLYLIINYFKGGKLRFKKIKPEAFEANRFYTVINKKSGEIVPMEVNFNFDDPNLIILPLAFGKRQGREFIWNDLLSLETGSLKLANGRVIEKTLYNRRTRQDEPALFVALTFERREVLDSSNIKPMNLIGVDRGENIPAVIALTDPEGCPLSRFKDSLGNPTHILRIGESYKEKQRTIQAKKEVEQRRAGGYSRKYASKAKNLADDMVRNTARDLLYYAVTQDAMLIFENLSRGFGRQGKRTFMAERQYTRMEDWLTAKLAYEGLPSKTYLSKTLAQYTSKTCSNCGFTITSADYDRVLEKLKKTATGWMTTINGKELKVEGQITYYNRYKRQNVVKDLSVELDRLSEESVNNDISSWTKGRSGEALSLLKKRFSHRPVQEKFVCLNCGFETHADEQAALNIARSWLFLRSQEYKKYQTNKTTGNTDKRAFVETWQSFYRKKLKEVWKPAV

SEQ ID NO: 42191 - protein, 979 aa, synthetic construct
  REGION 1..979: note = engineered CasX variant
QEIKRINKIRRRLVKDSNTKKAGKTGPMKTLLVPVMTPDLRERLENLRKKPENIPQPISNTSRANLNKLLTDYTEMKKAILHVYWEEFQKDPVGLMSRVAQPASKKIDQNKLKPEMDEKGNLTTAGFACSQCGQPLFVYKLEQVSEKGKAYTNYFGRCNVAEHEKLILLAQLKPEKDSDEAVTYSLGKFGQRALDFYSIHVTKESTHPVKPLAQIAGNRYASVPVGKALSDACMGTIASFLSKYQDIIIEHQKVVKGNQKRLESLRELAGKENLEYPSVTLPPQPHTKEGVDAYNEVIARVRMWVNLNLWQKLKLSRDDAKPLLRLKGFPSFPLVERQANEVDWWDMVCNVKKLINEKKEDGKVFWQNLAGYKRQEALRPYLSSEEDRKKGKKFARYQLGDLLLHLEKKHGEYDWGKVYDEAWERIDKKVEGLSKHIKLEEERRSEDAQSKAALTDWLRAKASFVIEGLKEADKDEFCRCELKLQKWYGDLRGKPFAIEAENSILDISGFSKQYNCAFIWQKDGVKKLNLYLIINYFKGGKLRFKKIKPEAFEANRFYTVINKKSGEIVPMEVNFNFDDPNLIILPLAFGKRQGREFIWNDLLSLETGSLKLANGRVIEKTLYNRRTRQDEPALFVALTFERREVLDSSNIKPMNLIGVDRGENIPAVIALTDPEGCPLSRFKDSLGNPTHILRIGESYKEKQRTIQAKKEVEQRRAGGYSRKYASKAKNLADDMVRNTARDLLYYAVTQDAMLIFENLSRGFGRQGKRTFMAERQYTRMEDWLTAKLAYEGLPSKTYLSKTLAQYTSKTCSNCGFTITSADYDRVLEKLKKTATGWMTTINGKELKVEGQITYYNRYKRQNVVKDLSVELDRLSEESVNNDISSWTKGRSGEALSLLKKRFSHRPVQEKFVCLNCGFETHADEQAALNIARSWLFLRSQEYKKYQTNKTTGNTDKRAFVETWQSFYRKKLKEVWKPAV

SEQ ID NO: 42192 - protein, 979 aa, synthetic construct
  REGION 1..979: note = engineered CasX variant
QEIKRINKIRRRLVKDSNTKKAGKTGPMKTLLVPVMTPDLRERLENLRKKPENIPQPISNTSRANLNKLLTDYTEMKKAILHVYWEEFQKDPVGLMSRVAQPASKKIDQNKLKPEMDEKGNLTTAGFACSQCGQPLFVYKLEQVSEKGKAYTNYFGRCNVAEHEKLIKLAQLKPEKDSDEAVTYSLGKFGQRALDFYSIHVTKESTHPVKPLAQIAGNRYASGPVGKALSDACMGTIASFLSKYQDIIIEHQKVVKGNQKRLESLRELAGKENLEYPSVTLPPQPHTKEGVDAYNEVIARVRMWVNLNLWQKLKLSRDDAKPLLRLKGFPSFPLVERQANEVDWWDMVCNVKKLINEKKEDGKVFWQNLAGYKRQEALRPYLSSEEDRKKGKKFARYQLGDLLLHLEKKHGEYDWGKVYDEAWERIDKKVEGLSKHIKLEEERRSEDAQSKAALTDWLRAKASFVIEGLKEADKDEFCRCELKLQKWYGDLRGKPFAIEAENSILDISGFSKQYNCAFIWQKDGVKKLNLYLIINYFKGGKLRFKKIKPEAFEANRFYTVINKKSGEIVPMEVNFNFDDPNLIILPLAFGKRQGREFIWNDLLSLETGSLKLANGRVIEKTLYNRRTRQDEPALFVALTFERREVLDSSNIKPMNLIGVDRGENIPAVIALTDPEGCPLSRFKDSLGNPTHILRIGESYKEKQRTIQAKKEVEQRRAGGYSRKYASKAKNLADDMVRNTARDLLYYAVTQDAMLIFENLSRGFGRQGKRTFMAERQYTRMEDWLTAKLAYEGLPSKTYLSKTLAQYTSKTCSNCGFTITSADYDRVLEKLKKTATGWMTTINGKELKVEGQITYYNRYKRQNVVKDLSVELDRLSEESVNNDISSWTKGRSGEALSLLKKRFSHRPVQEKFVCLNCGFETHADEQAALNIARSWLFLRSQEYKKYQTNKTTGNTDKRAFVETWQSFYRKKLKEVWKPAV

SEQ ID NO: 42193 - protein, 978 aa, synthetic construct
  REGION 1..978: note = engineered CasX variant
QEIKRINKIRRRLVKDSNTKKAGKTGPMKTLLVPVMTPDLRERLENLRKKPENIPQPISNTSRANLNKLLTDYTEMKKAILHVYWEEFQKDPVGLMSRVAQPASKKIDQNKLKPEMDEKGNLTTAGFACSQCGQPLFVYKLEQVSEKGKAYTNYFGRCNVAEHEKLILLAQLKPEKDSDEAVTYSLGKFGQRALDFYSIHVTKESTHPVKPLAQIAGNRYASPVGKALSDACMGTIASFLSKYQDIIIEHQKVVKGNQKRLESLRELAGKENLEYPSVTLPPQPHTKEGVDAYNEVIARVRMWVNLNLWQKLKLSRDDAKPLLRLKGFPSFPLVERQANEVDWWDMVCNVKKLINEKKEDGKVFWQNLAGYKRQEALRPYLSSEEDRKKGKKFARYQLGDLLLHLEKKHGEYDWGKVYDEAWERIDKKVEGLSKHIKLEEERRSEDAQSKAALTDWLRAKASFVIEGLKEADKDEFCRCELKLQKWYGDLRGKPFAIEAENSILDISGFSKQYNCAFIWQKDGVKKLNLYLIINYFKGGKLRFKKIKPEAFEANRFYTVINKKSGEIVPMEVNFNFDDPNLIILPLAFGKRQGREFIWNDLLSLETGSLKLANGRVIEKTLYNRRTRQDEPALFVALTFERREVLDSSNIKPMNLIGVDRGENIPAVIALTDPEGCPLSRFKDSLGNPTHILRIGESYKEKQRTIQAKKEVEQRRAGGYSRKYASKAKNLADDMVRNTARDLLYYAVTQDAMLIFENLSRGFGRQGKRTFMAERQYTRMEDWLTAKLAYEGLPSKTYLSKTLAQYTSKTCSNCGFTITSADYDRVLEKLKKTATGWMTTINGKELKVEGQITYYNRYKRQNVVKDLSVELDRLSEESVNNDISSWTKGRSGEALSLLKKRFSHRPVQEKFVCLNCGFETHADEQAALNIARSWLFLRSQEYKKYQTNKTTGNTDKRAFVETWQSFYRKKLKEVWKPAV

SEQ ID NO: 42194 - protein, 978 aa, synthetic construct
  REGION 1..978: note = engineered CasX variant
QEIKRINKIRRRLVKDSNTKKAGKTGPMKTLLVPVMTPDLRERLENLRKKPENIPQPISNTSRANLNKLLTDYTEMKKAILHVYWEEFQKDPVGLMSRVAQPASKKIDQNKLKPEMDEKGNLTTAGFACSQCGQPLFVYKLEQVSEKGKAYTNYFGRCNVAEHEKLILLAQLKPEKDSDEAVTYSLGKFGQRALDFYSIHVTKESTHPVKPLAQIAGNRYASYPVGKALSDACMGTIASFLSKYQDIIIEHQKVVKGNQKRLESLRELAGKENLEYPSVTLPPQPHTKEGVDAYNEVIARVRMWVNLNLWQKLKLSRDDAKPLLRLKGFPSFPLVERQANEVDWWDMVCNVKKLINEKKEDGKVFWQNLAGYKRQEALRPYLSSEEDRKKGKKFARYQLGDLLLHLEKKHGEDWGDVYDEAWERIDKKVEGLSKHIKLEEERRSEDAQSKAALTDWLRAKASFVIEGLKEADKDEFCRCELKLQKWYGDLRGKPFAIEAENSILDISGFSKQYNCAFIWQKDGVKKLNLYLIINYFKGGKLRFKKIKPEAFEANRFYTVINKKSGEIVPMEVNFNFDDPNLIILPLAFGKRQGREFIWNDLLSLETGSLKLANGRVIEKTLYNRRTRQDEPALFVALTFERREVLDSSNIKPMNLIGVDRGENIPAVIALTDPEGCPLSRFKDSLGNPTHILRIGESYKEKQRTIQAKKEVEQRRAGGYSRKYASKAKNLADDMVRNTARDLLYYAVTQDAMLIFENLSRGFGRQGKRTFMAERQYTRMEDWLTAKLAYEGLPSKTYLSKTLAQYTSKTCSNCGFTITSADYDRVLEKLKKTATGWMTTINGKELKVEGQITYYNRYKRQNVVKDLSVELDRLSEESVNNDISSWTKGRSGEALSLLKKRFSHRPVQEKFVCLNCGFETHADEQAALNIARSWLFLRSQEYKKYQTNKTTGNTDKRAFVETWQSFYRKKLKEVWKPAV

SEQ ID NO: 42195 - protein, 978 aa, synthetic construct
  REGION 1..978: note = engineered CasX variant
QEIKRINKIRRRLVKDSNTKKAGKTGPMKTLLVPVMTPDLRERLENLRKKPENIPQPISNTSRANLNKLLTDYTEMKKAILHVYWEEFQKDPVGLMSRVAQPASKKIDQNKLKPEMDEKGNLTTAGFACSQCGQPLFVYKLEQVSEKGKAYTNYFGRCNVAEHEKLILLAQLKPEKDSDEAVTYSLGKFGQRALDFYSIHVTKESTHPVKPLAQIAGNRYASHPVGKALSDACMGTIASFLSKYQDIIIEHQKVVKGNQKRLESLRELAGKENLEYPSVTLPPQPHTKEGVDAYNEVIARVRMWVNLNLWQKLKLSRDDAKPLLRLKGFPSFPLVERQANEVDWWDMVCNVKKLINEKKEDGKVFWQNLAGYKRQEALRPYLSSEEDRKKGKKFARYQLGDLLLHLEKKHGEDWGDVYDEAWERIDKKVEGLSKHIKLEEERRSEDAQSKAALTDWLRAKASFVIEGLKEADKDEFCRCELKLQKWYGDLRGKPFAIEAENSILDISGFSKQYNCAFIWQKDGVKKLNLYLIINYFKGGKLRFKKIKPEAFEANRFYTVINKKSGEIVPMEVNFNFDDPNLIILPLAFGKRQGREFIWNDLLSLETGSLKLANGRVIEKTLYNRRTRQDEPALFVALTFERREVLDSSNIKPMNLIGVDRGENIPAVIALTDPEGCPLSRFKDSLGNPTHILRIGESYKEKQRTIQAKKEVEQRRAGGYSRKYASKAKNLADDMVRNTARDLLYYAVTQDAMLIFENLSRGFGRQGKRTFMAERQYTRMEDWLTAKLAYEGLPSKTYLSKTLAQYTSKTCSNCGFTITSADYDRVLEKLKKTATGWMTTINGKELKVEGQITYYNRYKRQNVVKDLSVELDRLSEESVNNDISSWTKGRSGEALSLLKKRFSHRPVQEKFVCLNCGFETHADEQAALNIARSWLFLRSQEYKKYQTNKTTGNTDKRAFVETWQSFYRKKLKEVWKPAV

SEQ ID NO: 42196 - protein, 978 aa, synthetic construct
  REGION 1..978: note = engineered CasX variant
QEIKRINKIRRRLVKDSNTKKAGKTGPMKTLLVPVMTPDLRERLENLRKKPENIPQPISNTSRANLNKLLTDYTEMKKAILHVYWEEFQKDPVGLMSRVAQPASKKIDQNKLKPEMDEKGNLTTAGFACSQCGQPLFVYKLEQVSEKGKAYTNYFGRCNVAEHEKLILLAQLKPEKDSDEAVTYSLGKFGQRALDFYSIHVTKESTHPVKPLAQIAGNRYASSPVGKALSDACMGTIASFLSKYQDIIIEHQKVVKGNQKRLESLRELAGKENLEYPSVTLPPQPHTKEGVDAYNEVIARVRMWVNLNLWQKLKLSRDDAKPLLRLKGFPSFPLVERQANEVDWWDMVCNVKKLINEKKEDGKVFWQNLAGYKRQEALRPYLSSEEDRKKGKKFARYQLGDLLLHLEKKHGEDWGDVYDEAWERIDKKVEGLSKHIKLEEERRSEDAQSKAALTDWLRAKASFVIEGLKEADKDEFCRCELKLQKWYGDLRGKPFAIEAENSILDISGFSKQYNCAFIWQKDGVKKLNLYLIINYFKGGKLRFKKIKPEAFEANRFYTVINKKSGEIVPMEVNFNFDDPNLIILPLAFGKRQGREFIWNDLLSLETGSLKLANGRVIEKTLYNRRTRQDEPALFVALTFERREVLDSSNIKPMNLIGVDRGENIPAVIALTDPEGCPLSRFKDSLGNPTHILRIGESYKEKQRTIQAKKEVEQRRAGGYSRKYASKAKNLADDMVRNTARDLLYYAVTQDAMLIFENLSRGFGRQGKRTFMAERQYTRMEDWLTAKLAYEGLPSKTYLSKTLAQYTSKTCSNCGFTITSADYDRVLEKLKKTATGWMTTINGKELKVEGQITYYNRYKRQNVVKDLSVELDRLSEESVNNDISSWTKGRSGEALSLLKKRFSHRPVQEKFVCLNCGFETHADEQAALNIARSWLFLRSQEYKKYQTNKTTGNTDKRAFVETWQSFYRKKLKEVWKPAV

SEQ ID NO: 42197 - protein, 978 aa, synthetic construct
  REGION 1..978: note = engineered CasX variant
QEIKRINKIRRRLVKDSNTKKAGKTGPMKTLLVPVMTPDLRERLENLRKKPENIPQPISNTSRANLNKLLTDYTEMKKAILHVYWEEFQKDPVGLMSRVAQPASKKIDQNKLKPEMDEKGNLTTAGFACSQCGQPLFVYKLEQVSEKGKAYTNYFGRCNVAEHEKLILLAQLKPEKDSDEAVTYSLGKFGQRALDFYSIHVTKESTHPVKPLAQIAGNRYASTPVGKALSDACMGTIASFLSKYQDIIIEHQKVVKGNQKRLESLRELAGKENLEYPSVTLPPQPHTKEGVDAYNEVIARVRMWVNLNLWQKLKLSRDDAKPLLRLKGFPSFPLVERQANEVDWWDMVCNVKKLINEKKEDGKVFWQNLAGYKRQEALRPYLSSEEDRKKGKKFARYQLGDLLLHLEKKHGEDWGDVYDEAWERIDKKVEGLSKHIKLEEERRSEDAQSKAALTDWLRAKASFVIEGLKEADKDEFCRCELKLQKWYGDLRGKPFAIEAENSILDISGFSKQYNCAFIWQKDGVKKLNLYLIINYFKGGKLRFKKIKPEAFEANRFYTVINKKSGEIVPMEVNFNFDDPNLIILPLAFGKRQGREFIWNDLLSLETGSLKLANGRVIEKTLYNRRTRQDEPALFVALTFERREVLDSSNIKPMNLIGVDRGENIPAVIALTDPEGCPLSRFKDSLGNPTHILRIGESYKEKQRTIQAKKEVEQRRAGGYSRKYASKAKNLADDMVRNTARDLLYYAVTQDAMLIFENLSRGFGRQGKRTFMAERQYTRMEDWLTAKLAYEGLPSKTYLSKTLAQYTSKTCSNCGFTITSADYDRVLEKLKKTATGWMTTINGKELKVEGQITYYNRYKRQNVVKDLSVELDRLSEESVNNDISSWTKGRSGEALSLLKKRFSHRPVQEKFVCLNCGFETHADEQAALNIARSWLFLRSQEYKKYQTNKTTGNTDKRAFVETWQSFYRKKLKEVWKPAV

SEQ ID NO: 42198 - protein, 978 aa, synthetic construct
  REGION 1..978: note = engineered CasX variant
QEIKRINKIRRRLVKDSNTKKAGKTGPMKTLLVPVMTPDLRERLENLRKKPENIPQPISNTSRANLNKLLTDYTEMKKAILHVYWEEFQKDPVGLMSRVAQPASKKIDQNKLKPEMDEKGNLTTAGFACSQCGQPLFVYKLEQVSEKGKAYTNYFGRCNVAEHEKLILLAQLKPEKDSDEAVTYSLGKFGQRALDFYSIHVTKESTHPVKPLAQIAGNRYASAPVGKALSDACMGTIASFLSKYQDIIIEHQKVVKGNQKRLESLRELAGKENLEYPSVTLPPQPHTKEGVDAYNEVIARVRMWVNLNLWQKLKLSRDDAKPLLRLKGFPSFPLVERQANEVDWWDMVCNVKKLINEKKEDGKVFWQNLAGYKRQEALRPYLSSEEDRKKGKKFARYQLGDLLLHLEKKHGEDWGDVYDEAWERIDKKVEGLSKHIKLEEERRSEDAQSKAALTDWLRAKASFVIEGLKEADKDEFCRCELKLQKWYGDLRGKPFAIEAENSILDISGFSKQYNCAFIWQKDGVKKLNLYLIINYFKGGKLRFKKIKPEAFEANRFYTVINKKSGEIVPMEVNFNFDDPNLIILPLAFGKRQGREFIWNDLLSLETGSLKLANGRVIEKTLYNRRTRQDEPALFVALTFERREVLDSSNIKPMNLIGVDRGENIPAVIALTDPEGCPLSRFKDSLGNPTHILRIGESYKEKQRTIQAKKEVEQRRAGGYSRKYASKAKNLADDMVRNTARDLLYYAVTQDAMLIFENLSRGFGRQGKRTFMAERQYTRMEDWLTAKLAYEGLPSKTYLSKTLAQYTSKTCSNCGFTITSADYDRVLEKLKKTATGWMTTINGKELKVEGQITYYNRYKRQNVVKDLSVELDRLSEESVNNDISSWTKGRSGEALSLLKKRFSHRPVQEKFVCLNCGFETHADEQAALNIARSWLFLRSQEYKKYQTNKTTGNTDKRAFVETWQSFYRKKLKEVWKPAV

SEQ ID NO: 42199 - protein, 978 aa, synthetic construct
  REGION 1..978: note = engineered CasX variant
QEIKRINKIRRRLVKDSNTKKAGKTGPMKTLLVPVMTPDLRERLENLRKKPENIPQPISNTSRANLNKLLTDYTEMKKAILHVYWEEFQKDPVGLMSRVAQPASKKIDQNKLKPEMDEKGNLTTAGFACSQCGQPLFVYKLEQVSEKGKAYTNYFGRCNVAEHEKLILLAQLKPEKDSDEAVTYSLGKFGQRALDFYSIHVTKESTHPVKPLAQIAGNRYASVPVGKALSDACMGTIASFLSKYQDIIIEHQKVVKGNQKRLESLRELAGKENLEYPSVTLPPQPHTKEGVDAYNEVIARVRMWVNLNLWQKLKLSRDDAKPLLRLKGFPSFPLVERQANEVDWWDMVCNVKKLINEKKEDGKVFWQNLAGYKRQEALRPYLSSEEDRKKGKKFARYQLGDLLLHLEKKHGEDWGDVYDEAWERIDKKVEGLSKHIKLEEERRSEDAQSKAALTDWLRAKASFVIEGLKEADKDEFCRCELKLQKWYGDLRGKPFAIEAENSILDISGFSKQYNCAFIWQKDGVKKLNLYLIINYFKGGKLRFKKIKPEAFEANRFYTVINKKSGEIVPMEVNFNFDDPNLIILPLAFGKRQGREFIWNDLLSLETGSLKLANGRVIEKTLYNRRTRQDEPALFVALTFERREVLDSSNIKPMNLIGVDRGENIPAVIALTDPEGCPLSRFKDSLGNPTHILRIGESYKEKQRTIQAKKEVEQRRAGGYSRKYASKAKNLADDMVRNTARDLLYYAVTQDAMLIFENLSRGFGRQGKRTFMAERQYTRMEDWLTAKLAYEGLPSKTYLSKTLAQYTSKTCSNCGFTITSADYDRVLEKLKKTATGWMTTINGKELKVEGQITYYNRYKRQNVVKDLSVELDRLSEESVNNDISSWTKGRSGEALSLLKKRFSHRPVQEKFVCLNCGFETHADEQAALNIARSWLFLRSQEYKKYQTNKTTGNTDKRAFVETWQSFYRKKLKEVWKPAV

SEQ ID NO: 42200 - protein, 978 aa, synthetic construct
  REGION 1..978: note = engineered CasX variant
QEIKRINKIRRRLVKDSNTKKAGKTGPMKTLLVPVMTPDLRERLENLRKKPENIPQPISNTSRANLNKLLTDYTEMKKAILHVYWEEFQKDPVGLMSRVAQPASKKIDQNKLKPEMDEKGNLTTAGFACSQCGQPLFVYKLEQVSEKGKAYTNYFGRCNVAEHEKLIKLAQLKPEKDSDEAVTYSLGKFGQRALDFYSIHVTKESTHPVKPLAQIAGNRYASGPVGKALSDACMGTIASFLSKYQDIIIEHQKVVKGNQKRLESLRELAGKENLEYPSVTLPPQPHTKEGVDAYNEVIARVRMWVNLNLWQKLKLSRDDAKPLLRLKGFPSFPLVERQANEVDWWDMVCNVKKLINEKKEDGKVFWQNLAGYKRQEALRPYLSSEEDRKKGKKFARYQLGDLLLHLEKKHGEDWGDVYDEAWERIDKKVEGLSKHIKLEEERRSEDAQSKAALTDWLRAKASFVIEGLKEADKDEFCRCELKLQKWYGDLRGKPFAIEAENSILDISGFSKQYNCAFIWQKDGVKKLNLYLIINYFKGGKLRFKKIKPEAFEANRFYTVINKKSGEIVPMEVNFNFDDPNLIILPLAFGKRQGREFIWNDLLSLETGSLKLANGRVIEKTLYNRRTRQDEPALFVALTFERREVLDSSNIKPMNLIGVDRGENIPAVIALTDPEGCPLSRFKDSLGNPTHILRIGESYKEKQRTIQAKKEVEQRRAGGYSRKYASKAKNLADDMVRNTARDLLYYAVTQDAMLIFENLSRGFGRQGKRTFMAERQYTRMEDWLTAKLAYEGLPSKTYLSKTLAQYTSKTCSNCGFTITSADYDRVLEKLKKTATGWMTTINGKELKVEGQITYYNRYKRQNVVKDLSVELDRLSEESVNNDISSWTKGRSGEALSLLKKRFSHRPVQEKFVCLNCGFETHADEQAALNIARSWLFLRSQEYKKYQTNKTTGNTDKRAFVETWQSFYRKKLKEVWKPAV

SEQ ID NO: 42201 - protein, 977 aa, synthetic construct
  REGION 1..977: note = engineered CasX variant
QEIKRINKIRRRLVKDSNTKKAGKTGPMKTLLVPVMTPDLRERLENLRKKPENIPQPISNTSRANLNKLLTDYTEMKKAILHVYWEEFQKDPVGLMSRVAQPASKKIDQNKLKPEMDEKGNLTTAGFACSQCGQPLFVYKLEQVSEKGKAYTNYFGRCNVAEHEKLILLAQLKPEKDSDEAVTYSLGKFGQRALDFYSIHVTKESTHPVKPLAQIAGNRYASPVGKALSDACMGTIASFLSKYQDIIIEHQKVVKGNQKRLESLRELAGKENLEYPSVTLPPQPHTKEGVDAYNEVIARVRMWVNLNLWQKLKLSRDDAKPLLRLKGFPSFPLVERQANEVDWWDMVCNVKKLINEKKEDGKVFWQNLAGYKRQEALRPYLSSEEDRKKGKKFARYQLGDLLLHLEKKHGEDWGDVYDEAWERIDKKVEGLSKHIKLEEERRSEDAQSKAALTDWLRAKASFVIEGLKEADKDEFCRCELKLQKWYGDLRGKPFAIEAENSILDISGFSKQYNCAFIWQKDGVKKLNLYLIINYFKGGKLRFKKIKPEAFEANRFYTVINKKSGEIVPMEVNFNFDDPNLIILPLAFGKRQGREFIWNDLLSLETGSLKLANGRVIEKTLYNRRTRQDEPALFVALTFERREVLDSSNIKPMNLIGVDRGENIPAVIALTDPEGCPLSRFKDSLGNPTHILRIGESYKEKQRTIQAKKEVEQRRAGGYSRKYASKAKNLADDMVRNTARDLLYYAVTQDAMLIFENLSRGFGRQGKRTFMAERQYTRMEDWLTAKLAYEGLPSKTYLSKTLAQYTSKTCSNCGFTITSADYDRVLEKLKKTATGWMTTINGKELKVEGQITYYNRYKRQNVVKDLSVELDRLSEESVNNDISSWTKGRSGEALSLLKKRFSHRPVQEKFVCLNCGFETHADEQAALNIARSWLFLRSQEYKKYQTNKTTGNTDKRAFVETWQSFYRKKLKEVWKPAV

SEQ ID NO: 42202 - protein, 978 aa, synthetic construct
  REGION 1..978: note = engineered CasX variant
QEIKRINKIRRRLVKDSNTKKAGKTGPMKTLLVPVMTPDLRERLENLRKKPENIPQPISNTSRANLNKLLTDYTEMKKAILHVYWEEFQKDPVGLMSRVAQPASKKIDQNKLKPEMDEKGNLTTAGFACSQCGQPLFVYKLEQVSEKGKAYTNYFGRCNVAEHEKLILLAQLKPEKDSDEAVTYSLGKFGQRALDFYSIHVTKESTHPVKPLAQIAGNRYASYPVGKALSDACMGTIASFLSKYQDIIIEHQKVVKGNQKRLESLRELAGKENLEYPSVTLPPQPHTKEGVDAYNEVIARVRMWVNLNLWQKLKLSRDDAKPLLRLKGFPSFPLVERQANEVDWWDMVCNVKKLINEKKEDGKVFWQNLAGYKRQEALRPYLSSEEDRKKGKKFARYQLGDLLLHLEKKHGEDWGKVYGEAWERIDKKVEGLSKHIKLEEERRSEDAQSKAALTDWLRAKASFVIEGLKEADKDEFCRCELKLQKWYGDLRGKPFAIEAENSILDISGFSKQYNCAFIWQKDGVKKLNLYLIINYFKGGKLRFKKIKPEAFEANRFYTVINKKSGEIVPMEVNFNFDDPNLIILPLAFGKRQGREFIWNDLLSLETGSLKLANGRVIEKTLYNRRTRQDEPALFVALTFERREVLDSSNIKPMNLIGVDRGENIPAVIALTDPEGCPLSRFKDSLGNPTHILRIGESYKEKQRTIQAKKEVEQRRAGGYSRKYASKAKNLADDMVRNTARDLLYYAVTQDAMLIFENLSRGFGRQGKRTFMAERQYTRMEDWLTAKLAYEGLPSKTYLSKTLAQYTSKTCSNCGFTITSADYDRVLEKLKKTATGWMTTINGKELKVEGQITYYNRYKRQNVVKDLSVELDRLSEESVNNDISSWTKGRSGEALSLLKKRFSHRPVQEKFVCLNCGFETHADEQAALNIARSWLFLRSQEYKKYQTNKTTGNTDKRAFVETWQSFYRKKLKEVWKPAV

SEQ ID NO: 42203 - protein, 978 aa, synthetic construct
  REGION 1..978: note = engineered CasX variant
QEIKRINKIRRRLVKDSNTKKAGKTGPMKTLLVPVMTPDLRERLENLRKKPENIPQPISNTSRANLNKLLTDYTEMKKAILHVYWEEFQKDPVGLMSRVAQPASKKIDQNKLKPEMDEKGNLTTAGFACSQCGQPLFVYKLEQVSEKGKAYTNYFGRCNVAEHEKLILLAQLKPEKDSDEAVTYSLGKFGQRALDFYSIHVTKESTHPVKPLAQIAGNRYASHPVGKALSDACMGTIASFLSKYQDIIIEHQKVVKGNQKRLESLRELAGKENLEYPSVTLPPQPHTKEGVDAYNEVIARVRMWVNLNLWQKLKLSRDDAKPLLRLKGFPSFPLVERQANEVDWWDMVCNVKKLINEKKEDGKVFWQNLAGYKRQEALRPYLSSEEDRKKGKKFARYQLGDLLLHLEKKHGEDWGKVYGEAWERIDKKVEGLSKHIKLEEERRSEDAQSKAALTDWLRAKASFVIEGLKEADKDEFCRCELKLQKWYGDLRGKPFAIEAENSILDISGFSKQYNCAFIWQKDGVKKLNLYLIINYFKGGKLRFKKIKPEAFEANRFYTVINKKSGEIVPMEVNFNFDDPNLIILPLAFGKRQGREFIWNDLLSLETGSLKLANGRVIEKTLYNRRTRQDEPALFVALTFERREVLDSSNIKPMNLIGVDRGENIPAVIALTDPEGCPLSRFKDSLGNPTHILRIGESYKEKQRTIQAKKEVEQRRAGGYSRKYASKAKNLADDMVRNTARDLLYYAVTQDAMLIFENLSRGFGRQGKRTFMAERQYTRMEDWLTAKLAYEGLPSKTYLSKTLAQYTSKTCSNCGFTITSADYDRVLEKLKKTATGWMTTINGKELKVEGQITYYNRYKRQNVVKDLSVELDRLSEESVNNDISSWTKGRSGEALSLLKKRFSHRPVQEKFVCLNCGFETHADEQAALNIARSWLFLRSQEYKKYQTNKTTGNTDKRAFVETWQSFYRKKLKEVWKPAV

SEQ ID NO: 42204 - protein, 978 aa, synthetic construct
  REGION 1..978: note = engineered CasX variant
QEIKRINKIRRRLVKDSNTKKAGKTGPMKTLLVPVMTPDLRERLENLRKKPENIPQPISNTSRANLNKLLTDYTEMKKAILHVYWEEFQKDPVGLMSRVAQPASKKIDQNKLKPEMDEKGNLTTAGFACSQCGQPLFVYKLEQVSEKGKAYTNYFGRCNVAEHEKLILLAQLKPEKDSDEAVTYSLGKFGQRALDFYSIHVTKESTHPVKPLAQIAGNRYASSPVGKALSDACMGTIASFLSKYQDIIIEHQKVVKGNQKRLESLRELAGKENLEYPSVTLPPQPHTKEGVDAYNEVIARVRMWVNLNLWQKLKLSRDDAKPLLRLKGFPSFPLVERQANEVDWWDMVCNVKKLINEKKEDGKVFWQNLAGYKRQEALRPYLSSEEDRKKGKKFARYQLGDLLLHLEKKHGEDWGKVYGEAWERIDKKVEGLSKHIKLEEERRSEDAQSKAALTDWLRAKASFVIEGLKEADKDEFCRCELKLQKWYGDLRGKPFAIEAENSILDISGFSKQYNCAFIWQKDGVKKLNLYLIINYFKGGKLRFKKIKPEAFEANRFYTVINKKSGEIVPMEVNFNFDDPNLIILPLAFGKRQGREFIWNDLLSLETGSLKLANGRVIEKTLYNRRTRQDEPALFVALTFERREVLDSSNIKPMNLIGVDRGENIPAVIALTDPEGCPLSRFKDSLGNPTHILRIGESYKEKQRTIQAKKEVEQRRAGGYSRKYASKAKNLADDMVRNTARDLLYYAVTQDAMLIFENLSRGFGRQGKRTFMAERQYTRMEDWLTAKLAYEGLPSKTYLSKTLAQYTSKTCSNCGFTITSADYDRVLEKLKKTATGWMTTINGKELKVEGQITYYNRYKRQNVVKDLSVELDRLSEESVNNDISSWTKGRSGEALSLLKKRFSHRPVQEKFVCLNCGFETHADEQAALNIARSWLFLRSQEYKKYQTNKTTGNTDKRAFVETWQSFYRKKLKEVWKPAV

SEQ ID NO: 42205 - protein, 978 aa, synthetic construct
  REGION 1..978: note = engineered CasX variant
QEIKRINKIRRRLVKDSNTKKAGKTGPMKTLLVPVMTPDLRERLENLRKKPENIPQPISNTSRANLNKLLTDYTEMKKAILHVYWEEFQKDPVGLMSRVAQPASKKIDQNKLKPEMDEKGNLTTAGFACSQCGQPLFVYKLEQVSEKGKAYTNYFGRCNVAEHEKLILLAQLKPEKDSDEAVTYSLGKFGQRALDFYSIHVTKESTHPVKPLAQIAGNRYASTPVGKALSDACMGTIASFLSKYQDIIIEHQKVVKGNQKRLESLRELAGKENLEYPSVTLPPQPHTKEGVDAYNEVIARVRMWVNLNLWQKLKLSRDDAKPLLRLKGFPSFPLVERQANEVDWWDMVCNVKKLINEKKEDGKVFWQNLAGYKRQEALRPYLSSEEDRKKGKKFARYQLGDLLLHLEKKHGEDWGKVYGEAWERIDKKVEGLSKHIKLEEERRSEDAQSKAALTDWLRAKASFVIEGLKEADKDEFCRCELKLQKWYGDLRGKPFAIEAENSILDISGFSKQYNCAFIWQKDGVKKLNLYLIINYFKGGKLRFKKIKPEAFEANRFYTVINKKSGEIVPMEVNFNFDDPNLIILPLAFGKRQGREFIWNDLLSLETGSLKLANGRVIEKTLYNRRTRQDEPALFVALTFERREVLDSSNIKPMNLIGVDRGENIPAVIALTDPEGCPLSRFKDSLGNPTHILRIGESYKEKQRTIQAKKEVEQRRAGGYSRKYASKAKNLADDMVRNTARDLLYYAVTQDAMLIFENLSRGFGRQGKRTFMAERQYTRMEDWLTAKLAYEGLPSKTYLSKTLAQYTSKTCSNCGFTITSADYDRVLEKLKKTATGWMTTINGKELKVEGQITYYNRYKRQNVVKDLSVELDRLSEESVNNDISSWTKGRSGEALSLLKKRFSHRPVQEKFVCLNCGFETHADEQAALNIARSWLFLRSQEYKKYQTNKTTGNTDKRAFVETWQSFYRKKLKEVWKPAV

SEQ ID NO: 42206 - protein, 978 aa, synthetic construct
  REGION 1..978: note = engineered CasX variant
QEIKRINKIRRRLVKDSNTKKAGKTGPMKTLLVPVMTPDLRERLENLRKKPENIPQPISNTSRANLNKLLTDYTEMKKAILHVYWEEFQKDPVGLMSRVAQPASKKIDQNKLKPEMDEKGNLTTAGFACSQCGQPLFVYKLEQVSEKGKAYTNYFGRCNVAEHEKLILLAQLKPEKDSDEAVTYSLGKFGQRALDFYSIHVTKESTHPVKPLAQIAGNRYASAPVGKALSDACMGTIASFLSKYQDIIIEHQKVVKGNQKRLESLRELAGKENLEYPSVTLPPQPHTKEGVDAYNEVIARVRMWVNLNLWQKLKLSRDDAKPLLRLKGFPSFPLVERQANEVDWWDMVCNVKKLINEKKEDGKVFWQNLAGYKRQEALRPYLSSEEDRKKGKKFARYQLGDLLLHLEKKHGEDWGKVYGEAWERIDKKVEGLSKHIKLEEERRSEDAQSKAALTDWLRAKASFVIEGLKEADKDEFCRCELKLQKWYGDLRGKPFAIEAENSILDISGFSKQYNCAFIWQKDGVKKLNLYLIINYFKGGKLRFKKIKPEAFEANRFYTVINKKSGEIVPMEVNFNFDDPNLIILPLAFGKRQGREFIWNDLLSLETGSLKLANGRVIEKTLYNRRTRQDEPALFVALTFERREVLDSSNIKPMNLIGVDRGENIPAVIALTDPEGCPLSRFKDSLGNPTHILRIGESYKEKQRTIQAKKEVEQRRAGGYSRKYASKAKNLADDMVRNTARDLLYYAVTQDAMLIFENLSRGFGRQGKRTFMAERQYTRMEDWLTAKLAYEGLPSKTYLSKTLAQYTSKTCSNCGFTITSADYDRVLEKLKKTATGWMTTINGKELKVEGQITYYNRYKRQNVVKDLSVELDRLSEESVNNDISSWTKGRSGEALSLLKKRFSHRPVQEKFVCLNCGFETHADEQAALNIARSWLFLRSQEYKKYQTNKTTGNTDKRAFVETWQSFYRKKLKEVWKPAV

SEQ ID NO: 42207 - protein, 978 aa, synthetic construct
  REGION 1..978: note = engineered CasX variant
QEIKRINKIRRRLVKDSNTKKAGKTGPMKTLLVPVMTPDLRERLENLRKKPENIPQPISNTSRANLNKLLTDYTEMKKAILHVYWEEFQKDPVGLMSRVAQPASKKIDQNKLKPEMDEKGNLTTAGFACSQCGQPLFVYKLEQVSEKGKAYTNYFGRCNVAEHEKLILLAQLKPEKDSDEAVTYSLGKFGQRALDFYSIHVTKESTHPVKPLAQIAGNRYASVPVGKALSDACMGTIASFLSKYQDIIIEHQKVVKGNQKRLESLRELAGKENLEYPSVTLPPQPHTKEGVDAYNEVIARVRMWVNLNLWQKLKLSRDDAKPLLRLKGFPSFPLVERQANEVDWWDMVCNVKKLINEKKEDGKVFWQNLAGYKRQEALRPYLSSEEDRKKGKKFARYQLGDLLLHLEKKHGEDWGKVYGEAWERIDKKVEGLSKHIKLEEERRSEDAQSKAALTDWLRAKASFVIEGLKEADKDEFCRCELKLQKWYGDLRGKPFAIEAENSILDISGFSKQYNCAFIWQKDGVKKLNLYLIINYFKGGKLRFKKIKPEAFEANRFYTVINKKSGEIVPMEVNFNFDDPNLIILPLAFGKRQGREFIWNDLLSLETGSLKLANGRVIEKTLYNRRTRQDEPALFVALTFERREVLDSSNIKPMNLIGVDRGENIPAVIALTDPEGCPLSRFKDSLGNPTHILRIGESYKEKQRTIQAKKEVEQRRAGGYSRKYASKAKNLADDMVRNTARDLLYYAVTQDAMLIFENLSRGFGRQGKRTFMAERQYTRMEDWLTAKLAYEGLPSKTYLSKTLAQYTSKTCSNCGFTITSADYDRVLEKLKKTATGWMTTINGKELKVEGQITYYNRYKRQNVVKDLSVELDRLSEESVNNDISSWTKGRSGEALSLLKKRFSHRPVQEKFVCLNCGFETHADEQAALNIARSWLFLRSQEYKKYQTNKTTGNTDKRAFVETWQSFYRKKLKEVWKPAV

SEQ ID NO: 42208 - protein, 978 aa, synthetic construct
  REGION 1..978: note = engineered CasX variant
QEIKRINKIRRRLVKDSNTKKAGKTGPMKTLLVPVMTPDLRERLENLRKKPENIPQPISNTSRANLNKLLTDYTEMKKAILHVYWEEFQKDPVGLMSRVAQPASKKIDQNKLKPEMDEKGNLTTAGFACSQCGQPLFVYKLEQVSEKGKAYTNYFGRCNVAEHEKLIKLAQLKPEKDSDEAVTYSLGKFGQRALDFYSIHVTKESTHPVKPLAQIAGNRYASGPVGKALSDACMGTIASFLSKYQDIIIEHQKVVKGNQKRLESLRELAGKENLEYPSVTLPPQPHTKEGVDAYNEVIARVRMWVNLNLWQKLKLSRDDAKPLLRLKGFPSFPLVERQANEVDWWDMVCNVKKLINEKKEDGKVFWQNLAGYKRQEALRPYLSSEEDRKKGKKFARYQLGDLLLHLEKKHGEDWGKVYGEAWERIDKKVEGLSKHIKLEEERRSEDAQSKAALTDWLRAKASFVIEGLKEADKDEFCRCELKLQKWYGDLRGKPFAIEAENSILDISGFSKQYNCAFIWQKDGVKKLNLYLIINYFKGGKLRFKKIKPEAFEANRFYTVINKKSGEIVPMEVNFNFDDPNLIILPLAFGKRQGREFIWNDLLSLETGSLKLANGRVIEKTLYNRRTRQDEPALFVALTFERREVLDSSNIKPMNLIGVDRGENIPAVIALTDPEGCPLSRFKDSLGNPTHILRIGESYKEKQRTIQAKKEVEQRRAGGYSRKYASKAKNLADDMVRNTARDLLYYAVTQDAMLIFENLSRGFGRQGKRTFMAERQYTRMEDWLTAKLAYEGLPSKTYLSKTLAQYTSKTCSNCGFTITSADYDRVLEKLKKTATGWMTTINGKELKVEGQITYYNRYKRQNVVKDLSVELDRLSEESVNNDISSWTKGRSGEALSLLKKRFSHRPVQEKFVCLNCGFETHADEQAALNIARSWLFLRSQEYKKYQTNKTTGNTDKRAFVETWQSFYRKKLKEVWKPAV

SEQ ID NO: 42209 - protein, 977 aa, synthetic construct
  REGION 1..977: note = engineered CasX variant
QEIKRINKIRRRLVKDSNTKKAGKTGPMKTLLVPVMTPDLRERLENLRKKPENIPQPISNTSRANLNKLLTDYTEMKKAILHVYWEEFQKDPVGLMSRVAQPASKKIDQNKLKPEMDEKGNLTTAGFACSQCGQPLFVYKLEQVSEKGKAYTNYFGRCNVAEHEKLILLAQLKPEKDSDEAVTYSLGKFGQRALDFYSIHVTKESTHPVKPLAQIAGNRYASPVGKALSDACMGTIASFLSKYQDIIIEHQKVVKGNQKRLESLRELAGKENLEYPSVTLPPQPHTKEGVDAYNEVIARVRMWVNLNLWQKLKLSRDDAKPLLRLKGFPSFPLVERQANEVDWWDMVCNVKKLINEKKEDGKVFWQNLAGYKRQEALRPYLSSEEDRKKGKKFARYQLGDLLLHLEKKHGEDWGKVYGEAWERIDKKVEGLSKHIKLEEERRSEDAQSKAALTDWLRAKASFVIEGLKEADKDEFCRCELKLQKWYGDLRGKPFAIEAENSILDISGFSKQYNCAFIWQKDGVKKLNLYLIINYFKGGKLRFKKIKPEAFEANRFYTVINKKSGEIVPMEVNFNFDDPNLIILPLAFGKRQGREFIWNDLLSLETGSLKLANGRVIEKTLYNRRTRQDEPALFVALTFERREVLDSSNIKPMNLIGVDRGENIPAVIALTDPEGCPLSRFKDSLGNPTHILRIGESYKEKQRTIQAKKEVEQRRAGGYSRKYASKAKNLADDMVRNTARDLLYYAVTQDAMLIFENLSRGFGRQGKRTFMAERQYTRMEDWLTAKLAYEGLPSKTYLSKTLAQYTSKTCSNCGFTITSADYDRVLEKLKKTATGWMTTINGKELKVEGQITYYNRYKRQNVVKDLSVELDRLSEESVNNDISSWTKGRSGEALSLLKKRFSHRPVQEKFVCLNCGFETHADEQAALNIARSWLFLRSQEYKKYQTNKTTGNTDKRAFVETWQSFYRKKLKEVWKPAV

SEQ ID NO: 42210 - protein, 978 aa, synthetic construct
  REGION 1..978: note = engineered CasX variant
QEIKRINKIRRRLVKDSNTKKAGKTGPMKTLLVPVMTPDLRERLENLRKKPENIPQPISNTSRANLNKLLTDYTEMKKAILHVYWEEFQKDPVGLMSRVAQPASKKIDQNKLKPEMDEKGNLTTAGFACSQCGQPLFVYKLEQVSEKGKAYTNYFGRCNVAEHEKLILLAQLKPEKDSDEAVTYSLGKFGQRALDFYSIHVTKESTHPVKPLAQIAGNRYASYPVGKALSDACMGTIASFLSKYQDIIIEHQKVVKGNQKRLESLRELAGKENLEYPSVTLPPQPHTKEGVDAYNEVIARVRMWVNLNLWQKLKLSRDDAKPLLRLKGFPSFPLVERQANEVDWWDMVCNVKKLINEKKEDGKVFWQNLAGYKRQEALRPYLSSEEDRKKGKKFARYQLGDLLLHLEKKHGEDWGKVYDEAWERIDKKVEGLSKHIKLEEERRSEDAQSKAALTDWLRAKASFVIEGKKEADKDEFCRCELKLQKWYGDLRGKPFAIEAENSILDISGFSKQYNCAFIWQKDGVKKLNLYLIINYFKGGKLRFKKIKPEAFEANRFYTVINKKSGEIVPMEVNFNFDDPNLIILPLAFGKRQGREFIWNDLLSLETGSLKLANGRVIEKTLYNRRTRQDEPALFVALTFERREVLDSSNIKPMNLIGVDRGENIPAVIALTDPEGCPLSRFKDSLGNPTHILRIGESYKEKQRTIQAKKEVEQRRAGGYSRKYASKAKNLADDMVRNTARDLLYYAVTQDAMLIFENLSRGFGRQGKRTFMAERQYTRMEDWLTAKLAYEGLPSKTYLSKTLAQYTSKTCSNCGFTITSADYDRVLEKLKKTATGWMTTINGKELKVEGQITYYNRYKRQNVVKDLSVELDRLSEESVNNDISSWTKGRSGEALSLLKKRFSHRPVQEKFVCLNCGFETHADEQAALNIARSWLFLRSQEYKKYQTNKTTGNTDKRAFVETWQSFYRKKLKEVWKPAV

SEQ ID NO: 42211 - protein, 978 aa, synthetic construct
  REGION 1..978: note = engineered CasX variant
QEIKRINKIRRRLVKDSNTKKAGKTGPMKTLLVPVMTPDLRERLENLRKKPENIPQPISNTSRANLNKLLTDYTEMKKAILHVYWEEFQKDPVGLMSRVAQPASKKIDQNKLKPEMDEKGNLTTAGFACSQCGQPLFVYKLEQVSEKGKAYTNYFGRCNVAEHEKLILLAQLKPEKDSDEAVTYSLGKFGQRALDFYSIHVTKESTHPVKPLAQIAGNRYASHPVGKALSDACMGTIASFLSKYQDIIIEHQKVVKGNQKRLESLRELAGKENLEYPSVTLPPQPHTKEGVDAYNEVIARVRMWVNLNLWQKLKLSRDDAKPLLRLKGFPSFPLVERQANEVDWWDMVCNVKKLINEKKEDGKVFWQNLAGYKRQEALRPYLSSEEDRKKGKKFARYQLGDLLLHLEKKHGEDWGKVYDEAWERIDKKVEGLSKHIKLEEERRSEDAQSKAALTDWLRAKASFVIEGKKEADKDEFCRCELKLQKWYGDLRGKPFAIEAENSILDISGFSKQYNCAFIWQKDGVKKLNLYLIINYFKGGKLRFKKIKPEAFEANRFYTVINKKSGEIVPMEVNFNFDDPNLIILPLAFGKRQGREFIWNDLLSLETGSLKLANGRVIEKTLYNRRTRQDEPALFVALTFERREVLDSSNIKPMNLIGVDRGENIPAVIALTDPEGCPLSRFKDSLGNPTHILRIGESYKEKQRTIQAKKEVEQRRAGGYSRKYASKAKNLADDMVRNTARDLLYYAVTQDAMLIFENLSRGFGRQGKRTFMAERQYTRMEDWLTAKLAYEGLPSKTYLSKTLAQYTSKTCSNCGFTITSADYDRVLEKLKKTATGWMTTINGKELKVEGQITYYNRYKRQNVVKDLSVELDRLSEESVNNDISSWTKGRSGEALSLLKKRFSHRPVQEKFVCLNCGFETHADEQAALNIARSWLFLRSQEYKKYQTNKTTGNTDKRAFVETWQSFYRKKLKEVWKPAV

SEQ ID NO: 42212 - protein, 978 aa, synthetic construct
  REGION 1..978: note = engineered CasX variant
QEIKRINKIRRRLVKDSNTKKAGKTGPMKTLLVPVMTPDLRERLENLRKKPENIPQPISNTSRANLNKLLTDYTEMKKAILHVYWEEFQKDPVGLMSRVAQPASKKIDQNKLKPEMDEKGNLTTAGFACSQCGQPLFVYKLEQVSEKGKAYTNYFGRCNVAEHEKLILLAQLKPEKDSDEAVTYSLGKFGQRALDFYSIHVTKESTHPVKPLAQIAGNRYASSPVGKALSDACMGTIASFLSKYQDIIIEHQKVVKGNQKRLESLRELAGKENLEYPSVTLPPQPHTKEGVDAYNEVIARVRMWVNLNLWQKLKLSRDDAKPLLRLKGFPSFPLVERQANEVDWWDMVCNVKKLINEKKEDGKVFWQNLAGYKRQEALRPYLSSEEDRKKGKKFARYQLGDLLLHLEKKHGEDWGKVYDEAWERIDKKVEGLSKHIKLEEERRSEDAQSKAALTDWLRAKASFVIEGKKEADKDEFCRCELKLQKWYGDLRGKPFAIEAENSILDISGFSKQYNCAFIWQKDGVKKLNLYLIINYFKGGKLRFKKIKPEAFEANRFYTVINKKSGEIVPMEVNFNFDDPNLIILPLAFGKRQGREFIWNDLLSLETGSLKLANGRVIEKTLYNRRTRQDEPALFVALTFERREVLDSSNIKPMNLIGVDRGENIPAVIALTDPEGCPLSRFKDSLGNPTHILRIGESYKEKQRTIQAKKEVEQRRAGGYSRKYASKAKNLADDMVRNTARDLLYYAVTQDAMLIFENLSRGFGRQGKRTFMAERQYTRMEDWLTAKLAYEGLPSKTYLSKTLAQYTSKTCSNCGFTITSADYDRVLEKLKKTATGWMTTINGKELKVEGQITYYNRYKRQNVVKDLSVELDRLSEESVNNDISSWTKGRSGEALSLLKKRFSHRPVQEKFVCLNCGFETHADEQAALNIARSWLFLRSQEYKKYQTNKTTGNTDKRAFVETWQSFYRKKLKEVWKPAV

SEQ ID NO: 42213 - protein, 978 aa, synthetic construct
  REGION 1..978: note = engineered CasX variant
QEIKRINKIRRRLVKDSNTKKAGKTGPMKTLLVPVMTPDLRERLENLRKKPENIPQPISNTSRANLNKLLTDYTEMKKAILHVYWEEFQKDPVGLMSRVAQPASKKIDQNKLKPEMDEKGNLTTAGFACSQCGQPLFVYKLEQVSEKGKAYTNYFGRCNVAEHEKLILLAQLKPEKDSDEAVTYSLGKFGQRALDFYSIHVTKESTHPVKPLAQIAGNRYASTPVGKALSDACMGTIASFLSKYQDIIIEHQKVVKGNQKRLESLRELAGKENLEYPSVTLPPQPHTKEGVDAYNEVIARVRMWVNLNLWQKLKLSRDDAKPLLRLKGFPSFPLVERQANEVDWWDMVCNVKKLINEKKEDGKVFWQNLAGYKRQEALRPYLSSEEDRKKGKKFARYQLGDLLLHLEKKHGEDWGKVYDEAWERIDKKVEGLSKHIKLEEERRSEDAQSKAALTDWLRAKASFVIEGKKEADKDEFCRCELKLQKWYGDLRGKPFAIEAENSILDISGFSKQYNCAFIWQKDGVKKLNLYLIINYFKGGKLRFKKIKPEAFEANRFYTVINKKSGEIVPMEVNFNFDDPNLIILPLAFGKRQGREFIWNDLLSLETGSLKLANGRVIEKTLYNRRTRQDEPALFVALTFERREVLDSSNIKPMNLIGVDRGENIPAVIALTDPEGCPLSRFKDSLGNPTHILRIGESYKEKQRTIQAKKEVEQRRAGGYSRKYASKAKNLADDMVRNTARDLLYYAVTQDAMLIFENLSRGFGRQGKRTFMAERQYTRMEDWLTAKLAYEGLPSKTYLSKTLAQYTSKTCSNCGFTITSADYDRVLEKLKKTATGWMTTINGKELKVEGQITYYNRYKRQNVVKDLSVELDRLSEESVNNDISSWTKGRSGEALSLLKKRFSHRPVQEKFVCLNCGFETHADEQAALNIARSWLFLRSQEYKKYQTNKTTGNTDKRAFVETWQSFYRKKLKEVWKPAV

SEQ ID NO: 42214 - protein, 978 aa, synthetic construct
  REGION 1..978: note = engineered CasX variant
QEIKRINKIRRRLVKDSNTKKAGKTGPMKTLLVPVMTPDLRERLENLRKKPENIPQPISNTSRANLNKLLTDYTEMKKAILHVYWEEFQKDPVGLMSRVAQPASKKIDQNKLKPEMDEKGNLTTAGFACSQCGQPLFVYKLEQVSEKGKAYTNYFGRCNVAEHEKLILLAQLKPEKDSDEAVTYSLGKFGQRALDFYSIHVTKESTHPVKPLAQIAGNRYASAPVGKALSDACMGTIASFLSKYQDIIIEHQKVVKGNQKRLESLRELAGKENLEYPSVTLPPQPHTKEGVDAYNEVIARVRMWVNLNLWQKLKLSRDDAKPLLRLKGFPSFPLVERQANEVDWWDMVCNVKKLINEKKEDGKVFWQNLAGYKRQEALRPYLSSEEDRKKGKKFARYQLGDLLLHLEKKHGEDWGKVYDEAWERIDKKVEGLSKHIKLEEERRSEDAQSKAALTDWLRAKASFVIEGKKEADKDEFCRCELKLQKWYGDLRGKPFAIEAENSILDISGFSKQYNCAFIWQKDGVKKLNLYLIINYFKGGKLRFKKIKPEAFEANRFYTVINKKSGEIVPMEVNFNFDDPNLIILPLAFGKRQGREFIWNDLLSLETGSLKLANGRVIEKTLYNRRTRQDEPALFVALTFERREVLDSSNIKPMNLIGVDRGENIPAVIALTDPEGCPLSRFKDSLGNPTHILRIGESYKEKQRTIQAKKEVEQRRAGGYSRKYASKAKNLADDMVRNTARDLLYYAVTQDAMLIFENLSRGFGRQGKRTFMAERQYTRMEDWLTAKLAYEGLPSKTYLSKTLAQYTSKTCSNCGFTITSADYDRVLEKLKKTATGWMTTINGKELKVEGQITYYNRYKRQNVVKDLSVELDRLSEESVNNDISSWTKGRSGEALSLLKKRFSHRPVQEKFVCLNCGFETHADEQAALNIARSWLFLRSQEYKKYQTNKTTGNTDKRAFVETWQSFYRKKLKEVWKPAV

SEQ ID NO: 42215 - protein, 978 aa, synthetic construct
  REGION 1..978: note = engineered CasX variant
QEIKRINKIRRRLVKDSNTKKAGKTGPMKTLLVPVMTPDLRERLENLRKKPENIPQPISNTSRANLNKLLTDYTEMKKAILHVYWEEFQKDPVGLMSRVAQPASKKIDQNKLKPEMDEKGNLTTAGFACSQCGQPLFVYKLEQVSEKGKAYTNYFGRCNVAEHEKLILLAQLKPEKDSDEAVTYSLGKFGQRALDFYSIHVTKESTHPVKPLAQIAGNRYASVPVGKALSDACMGTIASFLSKYQDIIIEHQKVVKGNQKRLESLRELAGKENLEYPSVTLPPQPHTKEGVDAYNEVIARVRMWVNLNLWQKLKLSRDDAKPLLRLKGFPSFPLVERQANEVDWWDMVCNVKKLINEKKEDGKVFWQNLAGYKRQEALRPYLSSEEDRKKGKKFARYQLGDLLLHLEKKHGEDWGKVYDEAWERIDKKVEGLSKHIKLEEERRSEDAQSKAALTDWLRAKASFVIEGKKEADKDEFCRCELKLQKWYGDLRGKPFAIEAENSILDISGFSKQYNCAFIWQKDGVKKLNLYLIINYFKGGKLRFKKIKPEAFEANRFYTVINKKSGEIVPMEVNFNFDDPNLIILPLAFGKRQGREFIWNDLLSLETGSLKLANGRVIEKTLYNRRTRQDEPALFVALTFERREVLDSSNIKPMNLIGVDRGENIPAVIALTDPEGCPLSRFKDSLGNPTHILRIGESYKEKQRTIQAKKEVEQRRAGGYSRKYASKAKNLADDMVRNTARDLLYYAVTQDAMLIFENLSRGFGRQGKRTFMAERQYTRMEDWLTAKLAYEGLPSKTYLSKTLAQYTSKTCSNCGFTITSADYDRVLEKLKKTATGWMTTINGKELKVEGQITYYNRYKRQNVVKDLSVELDRLSEESVNNDISSWTKGRSGEALSLLKKRFSHRPVQEKFVCLNCGFETHADEQAALNIARSWLFLRSQEYKKYQTNKTTGNTDKRAFVETWQSFYRKKLKEVWKPAV

SEQ ID NO: 42216 - protein, 978 aa, synthetic construct
  REGION 1..978: note = engineered CasX variant
QEIKRINKIRRRLVKDSNTKKAGKTGPMKTLLVPVMTPDLRERLENLRKKPENIPQPISNTSRANLNKLLTDYTEMKKAILHVYWEEFQKDPVGLMSRVAQPASKKIDQNKLKPEMDEKGNLTTAGFACSQCGQPLFVYKLEQVSEKGKAYTNYFGRCNVAEHEKLIKLAQLKPEKDSDEAVTYSLGKFGQRALDFYSIHVTKESTHPVKPLAQIAGNRYASGPVGKALSDACMGTIASFLSKYQDIIIEHQKVVKGNQKRLESLRELAGKENLEYPSVTLPPQPHTKEGVDAYNEVIARVRMWVNLNLWQKLKLSRDDAKPLLRLKGFPSFPLVERQANEVDWWDMVCNVKKLINEKKEDGKVFWQNLAGYKRQEALRPYLSSEEDRKKGKKFARYQLGDLLLHLEKKHGEDWGKVYDEAWERIDKKVEGLSKHIKLEEERRSEDAQSKAALTDWLRAKASFVIEGKKEADKDEFCRCELKLQKWYGDLRGKPFAIEAENSILDISGFSKQYNCAFIWQKDGVKKLNLYLIINYFKGGKLRFKKIKPEAFEANRFYTVINKKSGEIVPMEVNFNFDDPNLIILPLAFGKRQGREFIWNDLLSLETGSLKLANGRVIEKTLYNRRTRQDEPALFVALTFERREVLDSSNIKPMNLIGVDRGENIPAVIALTDPEGCPLSRFKDSLGNPTHILRIGESYKEKQRTIQAKKEVEQRRAGGYSRKYASKAKNLADDMVRNTARDLLYYAVTQDAMLIFENLSRGFGRQGKRTFMAERQYTRMEDWLTAKLAYEGLPSKTYLSKTLAQYTSKTCSNCGFTITSADYDRVLEKLKKTATGWMTTINGKELKVEGQITYYNRYKRQNVVKDLSVELDRLSEESVNNDISSWTKGRSGEALSLLKKRFSHRPVQEKFVCLNCGFETHADEQAALNIARSWLFLRSQEYKKYQTNKTTGNTDKRAFVETWQSFYRKKLKEVWKPAV

SEQ ID NO: 42217 - protein, 977 aa, synthetic construct
  REGION 1..977: note = engineered CasX variant
QEIKRINKIRRRLVKDSNTKKAGKTGPMKTLLVPVMTPDLRERLENLRKKPENIPQPISNTSRANLNKLLTDYTEMKKAILHVYWEEFQKDPVGLMSRVAQPASKKIDQNKLKPEMDEKGNLTTAGFACSQCGQPLFVYKLEQVSEKGKAYTNYFGRCNVAEHEKLILLAQLKPEKDSDEAVTYSLGKFGQRALDFYSIHVTKESTHPVKPLAQIAGNRYASPVGKALSDACMGTIASFLSKYQDIIIEHQKVVKGNQKRLESLRELAGKENLEYPSVTLPPQPHTKEGVDAYNEVIARVRMWVNLNLWQKLKLSRDDAKPLLRLKGFPSFPLVERQANEVDWWDMVCNVKKLINEKKEDGKVFWQNLAGYKRQEALRPYLSSEEDRKKGKKFARYQLGDLLLHLEKKHGEDWGKVYDEAWERIDKKVEGLSKHIKLEEERRSEDAQSKAALTDWLRAKASFVIEGKKEADKDEFCRCELKLQKWYGDLRGKPFAIEAENSILDISGFSKQYNCAFIWQKDGVKKLNLYLIINYFKGGKLRFKKIKPEAFEANRFYTVINKKSGEIVPMEVNFNFDDPNLIILPLAFGKRQGREFIWNDLLSLETGSLKLANGRVIEKTLYNRRTRQDEPALFVALTFERREVLDSSNIKPMNLIGVDRGENIPAVIALTDPEGCPLSRFKDSLGNPTHILRIGESYKEKQRTIQAKKEVEQRRAGGYSRKYASKAKNLADDMVRNTARDLLYYAVTQDAMLIFENLSRGFGRQGKRTFMAERQYTRMEDWLTAKLAYEGLPSKTYLSKTLAQYTSKTCSNCGFTITSADYDRVLEKLKKTATGWMTTINGKELKVEGQITYYNRYKRQNVVKDLSVELDRLSEESVNNDISSWTKGRSGEALSLLKKRFSHRPVQEKFVCLNCGFETHADEQAALNIARSWLFLRSQEYKKYQTNKTTGNTDKRAFVETWQSFYRKKLKEVWKPAV

SEQ ID NO: 42218 - protein, 978 aa, synthetic construct
  REGION 1..978: note = engineered CasX variant
QEIKRINKIRRRLVKDSNTKKAGKTGPMKTLLVPVMTPDLRERLENLRKKPENIPQPISNTSRANLNKLLTDYTEMKKAILHVYWEEFQKDPVGLMSRVAQPASKKIDQNKLKPEMDEKGNLTTAGFACSQCGQPLFVYKLEQVSEKGKAYTNYFGRCNVAEHEKLILLAQLKPEKDSDEAVTYSLGKFGQRALDFYSIHVTKESTHPVKPLAQIAGNRYASYPVGKALSDACMGTIASFLSKYQDIIIEHQKVVKGNQKRLESLRELAGKENLEYPSVTLPPQPHTKEGVDAYNEVIARVRMWVNLNLWQKLKLSRDDAKPLLRLKGFPSFPLVERQANEVDWWDMVCNVKKLINEKKEDGKVFWQNLAGYKRQEALRPYLSSEEDRKKGKKFARYQLGDLLLHLEKKHGEDWGKVYDEAWERIDKKVEGLSKHIKLEEERRSEDAQSKAALTDWLRAKASFVIEGSKEADKDEFCRCELKLQKWYGDLRGKPFAIEAENSILDISGFSKQYNCAFIWQKDGVKKLNLYLIINYFKGGKLRFKKIKPEAFEANRFYTVINKKSGEIVPMEVNFNFDDPNLIILPLAFGKRQGREFIWNDLLSLETGSLKLANGRVIEKTLYNRRTRQDEPALFVALTFERREVLDSSNIKPMNLIGVDRGENIPAVIALTDPEGCPLSRFKDSLGNPTHILRIGESYKEKQRTIQAKKEVEQRRAGGYSRKYASKAKNLADDMVRNTARDLLYYAVTQDAMLIFENLSRGFGRQGKRTFMAERQYTRMEDWLTAKLAYEGLPSKTYLSKTLAQYTSKTCSNCGFTITSADYDRVLEKLKKTATGWMTTINGKELKVEGQITYYNRYKRQNVVKDLSVELDRLSEESVNNDISSWTKGRSGEALSLLKKRFSHRPVQEKFVCLNCGFETHADEQAALNIARSWLFLRSQEYKKYQTNKTTGNTDKRAFVETWQSFYRKKLKEVWKPAV

SEQ ID NO: 42219 - protein, 978 aa, synthetic construct
  REGION 1..978: note = engineered CasX variant
QEIKRINKIRRRLVKDSNTKKAGKTGPMKTLLVPVMTPDLRERLENLRKKPENIPQPISNTSRANLNKLLTDYTEMKKAILHVYWEEFQKDPVGLMSRVAQPASKKIDQNKLKPEMDEKGNLTTAGFACSQCGQPLFVYKLEQVSEKGKAYTNYFGRCNVAEHEKLILLAQLKPEKDSDEAVTYSLGKFGQRALDFYSIHVTKESTHPVKPLAQIAGNRYASHPVGKALSDACMGTIASFLSKYQDIIIEHQKVVKGNQKRLESLRELAGKENLEYPSVTLPPQPHTKEGVDAYNEVIARVRMWVNLNLWQKLKLSRDDAKPLLRLKGFPSFPLVERQANEVDWWDMVCNVKKLINEKKEDGKVFWQNLAGYKRQEALRPYLSSEEDRKKGKKFARYQLGDLLLHLEKKHGEDWGKVYDEAWERIDKKVEGLSKHIKLEEERRSEDAQSKAALTDWLRAKASFVIEGSKEADKDEFCRCELKLQKWYGDLRGKPFAIEAENSILDISGFSKQYNCAFIWQKDGVKKLNLYLIINYFKGGKLRFKKIKPEAFEANRFYTVINKKSGEIVPMEVNFNFDDPNLIILPLAFGKRQGREFIWNDLLSLETGSLKLANGRVIEKTLYNRRTRQDEPALFVALTFERREVLDSSNIKPMNLIGVDRGENIPAVIALTDPEGCPLSRFKDSLGNPTHILRIGESYKEKQRTIQAKKEVEQRRAGGYSRKYASKAKNLADDMVRNTARDLLYYAVTQDAMLIFENLSRGFGRQGKRTFMAERQYTRMEDWLTAKLAYEGLPSKTYLSKTLAQYTSKTCSNCGFTITSADYDRVLEKLKKTATGWMTTINGKELKVEGQITYYNRYKRQNVVKDLSVELDRLSEESVNNDISSWTKGRSGEALSLLKKRFSHRPVQEKFVCLNCGFETHADEQAALNIARSWLFLRSQEYKKYQTNKTTGNTDKRAFVETWQSFYRKKLKEVWKPAV

SEQ ID NO: 42220 - protein, 978 aa, synthetic construct
  REGION 1..978: note = engineered CasX variant
QEIKRINKIRRRLVKDSNTKKAGKTGPMKTLLVPVMTPDLRERLENLRKKPENIPQPISNTSRANLNKLLTDYTEMKKAILHVYWEEFQKDPVGLMSRVAQPASKKIDQNKLKPEMDEKGNLTTAGFACSQCGQPLFVYKLEQVSEKGKAYTNYFGRCNVAEHEKLILLAQLKPEKDSDEAVTYSLGKFGQRALDFYSIHVTKESTHPVKPLAQIAGNRYASSPVGKALSDACMGTIASFLSKYQDIIIEHQKVVKGNQKRLESLRELAGKENLEYPSVTLPPQPHTKEGVDAYNEVIARVRMWVNLNLWQKLKLSRDDAKPLLRLKGFPSFPLVERQANEVDWWDMVCNVKKLINEKKEDGKVFWQNLAGYKRQEALRPYLSSEEDRKKGKKFARYQLGDLLLHLEKKHGEDWGKVYDEAWERIDKKVEGLSKHIKLEEERRSEDAQSKAALTDWLRAKASFVIEGSKEADKDEFCRCELKLQKWYGDLRGKPFAIEAENSILDISGFSKQYNCAFIWQKDGVKKLNLYLIINYFKGGKLRFKKIKPEAFEANRFYTVINKKSGEIVPMEVNFNFDDPNLIILPLAFGKRQGREFIWNDLLSLETGSLKLANGRVIEKTLYNRRTRQDEPALFVALTFERREVLDSSNIKPMNLIGVDRGENIPAVIALTDPEGCPLSRFKDSLGNPTHILRIGESYKEKQRTIQAKKEVEQRRAGGYSRKYASKAKNLADDMVRNTARDLLYYAVTQDAMLIFENLSRGFGRQGKRTFMAERQYTRMEDWLTAKLAYEGLPSKTYLSKTLAQYTSKTCSNCGFTITSADYDRVLEKLKKTATGWMTTINGKELKVEGQITYYNRYKRQNVVKDLSVELDRLSEESVNNDISSWTKGRSGEALSLLKKRFSHRPVQEKFVCLNCGFETHADEQAALNIARSWLFLRSQEYKKYQTNKTTGNTDKRAFVETWQSFYRKKLKEVWKPAV

SEQ ID NO: 42221 - protein, 978 aa, synthetic construct
  REGION 1..978: note = engineered CasX variant
QEIKRINKIRRRLVKDSNTKKAGKTGPMKTLLVPVMTPDLRERLENLRKKPENIPQPISNTSRANLNKLLTDYTEMKKAILHVYWEEFQKDPVGLMSRVAQPASKKIDQNKLKPEMDEKGNLTTAGFACSQCGQPLFVYKLEQVSEKGKAYTNYFGRCNVAEHEKLILLAQLKPEKDSDEAVTYSLGKFGQRALDFYSIHVTKESTHPVKPLAQIAGNRYASTPVGKALSDACMGTIASFLSKYQDIIIEHQKVVKGNQKRLESLRELAGKENLEYPSVTLPPQPHTKEGVDAYNEVIARVRMWVNLNLWQKLKLSRDDAKPLLRLKGFPSFPLVERQANEVDWWDMVCNVKKLINEKKEDGKVFWQNLAGYKRQEALRPYLSSEEDRKKGKKFARYQLGDLLLHLEKKHGEDWGKVYDEAWERIDKKVEGLSKHIKLEEERRSEDAQSKAALTDWLRAKASFVIEGSKEADKDEFCRCELKLQKWYGDLRGKPFAIEAENSILDISGFSKQYNCAFIWQKDGVKKLNLYLIINYFKGGKLRFKKIKPEAFEANRFYTVINKKSGEIVPMEVNFNFDDPNLIILPLAFGKRQGREFIWNDLLSLETGSLKLANGRVIEKTLYNRRTRQDEPALFVALTFERREVLDSSNIKPMNLIGVDRGENIPAVIALTDPEGCPLSRFKDSLGNPTHILRIGESYKEKQRTIQAKKEVEQRRAGGYSRKYASKAKNLADDMVRNTARDLLYYAVTQDAMLIFENLSRGFGRQGKRTFMAERQYTRMEDWLTAKLAYEGLPSKTYLSKTLAQYTSKTCSNCGFTITSADYDRVLEKLKKTATGWMTTINGKELKVEGQITYYNRYKRQNVVKDLSVELDRLSEESVNNDISSWTKGRSGEALSLLKKRFSHRPVQEKFVCLNCGFETHADEQAALNIARSWLFLRSQEYKKYQTNKTTGNTDKRAFVETWQSFYRKKLKEVWKPAV

SEQ ID NO: 42222 - protein, 978 aa, synthetic construct
  REGION 1..978: note = engineered CasX variant
QEIKRINKIRRRLVKDSNTKKAGKTGPMKTLLVPVMTPDLRERLENLRKKPENIPQPISNTSRANLNKLLTDYTEMKKAILHVYWEEFQKDPVGLMSRVAQPASKKIDQNKLKPEMDEKGNLTTAGFACSQCGQPLFVYKLEQVSEKGKAYTNYFGRCNVAEHEKLILLAQLKPEKDSDEAVTYSLGKFGQRALDFYSIHVTKESTHPVKPLAQIAGNRYASAPVGKALSDACMGTIASFLSKYQDIIIEHQKVVKGNQKRLESLRELAGKENLEYPSVTLPPQPHTKEGVDAYNEVIARVRMWVNLNLWQKLKLSRDDAKPLLRLKGFPSFPLVERQANEVDWWDMVCNVKKLINEKKEDGKVFWQNLAGYKRQEALRPYLSSEEDRKKGKKFARYQLGDLLLHLEKKHGEDWGKVYDEAWERIDKKVEGLSKHIKLEEERRSEDAQSKAALTDWLRAKASFVIEGSKEADKDEFCRCELKLQKWYGDLRGKPFAIEAENSILDISGFSKQYNCAFIWQKDGVKKLNLYLIINYFKGGKLRFKKIKPEAFEANRFYTVINKKSGEIVPMEVNFNFDDPNLIILPLAFGKRQGREFIWNDLLSLETGSLKLANGRVIEKTLYNRRTRQDEPALFVALTFERREVLDSSNIKPMNLIGVDRGENIPAVIALTDPEGCPLSRFKDSLGNPTHILRIGESYKEKQRTIQAKKEVEQRRAGGYSRKYASKAKNLADDMVRNTARDLLYYAVTQDAMLIFENLSRGFGRQGKRTFMAERQYTRMEDWLTAKLAYEGLPSKTYLSKTLAQYTSKTCSNCGFTITSADYDRVLEKLKKTATGWMTTINGKELKVEGQITYYNRYKRQNVVKDLSVELDRLSEESVNNDISSWTKGRSGEALSLLKKRFSHRPVQEKFVCLNCGFETHADEQAALNIARSWLFLRSQEYKKYQTNKTTGNTDKRAFVETWQSFYRKKLKEVWKPAV

SEQ ID NO: 42223 - protein, 978 aa, synthetic construct
  REGION 1..978: note = engineered CasX variant
QEIKRINKIRRRLVKDSNTKKAGKTGPMKTLLVPVMTPDLRERLENLRKKPENIPQPISNTSRANLNKLLTDYTEMKKAILHVYWEEFQKDPVGLMSRVAQPASKKIDQNKLKPEMDEKGNLTTAGFACSQCGQPLFVYKLEQVSEKGKAYTNYFGRCNVAEHEKLILLAQLKPEKDSDEAVTYSLGKFGQRALDFYSIHVTKESTHPVKPLAQIAGNRYASVPVGKALSDACMGTIASFLSKYQDIIIEHQKVVKGNQKRLESLRELAGKENLEYPSVTLPPQPHTKEGVDAYNEVIARVRMWVNLNLWQKLKLSRDDAKPLLRLKGFPSFPLVERQANEVDWWDMVCNVKKLINEKKEDGKVFWQNLAGYKRQEALRPYLSSEEDRKKGKKFARYQLGDLLLHLEKKHGEDWGKVYDEAWERIDKKVEGLSKHIKLEEERRSEDAQSKAALTDWLRAKASFVIEGSKEADKDEFCRCELKLQKWYGDLRGKPFAIEAENSILDISGFSKQYNCAFIWQKDGVKKLNLYLIINYFKGGKLRFKKIKPEAFEANRFYTVINKKSGEIVPMEVNFNFDDPNLIILPLAFGKRQGREFIWNDLLSLETGSLKLANGRVIEKTLYNRRTRQDEPALFVALTFERREVLDSSNIKPMNLIGVDRGENIPAVIALTDPEGCPLSRFKDSLGNPTHILRIGESYKEKQRTIQAKKEVEQRRAGGYSRKYASKAKNLADDMVRNTARDLLYYAVTQDAMLIFENLSRGFGRQGKRTFMAERQYTRMEDWLTAKLAYEGLPSKTYLSKTLAQYTSKTCSNCGFTITSADYDRVLEKLKKTATGWMTTINGKELKVEGQITYYNRYKRQNVVKDLSVELDRLSEESVNNDISSWTKGRSGEALSLLKKRFSHRPVQEKFVCLNCGFETHADEQAALNIARSWLFLRSQEYKKYQTNKTTGNTDKRAFVETWQSFYRKKLKEVWKPAV

SEQ ID NO: 42224 - protein, 978 aa, synthetic construct
  REGION 1..978: note = engineered CasX variant
QEIKRINKIRRRLVKDSNTKKAGKTGPMKTLLVPVMTPDLRERLENLRKKPENIPQPISNTSRANLNKLLTDYTEMKKAILHVYWEEFQKDPVGLMSRVAQPASKKIDQNKLKPEMDEKGNLTTAGFACSQCGQPLFVYKLEQVSEKGKAYTNYFGRCNVAEHEKLIKLAQLKPEKDSDEAVTYSLGKFGQRALDFYSIHVTKESTHPVKPLAQIAGNRYASGPVGKALSDACMGTIASFLSKYQDIIIEHQKVVKGNQKRLESLRELAGKENLEYPSVTLPPQPHTKEGVDAYNEVIARVRMWVNLNLWQKLKLSRDDAKPLLRLKGFPSFPLVERQANEVDWWDMVCNVKKLINEKKEDGKVFWQNLAGYKRQEALRPYLSSEEDRKKGKKFARYQLGDLLLHLEKKHGEDWGKVYDEAWERIDKKVEGLSKHIKLEEERRSEDAQSKAALTDWLRAKASFVIEGSKEADKDEFCRCELKLQKWYGDLRGKPFAIEAENSILDISGFSKQYNCAFIWQKDGVKKLNLYLIINYFKGGKLRFKKIKPEAFEANRFYTVINKKSGEIVPMEVNFNFDDPNLIILPLAFGKRQGREFIWNDLLSLETGSLKLANGRVIEKTLYNRRTRQDEPALFVALTFERREVLDSSNIKPMNLIGVDRGENIPAVIALTDPEGCPLSRFKDSLGNPTHILRIGESYKEKQRTIQAKKEVEQRRAGGYSRKYASKAKNLADDMVRNTARDLLYYAVTQDAMLIFENLSRGFGRQGKRTFMAERQYTRMEDWLTAKLAYEGLPSKTYLSKTLAQYTSKTCSNCGFTITSADYDRVLEKLKKTATGWMTTINGKELKVEGQITYYNRYKRQNVVKDLSVELDRLSEESVNNDISSWTKGRSGEALSLLKKRFSHRPVQEKFVCLNCGFETHADEQAALNIARSWLFLRSQEYKKYQTNKTTGNTDKRAFVETWQSFYRKKLKEVWKPAV

SEQ ID NO: 42225 - protein, 977 aa, synthetic construct
  REGION 1..977: note = engineered CasX variant
QEIKRINKIRRRLVKDSNTKKAGKTGPMKTLLVPVMTPDLRERLENLRKKPENIPQPISNTSRANLNKLLTDYTEMKKAILHVYWEEFQKDPVGLMSRVAQPASKKIDQNKLKPEMDEKGNLTTAGFACSQCGQPLFVYKLEQVSEKGKAYTNYFGRCNVAEHEKLILLAQLKPEKDSDEAVTYSLGKFGQRALDFYSIHVTKESTHPVKPLAQIAGNRYASPVGKALSDACMGTIASFLSKYQDIIIEHQKVVKGNQKRLESLRELAGKENLEYPSVTLPPQPHTKEGVDAYNEVIARVRMWVNLNLWQKLKLSRDDAKPLLRLKGFPSFPLVERQANEVDWWDMVCNVKKLINEKKEDGKVFWQNLAGYKRQEALRPYLSSEEDRKKGKKFARYQLGDLLLHLEKKHGEDWGKVYDEAWERIDKKVEGLSKHIKLEEERRSEDAQSKAALTDWLRAKASFVIEGSKEADKDEFCRCELKLQKWYGDLRGKPFAIEAENSILDISGFSKQYNCAFIWQKDGVKKLNLYLIINYFKGGKLRFKKIKPEAFEANRFYTVINKKSGEIVPMEVNFNFDDPNLIILPLAFGKRQGREFIWNDLLSLETGSLKLANGRVIEKTLYNRRTRQDEPALFVALTFERREVLDSSNIKPMNLIGVDRGENIPAVIALTDPEGCPLSRFKDSLGNPTHILRIGESYKEKQRTIQAKKEVEQRRAGGYSRKYASKAKNLADDMVRNTARDLLYYAVTQDAMLIFENLSRGFGRQGKRTFMAERQYTRMEDWLTAKLAYEGLPSKTYLSKTLAQYTSKTCSNCGFTITSADYDRVLEKLKKTATGWMTTINGKELKVEGQITYYNRYKRQNVVKDLSVELDRLSEESVNNDISSWTKGRSGEALSLLKKRFSHRPVQEKFVCLNCGFETHADEQAALNIARSWLFLRSQEYKKYQTNKTTGNTDKRAFVETWQSFYRKKLKEVWKPAV

SEQ ID NO: 42226 - protein, 979 aa, synthetic construct
  REGION 1..979: note = engineered CasX variant
QEIKRINKIRRRLVKDSNTKKAGKTGPMKTLLVPVMTPDLRERLENLRKKPENIPQPISNTSRANLNKLLTDYTEMKKAILHVYWEEFQKDPVGLMSRVAQPASKKIDQNKLKPEMDEKGNLTTAGFACSQCGQPLFVYKLEQVSEKGKAYTNYFGRCNVAEHEKLILLAQLKPEKDSDEAVTYSLGKFGQRALDFYSIHVTKESTHPVKPLAQIAGNRYASYPVGKALSDACMGTIASFLSKYQDIIIEHQKVVKGNQKRLESLRELAGKENLEYPSVTLPPQPHTKEGVDAYNEVIARVRMWVNLNLWQKLKLSRDDAKPLLRLKGFPSFPLVERQANEVDWWDMVCNVKKLINEKKEDGKVFWQNLAGYKRQEALRPYLSSEEDRKKGKKFARYQLGDLLLHLEKKHGEDWGKVYDEAWERIDKKVEGLSKHIKLEEERRSEDAQSKAALTDWLRAKASFVIEGLKEADDKDEFCRCELKLQKWYGDLRGKPFAIEAENSILDISGFSKQYNCAFIWQKDGVKKLNLYLIINYFKGGKLRFKKIKPEAFEANRFYTVINKKSGEIVPMEVNFNFDDPNLIILPLAFGKRQGREFIWNDLLSLETGSLKLANGRVIEKTLYNRRTRQDEPALFVALTFERREVLDSSNIKPMNLIGVDRGENIPAVIALTDPEGCPLSRFKDSLGNPTHILRIGESYKEKQRTIQAKKEVEQRRAGGYSRKYASKAKNLADDMVRNTARDLLYYAVTQDAMLIFENLSRGFGRQGKRTFMAERQYTRMEDWLTAKLAYEGLPSKTYLSKTLAQYTSKTCSNCGFTITSADYDRVLEKLKKTATGWMTTINGKELKVEGQITYYNRYKRQNVVKDLSVELDRLSEESVNNDISSWTKGRSGEALSLLKKRFSHRPVQEKFVCLNCGFETHADEQAALNIARSWLFLRSQEYKKYQTNKTTGNTDKRAFVETWQSFYRKKLKEVWKPAV

SEQ ID NO: 42227 - protein, 979 aa, synthetic construct
  REGION 1..979: note = engineered CasX variant
QEIKRINKIRRRLVKDSNTKKAGKTGPMKTLLVPVMTPDLRERLENLRKKPENIPQPISNTSRANLNKLLTDYTEMKKAILHVYWEEFQKDPVGLMSRVAQPASKKIDQNKLKPEMDEKGNLTTAGFACSQCGQPLFVYKLEQVSEKGKAYTNYFGRCNVAEHEKLILLAQLKPEKDSDEAVTYSLGKFGQRALDFYSIHVTKESTHPVKPLAQIAGNRYASHPVGKALSDACMGTIASFLSKYQDIIIEHQKVVKGNQKRLESLRELAGKENLEYPSVTLPPQPHTKEGVDAYNEVIARVRMWVNLNLWQKLKLSRDDAKPLLRLKGFPSFPLVERQANEVDWWDMVCNVKKLINEKKEDGKVFWQNLAGYKRQEALRPYLSSEEDRKKGKKFARYQLGDLLLHLEKKHGEDWGKVYDEAWERIDKKVEGLSKHIKLEEERRSEDAQSKAALTDWLRAKASFVIEGLKEADDKDEFCRCELKLQKWYGDLRGKPFAIEAENSILDISGFSKQYNCAFIWQKDGVKKLNLYLIINYFKGGKLRFKKIKPEAFEANRFYTVINKKSGEIVPMEVNFNFDDPNLIILPLAFGKRQGREFIWNDLLSLETGSLKLANGRVIEKTLYNRRTRQDEPALFVALTFERREVLDSSNIKPMNLIGVDRGENIPAVIALTDPEGCPLSRFKDSLGNPTHILRIGESYKEKQRTIQAKKEVEQRRAGGYSRKYASKAKNLADDMVRNTARDLLYYAVTQDAMLIFENLSRGFGRQGKRTFMAERQYTRMEDWLTAKLAYEGLPSKTYLSKTLAQYTSKTCSNCGFTITSADYDRVLEKLKKTATGWMTTINGKELKVEGQITYYNRYKRQNVVKDLSVELDRLSEESVNNDISSWTKGRSGEALSLLKKRFSHRPVQEKFVCLNCGFETHADEQAALNIARSWLFLRSQEYKKYQTNKTTGNTDKRAFVETWQSFYRKKLKEVWKPAV

SEQ ID NO: 42228 - protein, 979 aa, synthetic construct
  REGION 1..979: note = engineered CasX variant
QEIKRINKIRRRLVKDSNTKKAGKTGPMKTLLVPVMTPDLRERLENLRKKPENIPQPISNTSRANLNKLLTDYTEMKKAILHVYWEEFQKDPVGLMSRVAQPASKKIDQNKLKPEMDEKGNLTTAGFACSQCGQPLFVYKLEQVSEKGKAYTNYFGRCNVAEHEKLILLAQLKPEKDSDEAVTYSLGKFGQRALDFYSIHVTKESTHPVKPLAQIAGNRYASSPVGKALSDACMGTIASFLSKYQDIIIEHQKVVKGNQKRLESLRELAGKENLEYPSVTLPPQPHTKEGVDAYNEVIARVRMWVNLNLWQKLKLSRDDAKPLLRLKGFPSFPLVERQANEVDWWDMVCNVKKLINEKKEDGKVFWQNLAGYKRQEALRPYLSSEEDRKKGKKFARYQLGDLLLHLEKKHGEDWGKVYDEAWERIDKKVEGLSKHIKLEEERRSEDAQSKAALTDWLRAKASFVIEGLKEADDKDEFCRCELKLQKWYGDLRGKPFAIEAENSILDISGFSKQYNCAFIWQKDGVKKLNLYLIINYFKGGKLRFKKIKPEAFEANRFYTVINKKSGEIVPMEVNFNFDDPNLIILPLAFGKRQGREFIWNDLLSLETGSLKLANGRVIEKTLYNRRTRQDEPALFVALTFERREVLDSSNIKPMNLIGVDRGENIPAVIALTDPEGCPLSRFKDSLGNPTHILRIGESYKEKQRTIQAKKEVEQRRAGGYSRKYASKAKNLADDMVRNTARDLLYYAVTQDAMLIFENLSRGFGRQGKRTFMAERQYTRMEDWLTAKLAYEGLPSKTYLSKTLAQYTSKTCSNCGFTITSADYDRVLEKLKKTATGWMTTINGKELKVEGQITYYNRYKRQNVVKDLSVELDRLSEESVNNDISSWTKGRSGEALSLLKKRFSHRPVQEKFVCLNCGFETHADEQAALNIARSWLFLRSQEYKKYQTNKTTGNTDKRAFVETWQSFYRKKLKEVWKPAV

SEQ ID NO: 42229 - protein, 979 aa, synthetic construct
  REGION 1..979: note = engineered CasX variant
QEIKRINKIRRRLVKDSNTKKAGKTGPMKTLLVPVMTPDLRERLENLRKKPENIPQPISNTSRANLNKLLTDYTEMKKAILHVYWEEFQKDPVGLMSRVAQPASKKIDQNKLKPEMDEKGNLTTAGFACSQCGQPLFVYKLEQVSEKGKAYTNYFGRCNVAEHEKLILLAQLKPEKDSDEAVTYSLGKFGQRALDFYSIHVTKESTHPVKPLAQIAGNRYASTPVGKALSDACMGTIASFLSKYQDIIIEHQKVVKGNQKRLESLRELAGKENLEYPSVTLPPQPHTKEGVDAYNEVIARVRMWVNLNLWQKLKLSRDDAKPLLRLKGFPSFPLVERQANEVDWWDMVCNVKKLINEKKEDGKVFWQNLAGYKRQEALRPYLSSEEDRKKGKKFARYQLGDLLLHLEKKHGEDWGKVYDEAWERIDKKVEGLSKHIKLEEERRSEDAQSKAALTDWLRAKASFVIEGLKEADDKDEFCRCELKLQKWYGDLRGKPFAIEAENSILDISGFSKQYNCAFIWQKDGVKKLNLYLIINYFKGGKLRFKKIKPEAFEANRFYTVINKKSGEIVPMEVNFNFDDPNLIILPLAFGKRQGREFIWNDLLSLETGSLKLANGRVIEKTLYNRRTRQDEPALFVALTFERREVLDSSNIKPMNLIGVDRGENIPAVIALTDPEGCPLSRFKDSLGNPTHILRIGESYKEKQRTIQAKKEVEQRRAGGYSRKYASKAKNLADDMVRNTARDLLYYAVTQDAMLIFENLSRGFGRQGKRTFMAERQYTRMEDWLTAKLAYEGLPSKTYLSKTLAQYTSKTCSNCGFTITSADYDRVLEKLKKTATGWMTTINGKELKVEGQITYYNRYKRQNVVKDLSVELDRLSEESVNNDISSWTKGRSGEALSLLKKRFSHRPVQEKFVCLNCGFETHADEQAALNIARSWLFLRSQEYKKYQTNKTTGNTDKRAFVETWQSFYRKKLKEVWKPAV

SEQ ID NO: 42230 - protein, 979 aa, synthetic construct
  REGION 1..979: note = engineered CasX variant
QEIKRINKIRRRLVKDSNTKKAGKTGPMKTLLVPVMTPDLRERLENLRKKPENIPQPISNTSRANLNKLLTDYTEMKKAILHVYWEEFQKDPVGLMSRVAQPASKKIDQNKLKPEMDEKGNLTTAGFACSQCGQPLFVYKLEQVSEKGKAYTNYFGRCNVAEHEKLILLAQLKPEKDSDEAVTYSLGKFGQRALDFYSIHVTKESTHPVKPLAQIAGNRYASAPVGKALSDACMGTIASFLSKYQDIIIEHQKVVKGNQKRLESLRELAGKENLEYPSVTLPPQPHTKEGVDAYNEVIARVRMWVNLNLWQKLKLSRDDAKPLLRLKGFPSFPLVERQANEVDWWDMVCNVKKLINEKKEDGKVFWQNLAGYKRQEALRPYLSSEEDRKKGKKFARYQLGDLLLHLEKKHGEDWGKVYDEAWERIDKKVEGLSKHIKLEEERRSEDAQSKAALTDWLRAKASFVIEGLKEADDKDEFCRCELKLQKWYGDLRGKPFAIEAENSILDISGFSKQYNCAFIWQKDGVKKLNLYLIINYFKGGKLRFKKIKPEAFEANRFYTVINKKSGEIVPMEVNFNFDDPNLIILPLAFGKRQGREFIWNDLLSLETGSLKLANGRVIEKTLYNRRTRQDEPALFVALTFERREVLDSSNIKPMNLIGVDRGENIPAVIALTDPEGCPLSRFKDSLGNPTHILRIGESYKEKQRTIQAKKEVEQRRAGGYSRKYASKAKNLADDMVRNTARDLLYYAVTQDAMLIFENLSRGFGRQGKRTFMAERQYTRMEDWLTAKLAYEGLPSKTYLSKTLAQYTSKTCSNCGFTITSADYDRVLEKLKKTATGWMTTINGKELKVEGQITYYNRYKRQNVVKDLSVELDRLSEESVNNDISSWTKGRSGEALSLLKKRFSHRPVQEKFVCLNCGFETHADEQAALNIARSWLFLRSQEYKKYQTNKTTGNTDKRAFVETWQSFYRKKLKEVWKPAV

SEQ ID NO: 42231 - protein, 979 aa, synthetic construct
  REGION 1..979: note = engineered CasX variant
QEIKRINKIRRRLVKDSNTKKAGKTGPMKTLLVPVMTPDLRERLENLRKKPENIPQPISNTSRANLNKLLTDYTEMKKAILHVYWEEFQKDPVGLMSRVAQPASKKIDQNKLKPEMDEKGNLTTAGFACSQCGQPLFVYKLEQVSEKGKAYTNYFGRCNVAEHEKLILLAQLKPEKDSDEAVTYSLGKFGQRALDFYSIHVTKESTHPVKPLAQIAGNRYASVPVGKALSDACMGTIASFLSKYQDIIIEHQKVVKGNQKRLESLRELAGKENLEYPSVTLPPQPHTKEGVDAYNEVIARVRMWVNLNLWQKLKLSRDDAKPLLRLKGFPSFPLVERQANEVDWWDMVCNVKKLINEKKEDGKVFWQNLAGYKRQEALRPYLSSEEDRKKGKKFARYQLGDLLLHLEKKHGEDWGKVYDEAWERIDKKVEGLSKHIKLEEERRSEDAQSKAALTDWLRAKASFVIEGLKEADDKDEFCRCELKLQKWYGDLRGKPFAIEAENSILDISGFSKQYNCAFIWQKDGVKKLNLYLIINYFKGGKLRFKKIKPEAFEANRFYTVINKKSGEIVPMEVNFNFDDPNLIILPLAFGKRQGREFIWNDLLSLETGSLKLANGRVIEKTLYNRRTRQDEPALFVALTFERREVLDSSNIKPMNLIGVDRGENIPAVIALTDPEGCPLSRFKDSLGNPTHILRIGESYKEKQRTIQAKKEVEQRRAGGYSRKYASKAKNLADDMVRNTARDLLYYAVTQDAMLIFENLSRGFGRQGKRTFMAERQYTRMEDWLTAKLAYEGLPSKTYLSKTLAQYTSKTCSNCGFTITSADYDRVLEKLKKTATGWMTTINGKELKVEGQITYYNRYKRQNVVKDLSVELDRLSEESVNNDISSWTKGRSGEALSLLKKRFSHRPVQEKFVCLNCGFETHADEQAALNIARSWLFLRSQEYKKYQTNKTTGNTDKRAFVETWQSFYRKKLKEVWKPAV

SEQ ID NO: 42232 - protein, 979 aa, synthetic construct
  REGION 1..979: note = engineered CasX variant
QEIKRINKIRRRLVKDSNTKKAGKTGPMKTLLVPVMTPDLRERLENLRKKPENIPQPISNTSRANLNKLLTDYTEMKKAILHVYWEEFQKDPVGLMSRVAQPASKKIDQNKLKPEMDEKGNLTTAGFACSQCGQPLFVYKLEQVSEKGKAYTNYFGRCNVAEHEKLIKLAQLKPEKDSDEAVTYSLGKFGQRALDFYSIHVTKESTHPVKPLAQIAGNRYASGPVGKALSDACMGTIASFLSKYQDIIIEHQKVVKGNQKRLESLRELAGKENLEYPSVTLPPQPHTKEGVDAYNEVIARVRMWVNLNLWQKLKLSRDDAKPLLRLKGFPSFPLVERQANEVDWWDMVCNVKKLINEKKEDGKVFWQNLAGYKRQEALRPYLSSEEDRKKGKKFARYQLGDLLLHLEKKHGEDWGKVYDEAWERIDKKVEGLSKHIKLEEERRSEDAQSKAALTDWLRAKASFVIEGLKEADDKDEFCRCELKLQKWYGDLRGKPFAIEAENSILDISGFSKQYNCAFIWQKDGVKKLNLYLIINYFKGGKLRFKKIKPEAFEANRFYTVINKKSGEIVPMEVNFNFDDPNLIILPLAFGKRQGREFIWNDLLSLETGSLKLANGRVIEKTLYNRRTRQDEPALFVALTFERREVLDSSNIKPMNLIGVDRGENIPAVIALTDPEGCPLSRFKDSLGNPTHILRIGESYKEKQRTIQAKKEVEQRRAGGYSRKYASKAKNLADDMVRNTARDLLYYAVTQDAMLIFENLSRGFGRQGKRTFMAERQYTRMEDWLTAKLAYEGLPSKTYLSKTLAQYTSKTCSNCGFTITSADYDRVLEKLKKTATGWMTTINGKELKVEGQITYYNRYKRQNVVKDLSVELDRLSEESVNNDISSWTKGRSGEALSLLKKRFSHRPVQEKFVCLNCGFETHADEQAALNIARSWLFLRSQEYKKYQTNKTTGNTDKRAFVETWQSFYRKKLKEVWKPAV

SEQ ID NO: 42233 - protein, 978 aa, synthetic construct
  REGION 1..978: note = engineered CasX variant
QEIKRINKIRRRLVKDSNTKKAGKTGPMKTLLVPVMTPDLRERLENLRKKPENIPQPISNTSRANLNKLLTDYTEMKKAILHVYWEEFQKDPVGLMSRVAQPASKKIDQNKLKPEMDEKGNLTTAGFACSQCGQPLFVYKLEQVSEKGKAYTNYFGRCNVAEHEKLILLAQLKPEKDSDEAVTYSLGKFGQRALDFYSIHVTKESTHPVKPLAQIAGNRYASPVGKALSDACMGTIASFLSKYQDIIIEHQKVVKGNQKRLESLRELAGKENLEYPSVTLPPQPHTKEGVDAYNEVIARVRMWVNLNLWQKLKLSRDDAKPLLRLKGFPSFPLVERQANEVDWWDMVCNVKKLINEKKEDGKVFWQNLAGYKRQEALRPYLSSEEDRKKGKKFARYQLGDLLLHLEKKHGEDWGKVYDEAWERIDKKVEGLSKHIKLEEERRSEDAQSKAALTDWLRAKASFVIEGLKEADDKDEFCRCELKLQKWYGDLRGKPFAIEAENSILDISGFSKQYNCAFIWQKDGVKKLNLYLIINYFKGGKLRFKKIKPEAFEANRFYTVINKKSGEIVPMEVNFNFDDPNLIILPLAFGKRQGREFIWNDLLSLETGSLKLANGRVIEKTLYNRRTRQDEPALFVALTFERREVLDSSNIKPMNLIGVDRGENIPAVIALTDPEGCPLSRFKDSLGNPTHILRIGESYKEKQRTIQAKKEVEQRRAGGYSRKYASKAKNLADDMVRNTARDLLYYAVTQDAMLIFENLSRGFGRQGKRTFMAERQYTRMEDWLTAKLAYEGLPSKTYLSKTLAQYTSKTCSNCGFTITSADYDRVLEKLKKTATGWMTTINGKELKVEGQITYYNRYKRQNVVKDLSVELDRLSEESVNNDISSWTKGRSGEALSLLKKRFSHRPVQEKFVCLNCGFETHADEQAALNIARSWLFLRSQEYKKYQTNKTTGNTDKRAFVETWQSFYRKKLKEVWKPAV

SEQ ID NO: 42234 - protein, 979 aa, synthetic construct
  REGION 1..979: note = engineered CasX variant
QEIKRINKIRRRLVKDSNTKKAGKTGPMKTLLVPVMTPDLRERLENLRKKPENIPQPISNTSRANLNKLLTDYTEMKKAILHVYWEEFQKDPVGLMSRVAQPASKKIDQNKLKPEMDEKGNLTTAGFACSQCGQPLFVYKLEQVSEKGKAYTNYFGRCNVAEHEKLILLAQLKPEKDSDEAVTYSLGKFGQRALDFYSIHVTKESTHPVKPLAQIAGNRYASYPVGKALSDACMGTIASFLSKYQDIIIEHQKVVKGNQKRLESLRELAGKENLEYPSVTLPPQPHTKEGVDAYNEVIARVRMWVNLNLWQKLKLSRDDAKPLLRLKGFPSFPLVERQANEVDWWDMVCNVKKLINEKKEDGKVFWQNLAGYKRQEALRPYLSSEEDRKKGKKFARYQLGDLLLHLEKKHGEDWGKVYDEAWERIDKKVEGLSKHIKLEEERRSEDAQSKAALTDWLRAKASFVIEGLKEADKDEFCRCELKLQKWYGDLRGKPFAIEAENSILDISGFSKQYNCAFIWQKDGVKKLNLYLIINYFKGGKLRFKKIKPEAFEANRFYTVINKKSGEIVPMEVNFNFDDPNLIILPLAFGKRQGREFIWNDLLSLETGSLKLANGRVIEKTLYNRRTRQDEPALFVALTFERREVLDSSNIKPMNLIGVDRGENIPAVIALTDPEGCPLSRFKDSLGNPTHILRIGESYKEKQRTIQAKKEVEQRRAGGYSRKYASKAKNLADDMVRNTARDLLYYAVTQDAMLIFENLSRGFGRQGKRTFMAERQYTRMEDWLTAKLAYEGLPSKTYLSKTLAQYTSKTCSNCGFTITSADYDRVLEKLKKTATGWMTTINGKELKVEGQITYYNRYKRQNVVKDLSVELDRLSEESVNNDISSWTKGRSGNEALSLLKKRFSHRPVQEKFVCLNCGFETHADEQAALNIARSWLFLRSQEYKKYQTNKTTGNTDKRAFVETWQSFYRKKLKEVWKPAV

SEQ ID NO: 42235 - protein, 979 aa, synthetic construct
  REGION 1..979: note = engineered CasX variant
QEIKRINKIRRRLVKDSNTKKAGKTGPMKTLLVPVMTPDLRERLENLRKKPENIPQPISNTSRANLNKLLTDYTEMKKAILHVYWEEFQKDPVGLMSRVAQPASKKIDQNKLKPEMDEKGNLTTAGFACSQCGQPLFVYKLEQVSEKGKAYTNYFGRCNVAEHEKLILLAQLKPEKDSDEAVTYSLGKFGQRALDFYSIHVTKESTHPVKPLAQIAGNRYASHPVGKALSDACMGTIASFLSKYQDIIIEHQKVVKGNQKRLESLRELAGKENLEYPSVTLPPQPHTKEGVDAYNEVIARVRMWVNLNLWQKLKLSRDDAKPLLRLKGFPSFPLVERQANEVDWWDMVCNVKKLINEKKEDGKVFWQNLAGYKRQEALRPYLSSEEDRKKGKKFARYQLGDLLLHLEKKHGEDWGKVYDEAWERIDKKVEGLSKHIKLEEERRSEDAQSKAALTDWLRAKASFVIEGLKEADKDEFCRCELKLQKWYGDLRGKPFAIEAENSILDISGFSKQYNCAFIWQKDGVKKLNLYLIINYFKGGKLRFKKIKPEAFEANRFYTVINKKSGEIVPMEVNFNFDDPNLIILPLAFGKRQGREFIWNDLLSLETGSLKLANGRVIEKTLYNRRTRQDEPALFVALTFERREVLDSSNIKPMNLIGVDRGENIPAVIALTDPEGCPLSRFKDSLGNPTHILRIGESYKEKQRTIQAKKEVEQRRAGGYSRKYASKAKNLADDMVRNTARDLLYYAVTQDAMLIFENLSRGFGRQGKRTFMAERQYTRMEDWLTAKLAYEGLPSKTYLSKTLAQYTSKTCSNCGFTITSADYDRVLEKLKKTATGWMTTINGKELKVEGQITYYNRYKRQNVVKDLSVELDRLSEESVNNDISSWTKGRSGNEALSLLKKRFSHRPVQEKFVCLNCGFETHADEQAALNIARSWLFLRSQEYKKYQTNKTTGNTDKRAFVETWQSFYRKKLKEVWKPAV

SEQ ID NO: 42236 - protein, 979 aa, synthetic construct
  REGION 1..979: note = engineered CasX variant
QEIKRINKIRRRLVKDSNTKKAGKTGPMKTLLVPVMTPDLRERLENLRKKPENIPQPISNTSRANLNKLLTDYTEMKKAILHVYWEEFQKDPVGLMSRVAQPASKKIDQNKLKPEMDEKGNLTTAGFACSQCGQPLFVYKLEQVSEKGKAYTNYFGRCNVAEHEKLILLAQLKPEKDSDEAVTYSLGKFGQRALDFYSIHVTKESTHPVKPLAQIAGNRYASSPVGKALSDACMGTIASFLSKYQDIIIEHQKVVKGNQKRLESLRELAGKENLEYPSVTLPPQPHTKEGVDAYNEVIARVRMWVNLNLWQKLKLSRDDAKPLLRLKGFPSFPLVERQANEVDWWDMVCNVKKLINEKKEDGKVFWQNLAGYKRQEALRPYLSSEEDRKKGKKFARYQLGDLLLHLEKKHGEDWGKVYDEAWERIDKKVEGLSKHIKLEEERRSEDAQSKAALTDWLRAKASFVIEGLKEADKDEFCRCELKLQKWYGDLRGKPFAIEAENSILDISGFSKQYNCAFIWQKDGVKKLNLYLIINYFKGGKLRFKKIKPEAFEANRFYTVINKKSGEIVPMEVNFNFDDPNLIILPLAFGKRQGREFIWNDLLSLETGSLKLANGRVIEKTLYNRRTRQDEPALFVALTFERREVLDSSNIKPMNLIGVDRGENIPAVIALTDPEGCPLSRFKDSLGNPTHILRIGESYKEKQRTIQAKKEVEQRRAGGYSRKYASKAKNLADDMVRNTARDLLYYAVTQDAMLIFENLSRGFGRQGKRTFMAERQYTRMEDWLTAKLAYEGLPSKTYLSKTLAQYTSKTCSNCGFTITSADYDRVLEKLKKTATGWMTTINGKELKVEGQITYYNRYKRQNVVKDLSVELDRLSEESVNNDISSWTKGRSGNEALSLLKKRFSHRPVQEKFVCLNCGFETHADEQAALNIARSWLFLRSQEYKKYQTNKTTGNTDKRAFVETWQSFYRKKLKEVWKPAV

SEQ ID NO: 42237 - protein, 979 aa, synthetic construct
  REGION 1..979: note = engineered CasX variant
QEIKRINKIRRRLVKDSNTKKAGKTGPMKTLLVPVMTPDLRERLENLRKKPENIPQPISNTSRANLNKLLTDYTEMKKAILHVYWEEFQKDPVGLMSRVAQPASKKIDQNKLKPEMDEKGNLTTAGFACSQCGQPLFVYKLEQVSEKGKAYTNYFGRCNVAEHEKLILLAQLKPEKDSDEAVTYSLGKFGQRALDFYSIHVTKESTHPVKPLAQIAGNRYASTPVGKALSDACMGTIASFLSKYQDIIIEHQKVVKGNQKRLESLRELAGKENLEYPSVTLPPQPHTKEGVDAYNEVIARVRMWVNLNLWQKLKLSRDDAKPLLRLKGFPSFPLVERQANEVDWWDMVCNVKKLINEKKEDGKVFWQNLAGYKRQEALRPYLSSEEDRKKGKKFARYQLGDLLLHLEKKHGEDWGKVYDEAWERIDKKVEGLSKHIKLEEERRSEDAQSKAALTDWLRAKASFVIEGLKEADKDEFCRCELKLQKWYGDLRGKPFAIEAENSILDISGFSKQYNCAFIWQKDGVKKLNLYLIINYFKGGKLRFKKIKPEAFEANRFYTVINKKSGEIVPMEVNFNFDDPNLIILPLAFGKRQGREFIWNDLLSLETGSLKLANGRVIEKTLYNRRTRQDEPALFVALTFERREVLDSSNIKPMNLIGVDRGENIPAVIALTDPEGCPLSRFKDSLGNPTHILRIGESYKEKQRTIQAKKEVEQRRAGGYSRKYASKAKNLADDMVRNTARDLLYYAVTQDAMLIFENLSRGFGRQGKRTFMAERQYTRMEDWLTAKLAYEGLPSKTYLSKTLAQYTSKTCSNCGFTITSADYDRVLEKLKKTATGWMTTINGKELKVEGQITYYNRYKRQNVVKDLSVELDRLSEESVNNDISSWTKGRSGNEALSLLKKRFSHRPVQEKFVCLNCGFETHADEQAALNIARSWLFLRSQEYKKYQTNKTTGNTDKRAFVETWQSFYRKKLKEVWKPAV

SEQ ID NO: 42238 - protein, 979 aa, synthetic construct
  REGION 1..979: note = engineered CasX variant
QEIKRINKIRRRLVKDSNTKKAGKTGPMKTLLVPVMTPDLRERLENLRKKPENIPQPISNTSRANLNKLLTDYTEMKKAILHVYWEEFQKDPVGLMSRVAQPASKKIDQNKLKPEMDEKGNLTTAGFACSQCGQPLFVYKLEQVSEKGKAYTNYFGRCNVAEHEKLILLAQLKPEKDSDEAVTYSLGKFGQRALDFYSIHVTKESTHPVKPLAQIAGNRYASAPVGKALSDACMGTIASFLSKYQDIIIEHQKVVKGNQKRLESLRELAGKENLEYPSVTLPPQPHTKEGVDAYNEVIARVRMWVNLNLWQKLKLSRDDAKPLLRLKGFPSFPLVERQANEVDWWDMVCNVKKLINEKKEDGKVFWQNLAGYKRQEALRPYLSSEEDRKKGKKFARYQLGDLLLHLEKKHGEDWGKVYDEAWERIDKKVEGLSKHIKLEEERRSEDAQSKAALTDWLRAKASFVIEGLKEADKDEFCRCELKLQKWYGDLRGKPFAIEAENSILDISGFSKQYNCAFIWQKDGVKKLNLYLIINYFKGGKLRFKKIKPEAFEANRFYTVINKKSGEIVPMEVNFNFDDPNLIILPLAFGKRQGREFIWNDLLSLETGSLKLANGRVIEKTLYNRRTRQDEPALFVALTFERREVLDSSNIKPMNLIGVDRGENIPAVIALTDPEGCPLSRFKDSLGNPTHILRIGESYKEKQRTIQAKKEVEQRRAGGYSRKYASKAKNLADDMVRNTARDLLYYAVTQDAMLIFENLSRGFGRQGKRTFMAERQYTRMEDWLTAKLAYEGLPSKTYLSKTLAQYTSKTCSNCGFTITSADYDRVLEKLKKTATGWMTTINGKELKVEGQITYYNRYKRQNVVKDLSVELDRLSEESVNNDISSWTKGRSGNEALSLLKKRFSHRPVQEKFVCLNCGFETHADEQAALNIARSWLFLRSQEYKKYQTNKTTGNTDKRAFVETWQSFYRKKLKEVWKPAV

SEQ ID NO: 42239 - protein, 979 aa, synthetic construct
  REGION 1..979: note = engineered CasX variant
QEIKRINKIRRRLVKDSNTKKAGKTGPMKTLLVPVMTPDLRERLENLRKKPENIPQPISNTSRANLNKLLTDYTEMKKAILHVYWEEFQKDPVGLMSRVAQPASKKIDQNKLKPEMDEKGNLTTAGFACSQCGQPLFVYKLEQVSEKGKAYTNYFGRCNVAEHEKLILLAQLKPEKDSDEAVTYSLGKFGQRALDFYSIHVTKESTHPVKPLAQIAGNRYASVPVGKALSDACMGTIASFLSKYQDIIIEHQKVVKGNQKRLESLRELAGKENLEYPSVTLPPQPHTKEGVDAYNEVIARVRMWVNLNLWQKLKLSRDDAKPLLRLKGFPSFPLVERQANEVDWWDMVCNVKKLINEKKEDGKVFWQNLAGYKRQEALRPYLSSEEDRKKGKKFARYQLGDLLLHLEKKHGEDWGKVYDEAWERIDKKVEGLSKHIKLEEERRSEDAQSKAALTDWLRAKASFVIEGLKEADKDEFCRCELKLQKWYGDLRGKPFAIEAENSILDISGFSKQYNCAFIWQKDGVKKLNLYLIINYFKGGKLRFKKIKPEAFEANRFYTVINKKSGEIVPMEVNFNFDDPNLIILPLAFGKRQGREFIWNDLLSLETGSLKLANGRVIEKTLYNRRTRQDEPALFVALTFERREVLDSSNIKPMNLIGVDRGENIPAVIALTDPEGCPLSRFKDSLGNPTHILRIGESYKEKQRTIQAKKEVEQRRAGGYSRKYASKAKNLADDMVRNTARDLLYYAVTQDAMLIFENLSRGFGRQGKRTFMAERQYTRMEDWLTAKLAYEGLPSKTYLSKTLAQYTSKTCSNCGFTITSADYDRVLEKLKKTATGWMTTINGKELKVEGQITYYNRYKRQNVVKDLSVELDRLSEESVNNDISSWTKGRSGNEALSLLKKRFSHRPVQEKFVCLNCGFETHADEQAALNIARSWLFLRSQEYKKYQTNKTTGNTDKRAFVETWQSFYRKKLKEVWKPAV

SEQ ID NO: 42240 - protein, 979 aa, synthetic construct
  REGION 1..979: note = engineered CasX variant
QEIKRINKIRRRLVKDSNTKKAGKTGPMKTLLVPVMTPDLRERLENLRKKPENIPQPISNTSRANLNKLLTDYTEMKKAILHVYWEEFQKDPVGLMSRVAQPASKKIDQNKLKPEMDEKGNLTTAGFACSQCGQPLFVYKLEQVSEKGKAYTNYFGRCNVAEHEKLIKLAQLKPEKDSDEAVTYSLGKFGQRALDFYSIHVTKESTHPVKPLAQIAGNRYASGPVGKALSDACMGTIASFLSKYQDIIIEHQKVVKGNQKRLESLRELAGKENLEYPSVTLPPQPHTKEGVDAYNEVIARVRMWVNLNLWQKLKLSRDDAKPLLRLKGFPSFPLVERQANEVDWWDMVCNVKKLINEKKEDGKVFWQNLAGYKRQEALRPYLSSEEDRKKGKKFARYQLGDLLLHLEKKHGEDWGKVYDEAWERIDKKVEGLSKHIKLEEERRSEDAQSKAALTDWLRAKASFVIEGLKEADKDEFCRCELKLQKWYGDLRGKPFAIEAENSILDISGFSKQYNCAFIWQKDGVKKLNLYLIINYFKGGKLRFKKIKPEAFEANRFYTVINKKSGEIVPMEVNFNFDDPNLIILPLAFGKRQGREFIWNDLLSLETGSLKLANGRVIEKTLYNRRTRQDEPALFVALTFERREVLDSSNIKPMNLIGVDRGENIPAVIALTDPEGCPLSRFKDSLGNPTHILRIGESYKEKQRTIQAKKEVEQRRAGGYSRKYASKAKNLADDMVRNTARDLLYYAVTQDAMLIFENLSRGFGRQGKRTFMAERQYTRMEDWLTAKLAYEGLPSKTYLSKTLAQYTSKTCSNCGFTITSADYDRVLEKLKKTATGWMTTINGKELKVEGQITYYNRYKRQNVVKDLSVELDRLSEESVNNDISSWTKGRSGNEALSLLKKRFSHRPVQEKFVCLNCGFETHADEQAALNIARSWLFLRSQEYKKYQTNKTTGNTDKRAFVETWQSFYRKKLKEVWKPAV

SEQ ID NO: 42241 - protein, 978 aa, synthetic construct
  REGION 1..978: note = engineered CasX variant
QEIKRINKIRRRLVKDSNTKKAGKTGPMKTLLVPVMTPDLRERLENLRKKPENIPQPISNTSRANLNKLLTDYTEMKKAILHVYWEEFQKDPVGLMSRVAQPASKKIDQNKLKPEMDEKGNLTTAGFACSQCGQPLFVYKLEQVSEKGKAYTNYFGRCNVAEHEKLILLAQLKPEKDSDEAVTYSLGKFGQRALDFYSIHVTKESTHPVKPLAQIAGNRYASPVGKALSDACMGTIASFLSKYQDIIIEHQKVVKGNQKRLESLRELAGKENLEYPSVTLPPQPHTKEGVDAYNEVIARVRMWVNLNLWQKLKLSRDDAKPLLRLKGFPSFPLVERQANEVDWWDMVCNVKKLINEKKEDGKVFWQNLAGYKRQEALRPYLSSEEDRKKGKKFARYQLGDLLLHLEKKHGEDWGKVYDEAWERIDKKVEGLSKHIKLEEERRSEDAQSKAALTDWLRAKASFVIEGLKEADKDEFCRCELKLQKWYGDLRGKPFAIEAENSILDISGFSKQYNCAFIWQKDGVKKLNLYLIINYFKGGKLRFKKIKPEAFEANRFYTVINKKSGEIVPMEVNFNFDDPNLIILPLAFGKRQGREFIWNDLLSLETGSLKLANGRVIEKTLYNRRTRQDEPALFVALTFERREVLDSSNIKPMNLIGVDRGENIPAVIALTDPEGCPLSRFKDSLGNPTHILRIGESYKEKQRTIQAKKEVEQRRAGGYSRKYASKAKNLADDMVRNTARDLLYYAVTQDAMLIFENLSRGFGRQGKRTFMAERQYTRMEDWLTAKLAYEGLPSKTYLSKTLAQYTSKTCSNCGFTITSADYDRVLEKLKKTATGWMTTINGKELKVEGQITYYNRYKRQNVVKDLSVELDRLSEESVNNDISSWTKGRSGNEALSLLKKRFSHRPVQEKFVCLNCGFETHADEQAALNIARSWLFLRSQEYKKYQTNKTTGNTDKRAFVETWQSFYRKKLKEVWKPAV

SEQ ID NO: 42242 - protein, 978 aa, synthetic construct
  REGION 1..978: note = engineered CasX variant
QEIKRINKIRRRLVKDSNTKKAGKTGPMKTLLVPVMTPDLRERLENLRKKPENIPQPISNTSRANLNKLLTDYTEMKKAILHVYWEEFQKDPVGLMSRVAQPASKKIDQNKLKPEMDEKGNLTTAGFACSQCGQPLFVYKLEQVSEKGKAYTNYFGRCNVAEHEKLILLAQLKPEKDSDEAVTYSLGKFGQRALDFYSIHVTKESTHPVKPLAQIAGNRYASYPVGKALSDACMGTIASFLSKYQDIIIEHQKVVKGNQKRLESLRELAGKENLEYPSVTLPPQPHTKEGVDAYNEVIARVRMWVNLNLWQKLKLSRDDAKPLLRLKGFPSFPLVERQANEVDWWDMVCNVKKLINEKKEDGKVFWQNLAGYKRQEALRPYLSSEEDRQKGKKFARYQLGDLLLHLEKKHGEDWGKVYDEAWERIDKKVEGLSKHIKLEEERRSEDAQSKAALTDWLRAKASFVIEGLKEADKDEFCRCELKLQKWYGDLRGKPFAIEAENSILDISGFSKQYNCAFIWQKDGVKKLNLYLIINYFKGGKLRFKKIKPEAFEANRFYTVINKKSGEIVPMEVNFNFDDPNLIILPLAFGKRQGREFIWNDLLSLETGSLKLANGRVIEKTLYNRRTRQDEPALFVALTFERREVLDSSNIKPMNLIGVDRGENIPAVIALTDPEGCPLSRFKDSLGNPTHILRIGESYKEKQRTIQAKKEVEQRRAGGYSRKYASKAKNLADDMVRNTARDLLYYAVTQDAMLIFENLSRGFGRQGKRTFMAERQYTRMEDWLTAKLAYEGLPSKTYLSKTLAQYTSKTCSNCGFTITSADYDRVLEKLKKTATGWMTTINGKELKVEGQITYYNRYKRQNVVKDLSVELDRLSEESVNNDISSWTKGRSGEALSLLKKRFSHRPVQEKFVCLNCGFETHADEQAALNIARSWLFLRSQEYKKYQTNKTTGNTDKRAFVETWQSFYRKKLKEVWKPAV

SEQ ID NO: 42243 - protein, 978 aa, synthetic construct
  REGION 1..978: note = engineered CasX variant
QEIKRINKIRRRLVKDSNTKKAGKTGPMKTLLVPVMTPDLRERLENLRKKPENIPQPISNTSRANLNKLLTDYTEMKKAILHVYWEEFQKDPVGLMSRVAQPASKKIDQNKLKPEMDEKGNLTTAGFACSQCGQPLFVYKLEQVSEKGKAYTNYFGRCNVAEHEKLILLAQLKPEKDSDEAVTYSLGKFGQRALDFYSIHVTKESTHPVKPLAQIAGNRYASHPVGKALSDACMGTIASFLSKYQDIIIEHQKVVKGNQKRLESLRELAGKENLEYPSVTLPPQPHTKEGVDAYNEVIARVRMWVNLNLWQKLKLSRDDAKPLLRLKGFPSFPLVERQANEVDWWDMVCNVKKLINEKKEDGKVFWQNLAGYKRQEALRPYLSSEEDRQKGKKFARYQLGDLLLHLEKKHGEDWGKVYDEAWERIDKKVEGLSKHIKLEEERRSEDAQSKAALTDWLRAKASFVIEGLKEADKDEFCRCELKLQKWYGDLRGKPFAIEAENSILDISGFSKQYNCAFIWQKDGVKKLNLYLIINYFKGGKLRFKKIKPEAFEANRFYTVINKKSGEIVPMEVNFNFDDPNLIILPLAFGKRQGREFIWNDLLSLETGSLKLANGRVIEKTLYNRRTRQDEPALFVALTFERREVLDSSNIKPMNLIGVDRGENIPAVIALTDPEGCPLSRFKDSLGNPTHILRIGESYKEKQRTIQAKKEVEQRRAGGYSRKYASKAKNLADDMVRNTARDLLYYAVTQDAMLIFENLSRGFGRQGKRTFMAERQYTRMEDWLTAKLAYEGLPSKTYLSKTLAQYTSKTCSNCGFTITSADYDRVLEKLKKTATGWMTTINGKELKVEGQITYYNRYKRQNVVKDLSVELDRLSEESVNNDISSWTKGRSGEALSLLKKRFSHRPVQEKFVCLNCGFETHADEQAALNIARSWLFLRSQEYKKYQTNKTTGNTDKRAFVETWQSFYRKKLKEVWKPAV

SEQ ID NO: 42244 - protein, 978 aa, synthetic construct
  REGION 1..978: note = engineered CasX variant
QEIKRINKIRRRLVKDSNTKKAGKTGPMKTLLVPVMTPDLRERLENLRKKPENIPQPISNTSRANLNKLLTDYTEMKKAILHVYWEEFQKDPVGLMSRVAQPASKKIDQNKLKPEMDEKGNLTTAGFACSQCGQPLFVYKLEQVSEKGKAYTNYFGRCNVAEHEKLILLAQLKPEKDSDEAVTYSLGKFGQRALDFYSIHVTKESTHPVKPLAQIAGNRYASSPVGKALSDACMGTIASFLSKYQDIIIEHQKVVKGNQKRLESLRELAGKENLEYPSVTLPPQPHTKEGVDAYNEVIARVRMWVNLNLWQKLKLSRDDAKPLLRLKGFPSFPLVERQANEVDWWDMVCNVKKLINEKKEDGKVFWQNLAGYKRQEALRPYLSSEEDRQKGKKFARYQLGDLLLHLEKKHGEDWGKVYDEAWERIDKKVEGLSKHIKLEEERRSEDAQSKAALTDWLRAKASFVIEGLKEADKDEFCRCELKLQKWYGDLRGKPFAIEAENSILDISGFSKQYNCAFIWQKDGVKKLNLYLIINYFKGGKLRFKKIKPEAFEANRFYTVINKKSGEIVPMEVNFNFDDPNLIILPLAFGKRQGREFIWNDLLSLETGSLKLANGRVIEKTLYNRRTRQDEPALFVALTFERREVLDSSNIKPMNLIGVDRGENIPAVIALTDPEGCPLSRFKDSLGNPTHILRIGESYKEKQRTIQAKKEVEQRRAGGYSRKYASKAKNLADDMVRNTARDLLYYAVTQDAMLIFENLSRGFGRQGKRTFMAERQYTRMEDWLTAKLAYEGLPSKTYLSKTLAQYTSKTCSNCGFTITSADYDRVLEKLKKTATGWMTTINGKELKVEGQITYYNRYKRQNVVKDLSVELDRLSEESVNNDISSWTKGRSGEALSLLKKRFSHRPVQEKFVCLNCGFETHADEQAALNIARSWLFLRSQEYKKYQTNKTTGNTDKRAFVETWQSFYRKKLKEVWKPAV

SEQ ID NO: 42245 - protein, 978 aa, synthetic construct
  REGION 1..978: note = engineered CasX variant
QEIKRINKIRRRLVKDSNTKKAGKTGPMKTLLVPVMTPDLRERLENLRKKPENIPQPISNTSRANLNKLLTDYTEMKKAILHVYWEEFQKDPVGLMSRVAQPASKKIDQNKLKPEMDEKGNLTTAGFACSQCGQPLFVYKLEQVSEKGKAYTNYFGRCNVAEHEKLILLAQLKPEKDSDEAVTYSLGKFGQRALDFYSIHVTKESTHPVKPLAQIAGNRYASTPVGKALSDACMGTIASFLSKYQDIIIEHQKVVKGNQKRLESLRELAGKENLEYPSVTLPPQPHTKEGVDAYNEVIARVRMWVNLNLWQKLKLSRDDAKPLLRLKGFPSFPLVERQANEVDWWDMVCNVKKLINEKKEDGKVFWQNLAGYKRQEALRPYLSSEEDRQKGKKFARYQLGDLLLHLEKKHGEDWGKVYDEAWERIDKKVEGLSKHIKLEEERRSEDAQSKAALTDWLRAKASFVIEGLKEADKDEFCRCELKLQKWYGDLRGKPFAIEAENSILDISGFSKQYNCAFIWQKDGVKKLNLYLIINYFKGGKLRFKKIKPEAFEANRFYTVINKKSGEIVPMEVNFNFDDPNLIILPLAFGKRQGREFIWNDLLSLETGSLKLANGRVIEKTLYNRRTRQDEPALFVALTFERREVLDSSNIKPMNLIGVDRGENIPAVIALTDPEGCPLSRFKDSLGNPTHILRIGESYKEKQRTIQAKKEVEQRRAGGYSRKYASKAKNLADDMVRNTARDLLYYAVTQDAMLIFENLSRGFGRQGKRTFMAERQYTRMEDWLTAKLAYEGLPSKTYLSKTLAQYTSKTCSNCGFTITSADYDRVLEKLKKTATGWMTTINGKELKVEGQITYYNRYKRQNVVKDLSVELDRLSEESVNNDISSWTKGRSGEALSLLKKRFSHRPVQEKFVCLNCGFETHADEQAALNIARSWLFLRSQEYKKYQTNKTTGNTDKRAFVETWQSFYRKKLKEVWKPAV

SEQ ID NO: 42246 - protein, 978 aa, synthetic construct
  REGION 1..978: note = engineered CasX variant
QEIKRINKIRRRLVKDSNTKKAGKTGPMKTLLVPVMTPDLRERLENLRKKPENIPQPISNTSRANLNKLLTDYTEMKKAILHVYWEEFQKDPVGLMSRVAQPASKKIDQNKLKPEMDEKGNLTTAGFACSQCGQPLFVYKLEQVSEKGKAYTNYFGRCNVAEHEKLILLAQLKPEKDSDEAVTYSLGKFGQRALDFYSIHVTKESTHPVKPLAQIAGNRYASAPVGKALSDACMGTIASFLSKYQDIIIEHQKVVKGNQKRLESLRELAGKENLEYPSVTLPPQPHTKEGVDAYNEVIARVRMWVNLNLWQKLKLSRDDAKPLLRLKGFPSFPLVERQANEVDWWDMVCNVKKLINEKKEDGKVFWQNLAGYKRQEALRPYLSSEEDRQKGKKFARYQLGDLLLHLEKKHGEDWGKVYDEAWERIDKKVEGLSKHIKLEEERRSEDAQSKAALTDWLRAKASFVIEGLKEADKDEFCRCELKLQKWYGDLRGKPFAIEAENSILDISGFSKQYNCAFIWQKDGVKKLNLYLIINYFKGGKLRFKKIKPEAFEANRFYTVINKKSGEIVPMEVNFNFDDPNLIILPLAFGKRQGREFIWNDLLSLETGSLKLANGRVIEKTLYNRRTRQDEPALFVALTFERREVLDSSNIKPMNLIGVDRGENIPAVIALTDPEGCPLSRFKDSLGNPTHILRIGESYKEKQRTIQAKKEVEQRRAGGYSRKYASKAKNLADDMVRNTARDLLYYAVTQDAMLIFENLSRGFGRQGKRTFMAERQYTRMEDWLTAKLAYEGLPSKTYLSKTLAQYTSKTCSNCGFTITSADYDRVLEKLKKTATGWMTTINGKELKVEGQITYYNRYKRQNVVKDLSVELDRLSEESVNNDISSWTKGRSGEALSLLKKRFSHRPVQEKFVCLNCGFETHADEQAALNIARSWLFLRSQEYKKYQTNKTTGNTDKRAFVETWQSFYRKKLKEVWKPAV

SEQ ID NO: 42247 - protein, 978 aa, synthetic construct
  REGION 1..978: note = engineered CasX variant
QEIKRINKIRRRLVKDSNTKKAGKTGPMKTLLVPVMTPDLRERLENLRKKPENIPQPISNTSRANLNKLLTDYTEMKKAILHVYWEEFQKDPVGLMSRVAQPASKKIDQNKLKPEMDEKGNLTTAGFACSQCGQPLFVYKLEQVSEKGKAYTNYFGRCNVAEHEKLILLAQLKPEKDSDEAVTYSLGKFGQRALDFYSIHVTKESTHPVKPLAQIAGNRYASVPVGKALSDACMGTIASFLSKYQDIIIEHQKVVKGNQKRLESLRELAGKENLEYPSVTLPPQPHTKEGVDAYNEVIARVRMWVNLNLWQKLKLSRDDAKPLLRLKGFPSFPLVERQANEVDWWDMVCNVKKLINEKKEDGKVFWQNLAGYKRQEALRPYLSSEEDRQKGKKFARYQLGDLLLHLEKKHGEDWGKVYDEAWERIDKKVEGLSKHIKLEEERRSEDAQSKAALTDWLRAKASFVIEGLKEADKDEFCRCELKLQKWYGDLRGKPFAIEAENSILDISGFSKQYNCAFIWQKDGVKKLNLYLIINYFKGGKLRFKKIKPEAFEANRFYTVINKKSGEIVPMEVNFNFDDPNLIILPLAFGKRQGREFIWNDLLSLETGSLKLANGRVIEKTLYNRRTRQDEPALFVALTFERREVLDSSNIKPMNLIGVDRGENIPAVIALTDPEGCPLSRFKDSLGNPTHILRIGESYKEKQRTIQAKKEVEQRRAGGYSRKYASKAKNLADDMVRNTARDLLYYAVTQDAMLIFENLSRGFGRQGKRTFMAERQYTRMEDWLTAKLAYEGLPSKTYLSKTLAQYTSKTCSNCGFTITSADYDRVLEKLKKTATGWMTTINGKELKVEGQITYYNRYKRQNVVKDLSVELDRLSEESVNNDISSWTKGRSGEALSLLKKRFSHRPVQEKFVCLNCGFETHADEQAALNIARSWLFLRSQEYKKYQTNKTTGNTDKRAFVETWQSFYRKKLKEVWKPAV

SEQ ID NO: 42248 - protein, 978 aa, synthetic construct
  REGION 1..978: note = engineered CasX variant
QEIKRINKIRRRLVKDSNTKKAGKTGPMKTLLVPVMTPDLRERLENLRKKPENIPQPISNTSRANLNKLLTDYTEMKKAILHVYWEEFQKDPVGLMSRVAQPASKKIDQNKLKPEMDEKGNLTTAGFACSQCGQPLFVYKLEQVSEKGKAYTNYFGRCNVAEHEKLIKLAQLKPEKDSDEAVTYSLGKFGQRALDFYSIHVTKESTHPVKPLAQIAGNRYASGPVGKALSDACMGTIASFLSKYQDIIIEHQKVVKGNQKRLESLRELAGKENLEYPSVTLPPQPHTKEGVDAYNEVIARVRMWVNLNLWQKLKLSRDDAKPLLRLKGFPSFPLVERQANEVDWWDMVCNVKKLINEKKEDGKVFWQNLAGYKRQEALRPYLSSEEDRQKGKKFARYQLGDLLLHLEKKHGEDWGKVYDEAWERIDKKVEGLSKHIKLEEERRSEDAQSKAALTDWLRAKASFVIEGLKEADKDEFCRCELKLQKWYGDLRGKPFAIEAENSILDISGFSKQYNCAFIWQKDGVKKLNLYLIINYFKGGKLRFKKIKPEAFEANRFYTVINKKSGEIVPMEVNFNFDDPNLIILPLAFGKRQGREFIWNDLLSLETGSLKLANGRVIEKTLYNRRTRQDEPALFVALTFERREVLDSSNIKPMNLIGVDRGENIPAVIALTDPEGCPLSRFKDSLGNPTHILRIGESYKEKQRTIQAKKEVEQRRAGGYSRKYASKAKNLADDMVRNTARDLLYYAVTQDAMLIFENLSRGFGRQGKRTFMAERQYTRMEDWLTAKLAYEGLPSKTYLSKTLAQYTSKTCSNCGFTITSADYDRVLEKLKKTATGWMTTINGKELKVEGQITYYNRYKRQNVVKDLSVELDRLSEESVNNDISSWTKGRSGEALSLLKKRFSHRPVQEKFVCLNCGFETHADEQAALNIARSWLFLRSQEYKKYQTNKTTGNTDKRAFVETWQSFYRKKLKEVWKPAV

SEQ ID NO: 42249 - protein, 977 aa, synthetic construct
  REGION 1..977: note = engineered CasX variant
QEIKRINKIRRRLVKDSNTKKAGKTGPMKTLLVPVMTPDLRERLENLRKKPENIPQPISNTSRANLNKLLTDYTEMKKAILHVYWEEFQKDPVGLMSRVAQPASKKIDQNKLKPEMDEKGNLTTAGFACSQCGQPLFVYKLEQVSEKGKAYTNYFGRCNVAEHEKLILLAQLKPEKDSDEAVTYSLGKFGQRALDFYSIHVTKESTHPVKPLAQIAGNRYASPVGKALSDACMGTIASFLSKYQDIIIEHQKVVKGNQKRLESLRELAGKENLEYPSVTLPPQPHTKEGVDAYNEVIARVRMWVNLNLWQKLKLSRDDAKPLLRLKGFPSFPLVERQANEVDWWDMVCNVKKLINEKKEDGKVFWQNLAGYKRQEALRPYLSSEEDRQKGKKFARYQLGDLLLHLEKKHGEDWGKVYDEAWERIDKKVEGLSKHIKLEEERRSEDAQSKAALTDWLRAKASFVIEGLKEADKDEFCRCELKLQKWYGDLRGKPFAIEAENSILDISGFSKQYNCAFIWQKDGVKKLNLYLIINYFKGGKLRFKKIKPEAFEANRFYTVINKKSGEIVPMEVNFNFDDPNLIILPLAFGKRQGREFIWNDLLSLETGSLKLANGRVIEKTLYNRRTRQDEPALFVALTFERREVLDSSNIKPMNLIGVDRGENIPAVIALTDPEGCPLSRFKDSLGNPTHILRIGESYKEKQRTIQAKKEVEQRRAGGYSRKYASKAKNLADDMVRNTARDLLYYAVTQDAMLIFENLSRGFGRQGKRTFMAERQYTRMEDWLTAKLAYEGLPSKTYLSKTLAQYTSKTCSNCGFTITSADYDRVLEKLKKTATGWMTTINGKELKVEGQITYYNRYKRQNVVKDLSVELDRLSEESVNNDISSWTKGRSGEALSLLKKRFSHRPVQEKFVCLNCGFETHADEQAALNIARSWLFLRSQEYKKYQTNKTTGNTDKRAFVETWQSFYRKKLKEVWKPAV

SEQ ID NO: 42250 - protein, 978 aa, synthetic construct
  REGION 1..978: note = engineered CasX variant
QEIKRINKIRRRLVKDSNTKKAGKTGPMKTLLVPVMTPDLRERLENLRKKPENIPQPISNTSRANLNKLLTDYTEMKKAILHVYWEEFQKDPVGLMSRVAQPASKKIDQNKLKPEMDEKGNLTTAGFACSQCGQPLFVYKLEQVSEKGKAYTNYFGRCNVAEHEKLILLAQLKPEKDSDEAVTYSLGKFGQRALDFYSIHVTKESTHPVKPLAQIAGNRYASYPVGKALSDACMGTIASFLSKYQDIIIEHQKVVKGNQKRLESLRELAGKENLEYPSVTLPPQPHTKEGVDAYNEVIARVRMWVNLNLWQKLKLSRDDAKPLLRLKGFPSFPLVERQANEVDWWDMVCNVKKLINEKKEDGKVFWQNLAGYKRQEALRPYLSSEEDRKKGKKFARYQLGDLLLHLEKKHGEDWGKVYDEAWERIDKKVEGLSKHIKLEEERRSEDAQSKAALTDWLRAKASFVIEGLKEADKDEFCRCELKLQKWYGDLRGKPFAIEAENSILDISGFSKQYNCAFIWQKDGVKKLNLYLIINYFKGGKLRFKKIKPEAFEANRFYTVINKKSGEIVPMEVNFNFDDPNLIILPLAFGKRQGREFIWNDLLSLETGSLKLANGRVIEKTLYNRRTRQDEPALFVALTFERREVLDSSNIKPMNLIGVDRGENIPAVIALTDPEGCPLSRFKDSLGNPTHILRIGESYKEKQRTIQAKKEVEQRRAGGYSRKYASKAKNLADDMVRNTARDLLYYAVTQDAMLIFENLSRGFGRQGKRTFMAERQYTRMEDWLTAKLAYEGLPSQTYLSKTLAQYTSKTCSNCGFTITSADYDRVLEKLKKTATGWMTTINGKELKVEGQITYYNRYKRQNVVKDLSVELDRLSEESVNNDISSWTKGRSGEALSLLKKRFSHRPVQEKFVCLNCGFETHADEQAALNIARSWLFLRSQEYKKYQTNKTTGNTDKRAFVETWQSFYRKKLKEVWKPAV

SEQ ID NO: 42251 - protein, 978 aa, synthetic construct
  REGION 1..978: note = engineered CasX variant
QEIKRINKIRRRLVKDSNTKKAGKTGPMKTLLVPVMTPDLRERLENLRKKPENIPQPISNTSRANLNKLLTDYTEMKKAILHVYWEEFQKDPVGLMSRVAQPASKKIDQNKLKPEMDEKGNLTTAGFACSQCGQPLFVYKLEQVSEKGKAYTNYFGRCNVAEHEKLILLAQLKPEKDSDEAVTYSLGKFGQRALDFYSIHVTKESTHPVKPLAQIAGNRYASHPVGKALSDACMGTIASFLSKYQDIIIEHQKVVKGNQKRLESLRELAGKENLEYPSVTLPPQPHTKEGVDAYNEVIARVRMWVNLNLWQKLKLSRDDAKPLLRLKGFPSFPLVERQANEVDWWDMVCNVKKLINEKKEDGKVFWQNLAGYKRQEALRPYLSSEEDRKKGKKFARYQLGDLLLHLEKKHGEDWGKVYDEAWERIDKKVEGLSKHIKLEEERRSEDAQSKAALTDWLRAKASFVIEGLKEADKDEFCRCELKLQKWYGDLRGKPFAIEAENSILDISGFSKQYNCAFIWQKDGVKKLNLYLIINYFKGGKLRFKKIKPEAFEANRFYTVINKKSGEIVPMEVNFNFDDPNLIILPLAFGKRQGREFIWNDLLSLETGSLKLANGRVIEKTLYNRRTRQDEPALFVALTFERREVLDSSNIKPMNLIGVDRGENIPAVIALTDPEGCPLSRFKDSLGNPTHILRIGESYKEKQRTIQAKKEVEQRRAGGYSRKYASKAKNLADDMVRNTARDLLYYAVTQDAMLIFENLSRGFGRQGKRTFMAERQYTRMEDWLTAKLAYEGLPSQTYLSKTLAQYTSKTCSNCGFTITSADYDRVLEKLKKTATGWMTTINGKELKVEGQITYYNRYKRQNVVKDLSVELDRLSEESVNNDISSWTKGRSGEALSLLKKRFSHRPVQEKFVCLNCGFETHADEQAALNIARSWLFLRSQEYKKYQTNKTTGNTDKRAFVETWQSFYRKKLKEVWKPAV

SEQ ID NO: 42252 - protein, 978 aa, synthetic construct
  REGION 1..978: note = engineered CasX variant
QEIKRINKIRRRLVKDSNTKKAGKTGPMKTLLVPVMTPDLRERLENLRKKPENIPQPISNTSRANLNKLLTDYTEMKKAILHVYWEEFQKDPVGLMSRVAQPASKKIDQNKLKPEMDEKGNLTTAGFACSQCGQPLFVYKLEQVSEKGKAYTNYFGRCNVAEHEKLILLAQLKPEKDSDEAVTYSLGKFGQRALDFYSIHVTKESTHPVKPLAQIAGNRYASSPVGKALSDACMGTIASFLSKYQDIIIEHQKVVKGNQKRLESLRELAGKENLEYPSVTLPPQPHTKEGVDAYNEVIARVRMWVNLNLWQKLKLSRDDAKPLLRLKGFPSFPLVERQANEVDWWDMVCNVKKLINEKKEDGKVFWQNLAGYKRQEALRPYLSSEEDRKKGKKFARYQLGDLLLHLEKKHGEDWGKVYDEAWERIDKKVEGLSKHIKLEEERRSEDAQSKAALTDWLRAKASFVIEGLKEADKDEFCRCELKLQKWYGDLRGKPFAIEAENSILDISGFSKQYNCAFIWQKDGVKKLNLYLIINYFKGGKLRFKKIKPEAFEANRFYTVINKKSGEIVPMEVNFNFDDPNLIILPLAFGKRQGREFIWNDLLSLETGSLKLANGRVIEKTLYNRRTRQDEPALFVALTFERREVLDSSNIKPMNLIGVDRGENIPAVIALTDPEGCPLSRFKDSLGNPTHILRIGESYKEKQRTIQAKKEVEQRRAGGYSRKYASKAKNLADDMVRNTARDLLYYAVTQDAMLIFENLSRGFGRQGKRTFMAERQYTRMEDWLTAKLAYEGLPSQTYLSKTLAQYTSKTCSNCGFTITSADYDRVLEKLKKTATGWMTTINGKELKVEGQITYYNRYKRQNVVKDLSVELDRLSEESVNNDISSWTKGRSGEALSLLKKRFSHRPVQEKFVCLNCGFETHADEQAALNIARSWLFLRSQEYKKYQTNKTTGNTDKRAFVETWQSFYRKKLKEVWKPAV

SEQ ID NO: 42253 - protein, 978 aa, synthetic construct
  REGION 1..978: note = engineered CasX variant
QEIKRINKIRRRLVKDSNTKKAGKTGPMKTLLVPVMTPDLRERLENLRKKPENIPQPISNTSRANLNKLLTDYTEMKKAILHVYWEEFQKDPVGLMSRVAQPASKKIDQNKLKPEMDEKGNLTTAGFACSQCGQPLFVYKLEQVSEKGKAYTNYFGRCNVAEHEKLILLAQLKPEKDSDEAVTYSLGKFGQRALDFYSIHVTKESTHPVKPLAQIAGNRYASTPVGKALSDACMGTIASFLSKYQDIIIEHQKVVKGNQKRLESLRELAGKENLEYPSVTLPPQPHTKEGVDAYNEVIARVRMWVNLNLWQKLKLSRDDAKPLLRLKGFPSFPLVERQANEVDWWDMVCNVKKLINEKKEDGKVFWQNLAGYKRQEALRPYLSSEEDRKKGKKFARYQLGDLLLHLEKKHGEDWGKVYDEAWERIDKKVEGLSKHIKLEEERRSEDAQSKAALTDWLRAKASFVIEGLKEADKDEFCRCELKLQKWYGDLRGKPFAIEAENSILDISGFSKQYNCAFIWQKDGVKKLNLYLIINYFKGGKLRFKKIKPEAFEANRFYTVINKKSGEIVPMEVNFNFDDPNLIILPLAFGKRQGREFIWNDLLSLETGSLKLANGRVIEKTLYNRRTRQDEPALFVALTFERREVLDSSNIKPMNLIGVDRGENIPAVIALTDPEGCPLSRFKDSLGNPTHILRIGESYKEKQRTIQAKKEVEQRRAGGYSRKYASKAKNLADDMVRNTARDLLYYAVTQDAMLIFENLSRGFGRQGKRTFMAERQYTRMEDWLTAKLAYEGLPSQTYLSKTLAQYTSKTCSNCGFTITSADYDRVLEKLKKTATGWMTTINGKELKVEGQITYYNRYKRQNVVKDLSVELDRLSEESVNNDISSWTKGRSGEALSLLKKRFSHRPVQEKFVCLNCGFETHADEQAALNIARSWLFLRSQEYKKYQTNKTTGNTDKRAFVETWQSFYRKKLKEVWKPAV

SEQ ID NO: 42254 - protein, 978 aa, synthetic construct
  REGION 1..978: note = engineered CasX variant
QEIKRINKIRRRLVKDSNTKKAGKTGPMKTLLVPVMTPDLRERLENLRKKPENIPQPISNTSRANLNKLLTDYTEMKKAILHVYWEEFQKDPVGLMSRVAQPASKKIDQNKLKPEMDEKGNLTTAGFACSQCGQPLFVYKLEQVSEKGKAYTNYFGRCNVAEHEKLILLAQLKPEKDSDEAVTYSLGKFGQRALDFYSIHVTKESTHPVKPLAQIAGNRYASAPVGKALSDACMGTIASFLSKYQDIIIEHQKVVKGNQKRLESLRELAGKENLEYPSVTLPPQPHTKEGVDAYNEVIARVRMWVNLNLWQKLKLSRDDAKPLLRLKGFPSFPLVERQANEVDWWDMVCNVKKLINEKKEDGKVFWQNLAGYKRQEALRPYLSSEEDRKKGKKFARYQLGDLLLHLEKKHGEDWGKVYDEAWERIDKKVEGLSKHIKLEEERRSEDAQSKAALTDWLRAKASFVIEGLKEADKDEFCRCELKLQKWYGDLRGKPFAIEAENSILDISGFSKQYNCAFIWQKDGVKKLNLYLIINYFKGGKLRFKKIKPEAFEANRFYTVINKKSGEIVPMEVNFNFDDPNLIILPLAFGKRQGREFIWNDLLSLETGSLKLANGRVIEKTLYNRRTRQDEPALFVALTFERREVLDSSNIKPMNLIGVDRGENIPAVIALTDPEGCPLSRFKDSLGNPTHILRIGESYKEKQRTIQAKKEVEQRRAGGYSRKYASKAKNLADDMVRNTARDLLYYAVTQDAMLIFENLSRGFGRQGKRTFMAERQYTRMEDWLTAKLAYEGLPSQTYLSKTLAQYTSKTCSNCGFTITSADYDRVLEKLKKTATGWMTTINGKELKVEGQITYYNRYKRQNVVKDLSVELDRLSEESVNNDISSWTKGRSGEALSLLKKRFSHRPVQEKFVCLNCGFETHADEQAALNIARSWLFLRSQEYKKYQTNKTTGNTDKRAFVETWQSFYRKKLKEVWKPAV

SEQ ID NO: 42255 - protein, 978 aa, synthetic construct
  REGION 1..978: note = engineered CasX variant
QEIKRINKIRRRLVKDSNTKKAGKTGPMKTLLVPVMTPDLRERLENLRKKPENIPQPISNTSRANLNKLLTDYTEMKKAILHVYWEEFQKDPVGLMSRVAQPASKKIDQNKLKPEMDEKGNLTTAGFACSQCGQPLFVYKLEQVSEKGKAYTNYFGRCNVAEHEKLILLAQLKPEKDSDEAVTYSLGKFGQRALDFYSIHVTKESTHPVKPLAQIAGNRYASVPVGKALSDACMGTIASFLSKYQDIIIEHQKVVKGNQKRLESLRELAGKENLEYPSVTLPPQPHTKEGVDAYNEVIARVRMWVNLNLWQKLKLSRDDAKPLLRLKGFPSFPLVERQANEVDWWDMVCNVKKLINEKKEDGKVFWQNLAGYKRQEALRPYLSSEEDRKKGKKFARYQLGDLLLHLEKKHGEDWGKVYDEAWERIDKKVEGLSKHIKLEEERRSEDAQSKAALTDWLRAKASFVIEGLKEADKDEFCRCELKLQKWYGDLRGKPFAIEAENSILDISGFSKQYNCAFIWQKDGVKKLNLYLIINYFKGGKLRFKKIKPEAFEANRFYTVINKKSGEIVPMEVNFNFDDPNLIILPLAFGKRQGREFIWNDLLSLETGSLKLANGRVIEKTLYNRRTRQDEPALFVALTFERREVLDSSNIKPMNLIGVDRGENIPAVIALTDPEGCPLSRFKDSLGNPTHILRIGESYKEKQRTIQAKKEVEQRRAGGYSRKYASKAKNLADDMVRNTARDLLYYAVTQDAMLIFENLSRGFGRQGKRTFMAERQYTRMEDWLTAKLAYEGLPSQTYLSKTLAQYTSKTCSNCGFTITSADYDRVLEKLKKTATGWMTTINGKELKVEGQITYYNRYKRQNVVKDLSVELDRLSEESVNNDISSWTKGRSGEALSLLKKRFSHRPVQEKFVCLNCGFETHADEQAALNIARSWLFLRSQEYKKYQTNKTTGNTDKRAFVETWQSFYRKKLKEVWKPAV

SEQ ID NO: 42256 - protein, 978 aa, synthetic construct
  REGION 1..978: note = engineered CasX variant
QEIKRINKIRRRLVKDSNTKKAGKTGPMKTLLVPVMTPDLRERLENLRKKPENIPQPISNTSRANLNKLLTDYTEMKKAILHVYWEEFQKDPVGLMSRVAQPASKKIDQNKLKPEMDEKGNLTTAGFACSQCGQPLFVYKLEQVSEKGKAYTNYFGRCNVAEHEKLIKLAQLKPEKDSDEAVTYSLGKFGQRALDFYSIHVTKESTHPVKPLAQIAGNRYASGPVGKALSDACMGTIASFLSKYQDIIIEHQKVVKGNQKRLESLRELAGKENLEYPSVTLPPQPHTKEGVDAYNEVIARVRMWVNLNLWQKLKLSRDDAKPLLRLKGFPSFPLVERQANEVDWWDMVCNVKKLINEKKEDGKVFWQNLAGYKRQEALRPYLSSEEDRKKGKKFARYQLGDLLLHLEKKHGEDWGKVYDEAWERIDKKVEGLSKHIKLEEERRSEDAQSKAALTDWLRAKASFVIEGLKEADKDEFCRCELKLQKWYGDLRGKPFAIEAENSILDISGFSKQYNCAFIWQKDGVKKLNLYLIINYFKGGKLRFKKIKPEAFEANRFYTVINKKSGEIVPMEVNFNFDDPNLIILPLAFGKRQGREFIWNDLLSLETGSLKLANGRVIEKTLYNRRTRQDEPALFVALTFERREVLDSSNIKPMNLIGVDRGENIPAVIALTDPEGCPLSRFKDSLGNPTHILRIGESYKEKQRTIQAKKEVEQRRAGGYSRKYASKAKNLADDMVRNTARDLLYYAVTQDAMLIFENLSRGFGRQGKRTFMAERQYTRMEDWLTAKLAYEGLPSQTYLSKTLAQYTSKTCSNCGFTITSADYDRVLEKLKKTATGWMTTINGKELKVEGQITYYNRYKRQNVVKDLSVELDRLSEESVNNDISSWTKGRSGEALSLLKKRFSHRPVQEKFVCLNCGFETHADEQAALNIARSWLFLRSQEYKKYQTNKTTGNTDKRAFVETWQSFYRKKLKEVWKPAV

SEQ ID NO: 42257 - protein, 977 aa, synthetic construct
  REGION 1..977: note = engineered CasX variant
QEIKRINKIRRRLVKDSNTKKAGKTGPMKTLLVPVMTPDLRERLENLRKKPENIPQPISNTSRANLNKLLTDYTEMKKAILHVYWEEFQKDPVGLMSRVAQPASKKIDQNKLKPEMDEKGNLTTAGFACSQCGQPLFVYKLEQVSEKGKAYTNYFGRCNVAEHEKLILLAQLKPEKDSDEAVTYSLGKFGQRALDFYSIHVTKESTHPVKPLAQIAGNRYASPVGKALSDACMGTIASFLSKYQDIIIEHQKVVKGNQKRLESLRELAGKENLEYPSVTLPPQPHTKEGVDAYNEVIARVRMWVNLNLWQKLKLSRDDAKPLLRLKGFPSFPLVERQANEVDWWDMVCNVKKLINEKKEDGKVFWQNLAGYKRQEALRPYLSSEEDRKKGKKFARYQLGDLLLHLEKKHGEDWGKVYDEAWERIDKKVEGLSKHIKLEEERRSEDAQSKAALTDWLRAKASFVIEGLKEADKDEFCRCELKLQKWYGDLRGKPFAIEAENSILDISGFSKQYNCAFIWQKDGVKKLNLYLIINYFKGGKLRFKKIKPEAFEANRFYTVINKKSGEIVPMEVNFNFDDPNLIILPLAFGKRQGREFIWNDLLSLETGSLKLANGRVIEKTLYNRRTRQDEPALFVALTFERREVLDSSNIKPMNLIGVDRGENIPAVIALTDPEGCPLSRFKDSLGNPTHILRIGESYKEKQRTIQAKKEVEQRRAGGYSRKYASKAKNLADDMVRNTARDLLYYAVTQDAMLIFENLSRGFGRQGKRTFMAERQYTRMEDWLTAKLAYEGLPSQTYLSKTLAQYTSKTCSNCGFTITSADYDRVLEKLKKTATGWMTTINGKELKVEGQITYYNRYKRQNVVKDLSVELDRLSEESVNNDISSWTKGRSGEALSLLKKRFSHRPVQEKFVCLNCGFETHADEQAALNIARSWLFLRSQEYKKYQTNKTTGNTDKRAFVETWQSFYRKKLKEVWKPAV

SEQ ID NO: 42258 - protein, 978 aa, synthetic construct
  REGION 1..978: note = engineered CasX variant
QEIKRINKIRRRLVKDSNTKKAGKTGPMKTLLVPVMTPDLRERLENLRKKPENIPQPISNTSRANLNKLLTDYTEMKKAILHVYWEEFQKDPVGLMSRVAQPASKKIDQNKLKPEMDEKGNLTTAGFACSQCGQPLFVYKLEQVSEKGKAYTNYFGRCNVAEHEKLILLAQLKPEKDSDEAVTYSLGKFGQRALDFYSIHVTKESTHPVKPLAQIAGNRYASYPVGKALSDACMGTIASFLSKYQDIIIEHQKVVKGNQKRLESLRELAGKENLEYPSVTLPPQPHTKEGVDAYNEVIARVRMWVNLNLWQKLKLSRDDAKPLLRLKGFPSFPLVERQANEVDWWDMVCNVKKLINEKKEDGKVFWQNLAGYKRQEALRPYLSSEEDRKKGKKFARYQLGDLLLHLEKKHGEDWGKVYDEAWERIDKKVEGLSKHIKLEEERRSEDAQSKAALTDWLRAKASFVIEGLKEADKDEFCRCELKLQKWYGDLRGKPFAIEAENSILDISGFSKQYNCAFIWQKDGVKKLNLYLIINYFKGGKLRFKKIKPEAFEANRFYTVINKKSGEIVPMEVNFNFDDPNLIILPLAFGKRQGREFIWNDLLSLETGSLKLANGRVIEKTLYNRRTRQDEPALFVALTFERREVLDSSNIKPMNLIGVDRGENIPAVIALTDPEGCPLSRFKDSLGNPTHILRIGESYKEKQRTIQAKKEVEQRRAGGYSRKYASKAKNLADDMVRNTARDLLYYAVTQDAMLIFENLSRGFGRQGKRTFMAERQYTRMEDWLTAKLAYNGLPSKTYLSKTLAQYTSKTCSNCGFTITSADYDRVLEKLKKTATGWMTTINGKELKVEGQITYYNRYKRQNVVKDLSVELDRLSEESVNNDISSWTKGRSGEALSLLKKRFSHRPVQEKFVCLNCGFETHADEQAALNIARSWLFLRSQEYKKYQTNKTTGNTDKRAFVETWQSFYRKKLKEVWKPAV

SEQ ID NO: 42259 - protein, 978 aa, synthetic construct
  REGION 1..978: note = engineered CasX variant
QEIKRINKIRRRLVKDSNTKKAGKTGPMKTLLVPVMTPDLRERLENLRKKPENIPQPISNTSRANLNKLLTDYTEMKKAILHVYWEEFQKDPVGLMSRVAQPASKKIDQNKLKPEMDEKGNLTTAGFACSQCGQPLFVYKLEQVSEKGKAYTNYFGRCNVAEHEKLILLAQLKPEKDSDEAVTYSLGKFGQRALDFYSIHVTKESTHPVKPLAQIAGNRYASHPVGKALSDACMGTIASFLSKYQDIIIEHQKVVKGNQKRLESLRELAGKENLEYPSVTLPPQPHTKEGVDAYNEVIARVRMWVNLNLWQKLKLSRDDAKPLLRLKGFPSFPLVERQANEVDWWDMVCNVKKLINEKKEDGKVFWQNLAGYKRQEALRPYLSSEEDRKKGKKFARYQLGDLLLHLEKKHGEDWGKVYDEAWERIDKKVEGLSKHIKLEEERRSEDAQSKAALTDWLRAKASFVIEGLKEADKDEFCRCELKLQKWYGDLRGKPFAIEAENSILDISGFSKQYNCAFIWQKDGVKKLNLYLIINYFKGGKLRFKKIKPEAFEANRFYTVINKKSGEIVPMEVNFNFDDPNLIILPLAFGKRQGREFIWNDLLSLETGSLKLANGRVIEKTLYNRRTRQDEPALFVALTFERREVLDSSNIKPMNLIGVDRGENIPAVIALTDPEGCPLSRFKDSLGNPTHILRIGESYKEKQRTIQAKKEVEQRRAGGYSRKYASKAKNLADDMVRNTARDLLYYAVTQDAMLIFENLSRGFGRQGKRTFMAERQYTRMEDWLTAKLAYNGLPSKTYLSKTLAQYTSKTCSNCGFTITSADYDRVLEKLKKTATGWMTTINGKELKVEGQITYYNRYKRQNVVKDLSVELDRLSEESVNNDISSWTKGRSGEALSLLKKRFSHRPVQEKFVCLNCGFETHADEQAALNIARSWLFLRSQEYKKYQTNKTTGNTDKRAFVETWQSFYRKKLKEVWKPAV

SEQ ID NO: 42260 - protein, 978 aa, synthetic construct
  REGION 1..978: note = engineered CasX variant
QEIKRINKIRRRLVKDSNTKKAGKTGPMKTLLVPVMTPDLRERLENLRKKPENIPQPISNTSRANLNKLLTDYTEMKKAILHVYWEEFQKDPVGLMSRVAQPASKKIDQNKLKPEMDEKGNLTTAGFACSQCGQPLFVYKLEQVSEKGKAYTNYFGRCNVAEHEKLILLAQLKPEKDSDEAVTYSLGKFGQRALDFYSIHVTKESTHPVKPLAQIAGNRYASSPVGKALSDACMGTIASFLSKYQDIIIEHQKVVKGNQKRLESLRELAGKENLEYPSVTLPPQPHTKEGVDAYNEVIARVRMWVNLNLWQKLKLSRDDAKPLLRLKGFPSFPLVERQANEVDWWDMVCNVKKLINEKKEDGKVFWQNLAGYKRQEALRPYLSSEEDRKKGKKFARYQLGDLLLHLEKKHGEDWGKVYDEAWERIDKKVEGLSKHIKLEEERRSEDAQSKAALTDWLRAKASFVIEGLKEADKDEFCRCELKLQKWYGDLRGKPFAIEAENSILDISGFSKQYNCAFIWQKDGVKKLNLYLIINYFKGGKLRFKKIKPEAFEANRFYTVINKKSGEIVPMEVNFNFDDPNLIILPLAFGKRQGREFIWNDLLSLETGSLKLANGRVIEKTLYNRRTRQDEPALFVALTFERREVLDSSNIKPMNLIGVDRGENIPAVIALTDPEGCPLSRFKDSLGNPTHILRIGESYKEKQRTIQAKKEVEQRRAGGYSRKYASKAKNLADDMVRNTARDLLYYAVTQDAMLIFENLSRGFGRQGKRTFMAERQYTRMEDWLTAKLAYNGLPSKTYLSKTLAQYTSKTCSNCGFTITSADYDRVLEKLKKTATGWMTTINGKELKVEGQITYYNRYKRQNVVKDLSVELDRLSEESVNNDISSWTKGRSGEALSLLKKRFSHRPVQEKFVCLNCGFETHADEQAALNIARSWLFLRSQEYKKYQTNKTTGNTDKRAFVETWQSFYRKKLKEVWKPAV

SEQ ID NO: 42261 - protein, 978 aa, synthetic construct
  REGION 1..978: note = engineered CasX variant
QEIKRINKIRRRLVKDSNTKKAGKTGPMKTLLVPVMTPDLRERLENLRKKPENIPQPISNTSRANLNKLLTDYTEMKKAILHVYWEEFQKDPVGLMSRVAQPASKKIDQNKLKPEMDEKGNLTTAGFACSQCGQPLFVYKLEQVSEKGKAYTNYFGRCNVAEHEKLILLAQLKPEKDSDEAVTYSLGKFGQRALDFYSIHVTKESTHPVKPLAQIAGNRYASTPVGKALSDACMGTIASFLSKYQDIIIEHQKVVKGNQKRLESLRELAGKENLEYPSVTLPPQPHTKEGVDAYNEVIARVRMWVNLNLWQKLKLSRDDAKPLLRLKGFPSFPLVERQANEVDWWDMVCNVKKLINEKKEDGKVFWQNLAGYKRQEALRPYLSSEEDRKKGKKFARYQLGDLLLHLEKKHGEDWGKVYDEAWERIDKKVEGLSKHIKLEEERRSEDAQSKAALTDWLRAKASFVIEGLKEADKDEFCRCELKLQKWYGDLRGKPFAIEAENSILDISGFSKQYNCAFIWQKDGVKKLNLYLIINYFKGGKLRFKKIKPEAFEANRFYTVINKKSGEIVPMEVNFNFDDPNLIILPLAFGKRQGREFIWNDLLSLETGSLKLANGRVIEKTLYNRRTRQDEPALFVALTFERREVLDSSNIKPMNLIGVDRGENIPAVIALTDPEGCPLSRFKDSLGNPTHILRIGESYKEKQRTIQAKKEVEQRRAGGYSRKYASKAKNLADDMVRNTARDLLYYAVTQDAMLIFENLSRGFGRQGKRTFMAERQYTRMEDWLTAKLAYNGLPSKTYLSKTLAQYTSKTCSNCGFTITSADYDRVLEKLKKTATGWMTTINGKELKVEGQITYYNRYKRQNVVKDLSVELDRLSEESVNNDISSWTKGRSGEALSLLKKRFSHRPVQEKFVCLNCGFETHADEQAALNIARSWLFLRSQEYKKYQTNKTTGNTDKRAFVETWQSFYRKKLKEVWKPAV

SEQ ID NO: 42262 - protein, 978 aa, synthetic construct
  REGION 1..978: note = engineered CasX variant
QEIKRINKIRRRLVKDSNTKKAGKTGPMKTLLVPVMTPDLRERLENLRKKPENIPQPISNTSRANLNKLLTDYTEMKKAILHVYWEEFQKDPVGLMSRVAQPASKKIDQNKLKPEMDEKGNLTTAGFACSQCGQPLFVYKLEQVSEKGKAYTNYFGRCNVAEHEKLILLAQLKPEKDSDEAVTYSLGKFGQRALDFYSIHVTKESTHPVKPLAQIAGNRYASAPVGKALSDACMGTIASFLSKYQDIIIEHQKVVKGNQKRLESLRELAGKENLEYPSVTLPPQPHTKEGVDAYNEVIARVRMWVNLNLWQKLKLSRDDAKPLLRLKGFPSFPLVERQANEVDWWDMVCNVKKLINEKKEDGKVFWQNLAGYKRQEALRPYLSSEEDRKKGKKFARYQLGDLLLHLEKKHGEDWGKVYDEAWERIDKKVEGLSKHIKLEEERRSEDAQSKAALTDWLRAKASFVIEGLKEADKDEFCRCELKLQKWYGDLRGKPFAIEAENSILDISGFSKQYNCAFIWQKDGVKKLNLYLIINYFKGGKLRFKKIKPEAFEANRFYTVINKKSGEIVPMEVNFNFDDPNLIILPLAFGKRQGREFIWNDLLSLETGSLKLANGRVIEKTLYNRRTRQDEPALFVALTFERREVLDSSNIKPMNLIGVDRGENIPAVIALTDPEGCPLSRFKDSLGNPTHILRIGESYKEKQRTIQAKKEVEQRRAGGYSRKYASKAKNLADDMVRNTARDLLYYAVTQDAMLIFENLSRGFGRQGKRTFMAERQYTRMEDWLTAKLAYNGLPSKTYLSKTLAQYTSKTCSNCGFTITSADYDRVLEKLKKTATGWMTTINGKELKVEGQITYYNRYKRQNVVKDLSVELDRLSEESVNNDISSWTKGRSGEALSLLKKRFSHRPVQEKFVCLNCGFETHADEQAALNIARSWLFLRSQEYKKYQTNKTTGNTDKRAFVETWQSFYRKKLKEVWKPAV

SEQ ID NO: 42263 - protein, 978 aa, synthetic construct
  REGION 1..978: note = engineered CasX variant
QEIKRINKIRRRLVKDSNTKKAGKTGPMKTLLVPVMTPDLRERLENLRKKPENIPQPISNTSRANLNKLLTDYTEMKKAILHVYWEEFQKDPVGLMSRVAQPASKKIDQNKLKPEMDEKGNLTTAGFACSQCGQPLFVYKLEQVSEKGKAYTNYFGRCNVAEHEKLILLAQLKPEKDSDEAVTYSLGKFGQRALDFYSIHVTKESTHPVKPLAQIAGNRYASVPVGKALSDACMGTIASFLSKYQDIIIEHQKVVKGNQKRLESLRELAGKENLEYPSVTLPPQPHTKEGVDAYNEVIARVRMWVNLNLWQKLKLSRDDAKPLLRLKGFPSFPLVERQANEVDWWDMVCNVKKLINEKKEDGKVFWQNLAGYKRQEALRPYLSSEEDRKKGKKFARYQLGDLLLHLEKKHGEDWGKVYDEAWERIDKKVEGLSKHIKLEEERRSEDAQSKAALTDWLRAKASFVIEGLKEADKDEFCRCELKLQKWYGDLRGKPFAIEAENSILDISGFSKQYNCAFIWQKDGVKKLNLYLIINYFKGGKLRFKKIKPEAFEANRFYTVINKKSGEIVPMEVNFNFDDPNLIILPLAFGKRQGREFIWNDLLSLETGSLKLANGRVIEKTLYNRRTRQDEPALFVALTFERREVLDSSNIKPMNLIGVDRGENIPAVIALTDPEGCPLSRFKDSLGNPTHILRIGESYKEKQRTIQAKKEVEQRRAGGYSRKYASKAKNLADDMVRNTARDLLYYAVTQDAMLIFENLSRGFGRQGKRTFMAERQYTRMEDWLTAKLAYNGLPSKTYLSKTLAQYTSKTCSNCGFTITSADYDRVLEKLKKTATGWMTTINGKELKVEGQITYYNRYKRQNVVKDLSVELDRLSEESVNNDISSWTKGRSGEALSLLKKRFSHRPVQEKFVCLNCGFETHADEQAALNIARSWLFLRSQEYKKYQTNKTTGNTDKRAFVETWQSFYRKKLKEVWKPAV

SEQ ID NO: 42264 - protein, 978 aa, synthetic construct
  REGION 1..978: note = engineered CasX variant
QEIKRINKIRRRLVKDSNTKKAGKTGPMKTLLVPVMTPDLRERLENLRKKPENIPQPISNTSRANLNKLLTDYTEMKKAILHVYWEEFQKDPVGLMSRVAQPASKKIDQNKLKPEMDEKGNLTTAGFACSQCGQPLFVYKLEQVSEKGKAYTNYFGRCNVAEHEKLIKLAQLKPEKDSDEAVTYSLGKFGQRALDFYSIHVTKESTHPVKPLAQIAGNRYASGPVGKALSDACMGTIASFLSKYQDIIIEHQKVVKGNQKRLESLRELAGKENLEYPSVTLPPQPHTKEGVDAYNEVIARVRMWVNLNLWQKLKLSRDDAKPLLRLKGFPSFPLVERQANEVDWWDMVCNVKKLINEKKEDGKVFWQNLAGYKRQEALRPYLSSEEDRKKGKKFARYQLGDLLLHLEKKHGEDWGKVYDEAWERIDKKVEGLSKHIKLEEERRSEDAQSKAALTDWLRAKASFVIEGLKEADKDEFCRCELKLQKWYGDLRGKPFAIEAENSILDISGFSKQYNCAFIWQKDGVKKLNLYLIINYFKGGKLRFKKIKPEAFEANRFYTVINKKSGEIVPMEVNFNFDDPNLIILPLAFGKRQGREFIWNDLLSLETGSLKLANGRVIEKTLYNRRTRQDEPALFVALTFERREVLDSSNIKPMNLIGVDRGENIPAVIALTDPEGCPLSRFKDSLGNPTHILRIGESYKEKQRTIQAKKEVEQRRAGGYSRKYASKAKNLADDMVRNTARDLLYYAVTQDAMLIFENLSRGFGRQGKRTFMAERQYTRMEDWLTAKLAYNGLPSKTYLSKTLAQYTSKTCSNCGFTITSADYDRVLEKLKKTATGWMTTINGKELKVEGQITYYNRYKRQNVVKDLSVELDRLSEESVNNDISSWTKGRSGEALSLLKKRFSHRPVQEKFVCLNCGFETHADEQAALNIARSWLFLRSQEYKKYQTNKTTGNTDKRAFVETWQSFYRKKLKEVWKPAV

SEQ ID NO: 42265 - protein, 977 aa, synthetic construct
  REGION 1..977: note = engineered CasX variant
QEIKRINKIRRRLVKDSNTKKAGKTGPMKTLLVPVMTPDLRERLENLRKKPENIPQPISNTSRANLNKLLTDYTEMKKAILHVYWEEFQKDPVGLMSRVAQPASKKIDQNKLKPEMDEKGNLTTAGFACSQCGQPLFVYKLEQVSEKGKAYTNYFGRCNVAEHEKLILLAQLKPEKDSDEAVTYSLGKFGQRALDFYSIHVTKESTHPVKPLAQIAGNRYASPVGKALSDACMGTIASFLSKYQDIIIEHQKVVKGNQKRLESLRELAGKENLEYPSVTLPPQPHTKEGVDAYNEVIARVRMWVNLNLWQKLKLSRDDAKPLLRLKGFPSFPLVERQANEVDWWDMVCNVKKLINEKKEDGKVFWQNLAGYKRQEALRPYLSSEEDRKKGKKFARYQLGDLLLHLEKKHGEDWGKVYDEAWERIDKKVEGLSKHIKLEEERRSEDAQSKAALTDWLRAKASFVIEGLKEADKDEFCRCELKLQKWYGDLRGKPFAIEAENSILDISGFSKQYNCAFIWQKDGVKKLNLYLIINYFKGGKLRFKKIKPEAFEANRFYTVINKKSGEIVPMEVNFNFDDPNLIILPLAFGKRQGREFIWNDLLSLETGSLKLANGRVIEKTLYNRRTRQDEPALFVALTFERREVLDSSNIKPMNLIGVDRGENIPAVIALTDPEGCPLSRFKDSLGNPTHILRIGESYKEKQRTIQAKKEVEQRRAGGYSRKYASKAKNLADDMVRNTARDLLYYAVTQDAMLIFENLSRGFGRQGKRTFMAERQYTRMEDWLTAKLAYNGLPSKTYLSKTLAQYTSKTCSNCGFTITSADYDRVLEKLKKTATGWMTTINGKELKVEGQITYYNRYKRQNVVKDLSVELDRLSEESVNNDISSWTKGRSGEALSLLKKRFSHRPVQEKFVCLNCGFETHADEQAALNIARSWLFLRSQEYKKYQTNKTTGNTDKRAFVETWQSFYRKKLKEVWKPAV

SEQ ID NO: 42266 - protein, 978 aa, synthetic construct
  REGION 1..978: note = engineered CasX variant
QEIKRINKIRRRLVKDSNTKKAGKTGPMKTLLVPVMTPDLRERLENLRKKPENIPQPISNTSRANLNKLLTDYTEMKKAILHVYWEEFQKDPVGLMSRVAQPASKKIDQNKLKPEMDEKGNLTTAGFACSQCGQPLFVYKLEQVSEKGKAYTNYFGRCNVAEHEKLIQLAQLKPEKDSDEAVTYSLGKFGQRALDFYSIHVTKESTHPVKPLAQIAGNRYASYPVGKALSDACMGTIASFLSKYQDIIIEHQKVVKGNQKRLESLRELAGKENLEYPSVTLPPQPHTKEGVDAYNEVIARVRMWVNLNLWQKLKLSRDDAKPLLRLKGFPSFPLVERQANEVDWWDMVCNVKKLINEKKEDGKVFWQNLAGYKRQEALRPYLSSEEDRKKGKKFARYQLGDLLLHLEKKHGEDWGKVYDEAWERIDKKVEGLSKHIKLEEERRSEDAQSKAALTDWLRAKASFVIEGLKEADKDEFCRCELKLQKWYGDLRGKPFAIEAENSILDISGFSKQYNCAFIWQKDGVKKLNLYLIINYFKGGKLRFKKIKPEAFEANRFYTVINKKSGEIVPMEVNFNFDDPNLIILPLAFGKRQGREFIWNDLLSLETGSLKLANGRVIEKTLYNRRTRQDEPALFVALTFERREVLDSSNIKPMNLIGVDRGENIPAVIALTDPEGCPLSRFKDSLGNPTHILRIGESYKEKQRTIQAKKEVEQRRAGGYSRKYASKAKNLADDMVRNTARDLLYYAVTQDAMLIFENLSRGFGRQGKRTFMAERQYTRMEDWLTAKLAYEGLPSKTYLSKTLAQYTSKTCSNCGFTITSADYDRVLEKLKKTATGWMTTINGKELKVEGQITYYNRYKRQNVVKDLSVELDRLSEESVNNDISSWTKGRSGEALSLLKKRFSHRPVQEKFVCLNCGFETHADEQAALNIARSWLFLRSQEYKKYQTNKTTGNTDKRAFVETWQSFYRKKLKEVWKPAV

SEQ ID NO: 42267 - protein, 978 aa, synthetic construct
  REGION 1..978: note = engineered CasX variant
QEIKRINKIRRRLVKDSNTKKAGKTGPMKTLLVPVMTPDLRERLENLRKKPENIPQPISNTSRANLNKLLTDYTEMKKAILHVYWEEFQKDPVGLMSRVAQPASKKIDQNKLKPEMDEKGNLTTAGFACSQCGQPLFVYKLEQVSEKGKAYTNYFGRCNVAEHEKLIQLAQLKPEKDSDEAVTYSLGKFGQRALDFYSIHVTKESTHPVKPLAQIAGNRYASHPVGKALSDACMGTIASFLSKYQDIIIEHQKVVKGNQKRLESLRELAGKENLEYPSVTLPPQPHTKEGVDAYNEVIARVRMWVNLNLWQKLKLSRDDAKPLLRLKGFPSFPLVERQANEVDWWDMVCNVKKLINEKKEDGKVFWQNLAGYKRQEALRPYLSSEEDRKKGKKFARYQLGDLLLHLEKKHGEDWGKVYDEAWERIDKKVEGLSKHIKLEEERRSEDAQSKAALTDWLRAKASFVIEGLKEADKDEFCRCELKLQKWYGDLRGKPFAIEAENSILDISGFSKQYNCAFIWQKDGVKKLNLYLIINYFKGGKLRFKKIKPEAFEANRFYTVINKKSGEIVPMEVNFNFDDPNLIILPLAFGKRQGREFIWNDLLSLETGSLKLANGRVIEKTLYNRRTRQDEPALFVALTFERREVLDSSNIKPMNLIGVDRGENIPAVIALTDPEGCPLSRFKDSLGNPTHILRIGESYKEKQRTIQAKKEVEQRRAGGYSRKYASKAKNLADDMVRNTARDLLYYAVTQDAMLIFENLSRGFGRQGKRTFMAERQYTRMEDWLTAKLAYEGLPSKTYLSKTLAQYTSKTCSNCGFTITSADYDRVLEKLKKTATGWMTTINGKELKVEGQITYYNRYKRQNVVKDLSVELDRLSEESVNNDISSWTKGRSGEALSLLKKRFSHRPVQEKFVCLNCGFETHADEQAALNIARSWLFLRSQEYKKYQTNKTTGNTDKRAFVETWQSFYRKKLKEVWKPAV

SEQ ID NO: 42268 - protein, 978 aa, synthetic construct
  REGION 1..978: note = engineered CasX variant
QEIKRINKIRRRLVKDSNTKKAGKTGPMKTLLVPVMTPDLRERLENLRKKPENIPQPISNTSRANLNKLLTDYTEMKKAILHVYWEEFQKDPVGLMSRVAQPASKKIDQNKLKPEMDEKGNLTTAGFACSQCGQPLFVYKLEQVSEKGKAYTNYFGRCNVAEHEKLIQLAQLKPEKDSDEAVTYSLGKFGQRALDFYSIHVTKESTHPVKPLAQIAGNRYASSPVGKALSDACMGTIASFLSKYQDIIIEHQKVVKGNQKRLESLRELAGKENLEYPSVTLPPQPHTKEGVDAYNEVIARVRMWVNLNLWQKLKLSRDDAKPLLRLKGFPSFPLVERQANEVDWWDMVCNVKKLINEKKEDGKVFWQNLAGYKRQEALRPYLSSEEDRKKGKKFARYQLGDLLLHLEKKHGEDWGKVYDEAWERIDKKVEGLSKHIKLEEERRSEDAQSKAALTDWLRAKASFVIEGLKEADKDEFCRCELKLQKWYGDLRGKPFAIEAENSILDISGFSKQYNCAFIWQKDGVKKLNLYLIINYFKGGKLRFKKIKPEAFEANRFYTVINKKSGEIVPMEVNFNFDDPNLIILPLAFGKRQGREFIWNDLLSLETGSLKLANGRVIEKTLYNRRTRQDEPALFVALTFERREVLDSSNIKPMNLIGVDRGENIPAVIALTDPEGCPLSRFKDSLGNPTHILRIGESYKEKQRTIQAKKEVEQRRAGGYSRKYASKAKNLADDMVRNTARDLLYYAVTQDAMLIFENLSRGFGRQGKRTFMAERQYTRMEDWLTAKLAYEGLPSKTYLSKTLAQYTSKTCSNCGFTITSADYDRVLEKLKKTATGWMTTINGKELKVEGQITYYNRYKRQNVVKDLSVELDRLSEESVNNDISSWTKGRSGEALSLLKKRFSHRPVQEKFVCLNCGFETHADEQAALNIARSWLFLRSQEYKKYQTNKTTGNTDKRAFVETWQSFYRKKLKEVWKPAV

SEQ ID NO: 42269 - protein, 978 aa, synthetic construct
  REGION 1..978: note = engineered CasX variant
QEIKRINKIRRRLVKDSNTKKAGKTGPMKTLLVPVMTPDLRERLENLRKKPENIPQPISNTSRANLNKLLTDYTEMKKAILHVYWEEFQKDPVGLMSRVAQPASKKIDQNKLKPEMDEKGNLTTAGFACSQCGQPLFVYKLEQVSEKGKAYTNYFGRCNVAEHEKLIQLAQLKPEKDSDEAVTYSLGKFGQRALDFYSIHVTKESTHPVKPLAQIAGNRYASTPVGKALSDACMGTIASFLSKYQDIIIEHQKVVKGNQKRLESLRELAGKENLEYPSVTLPPQPHTKEGVDAYNEVIARVRMWVNLNLWQKLKLSRDDAKPLLRLKGFPSFPLVERQANEVDWWDMVCNVKKLINEKKEDGKVFWQNLAGYKRQEALRPYLSSEEDRKKGKKFARYQLGDLLLHLEKKHGEDWGKVYDEAWERIDKKVEGLSKHIKLEEERRSEDAQSKAALTDWLRAKASFVIEGLKEADKDEFCRCELKLQKWYGDLRGKPFAIEAENSILDISGFSKQYNCAFIWQKDGVKKLNLYLIINYFKGGKLRFKKIKPEAFEANRFYTVINKKSGEIVPMEVNFNFDDPNLIILPLAFGKRQGREFIWNDLLSLETGSLKLANGRVIEKTLYNRRTRQDEPALFVALTFERREVLDSSNIKPMNLIGVDRGENIPAVIALTDPEGCPLSRFKDSLGNPTHILRIGESYKEKQRTIQAKKEVEQRRAGGYSRKYASKAKNLADDMVRNTARDLLYYAVTQDAMLIFENLSRGFGRQGKRTFMAERQYTRMEDWLTAKLAYEGLPSKTYLSKTLAQYTSKTCSNCGFTITSADYDRVLEKLKKTATGWMTTINGKELKVEGQITYYNRYKRQNVVKDLSVELDRLSEESVNNDISSWTKGRSGEALSLLKKRFSHRPVQEKFVCLNCGFETHADEQAALNIARSWLFLRSQEYKKYQTNKTTGNTDKRAFVETWQSFYRKKLKEVWKPAV

SEQ ID NO: 42270 - protein, 978 aa, synthetic construct
  REGION 1..978: note = engineered CasX variant
QEIKRINKIRRRLVKDSNTKKAGKTGPMKTLLVPVMTPDLRERLENLRKKPENIPQPISNTSRANLNKLLTDYTEMKKAILHVYWEEFQKDPVGLMSRVAQPASKKIDQNKLKPEMDEKGNLTTAGFACSQCGQPLFVYKLEQVSEKGKAYTNYFGRCNVAEHEKLIQLAQLKPEKDSDEAVTYSLGKFGQRALDFYSIHVTKESTHPVKPLAQIAGNRYASAPVGKALSDACMGTIASFLSKYQDIIIEHQKVVKGNQKRLESLRELAGKENLEYPSVTLPPQPHTKEGVDAYNEVIARVRMWVNLNLWQKLKLSRDDAKPLLRLKGFPSFPLVERQANEVDWWDMVCNVKKLINEKKEDGKVFWQNLAGYKRQEALRPYLSSEEDRKKGKKFARYQLGDLLLHLEKKHGEDWGKVYDEAWERIDKKVEGLSKHIKLEEERRSEDAQSKAALTDWLRAKASFVIEGLKEADKDEFCRCELKLQKWYGDLRGKPFAIEAENSILDISGFSKQYNCAFIWQKDGVKKLNLYLIINYFKGGKLRFKKIKPEAFEANRFYTVINKKSGEIVPMEVNFNFDDPNLIILPLAFGKRQGREFIWNDLLSLETGSLKLANGRVIEKTLYNRRTRQDEPALFVALTFERREVLDSSNIKPMNLIGVDRGENIPAVIALTDPEGCPLSRFKDSLGNPTHILRIGESYKEKQRTIQAKKEVEQRRAGGYSRKYASKAKNLADDMVRNTARDLLYYAVTQDAMLIFENLSRGFGRQGKRTFMAERQYTRMEDWLTAKLAYEGLPSKTYLSKTLAQYTSKTCSNCGFTITSADYDRVLEKLKKTATGWMTTINGKELKVEGQITYYNRYKRQNVVKDLSVELDRLSEESVNNDISSWTKGRSGEALSLLKKRFSHRPVQEKFVCLNCGFETHADEQAALNIARSWLFLRSQEYKKYQTNKTTGNTDKRAFVETWQSFYRKKLKEVWKPAV

SEQ ID NO: 42271 - protein, 978 aa, synthetic construct
  REGION 1..978: note = engineered CasX variant
QEIKRINKIRRRLVKDSNTKKAGKTGPMKTLLVPVMTPDLRERLENLRKKPENIPQPISNTSRANLNKLLTDYTEMKKAILHVYWEEFQKDPVGLMSRVAQPASKKIDQNKLKPEMDEKGNLTTAGFACSQCGQPLFVYKLEQVSEKGKAYTNYFGRCNVAEHEKLIQLAQLKPEKDSDEAVTYSLGKFGQRALDFYSIHVTKESTHPVKPLAQIAGNRYASVPVGKALSDACMGTIASFLSKYQDIIIEHQKVVKGNQKRLESLRELAGKENLEYPSVTLPPQPHTKEGVDAYNEVIARVRMWVNLNLWQKLKLSRDDAKPLLRLKGFPSFPLVERQANEVDWWDMVCNVKKLINEKKEDGKVFWQNLAGYKRQEALRPYLSSEEDRKKGKKFARYQLGDLLLHLEKKHGEDWGKVYDEAWERIDKKVEGLSKHIKLEEERRSEDAQSKAALTDWLRAKASFVIEGLKEADKDEFCRCELKLQKWYGDLRGKPFAIEAENSILDISGFSKQYNCAFIWQKDGVKKLNLYLIINYFKGGKLRFKKIKPEAFEANRFYTVINKKSGEIVPMEVNFNFDDPNLIILPLAFGKRQGREFIWNDLLSLETGSLKLANGRVIEKTLYNRRTRQDEPALFVALTFERREVLDSSNIKPMNLIGVDRGENIPAVIALTDPEGCPLSRFKDSLGNPTHILRIGESYKEKQRTIQAKKEVEQRRAGGYSRKYASKAKNLADDMVRNTARDLLYYAVTQDAMLIFENLSRGFGRQGKRTFMAERQYTRMEDWLTAKLAYEGLPSKTYLSKTLAQYTSKTCSNCGFTITSADYDRVLEKLKKTATGWMTTINGKELKVEGQITYYNRYKRQNVVKDLSVELDRLSEESVNNDISSWTKGRSGEALSLLKKRFSHRPVQEKFVCLNCGFETHADEQAALNIARSWLFLRSQEYKKYQTNKTTGNTDKRAFVETWQSFYRKKLKEVWKPAV

SEQ ID NO: 42272 - protein, 979 aa, synthetic construct
  REGION 1..979: note = engineered CasX variant
QEIKRINKIRRRLVKDSNTKKAGKTGPMKTLLVPVMTPDLRERLENLRKKPENIPQPISNTSRANLNKLLTDYTEMKKAILHVYWEEFQKDPVGLMSRVAQPASKKIDQNKLKPEMDEKGNLTTAGFACSQCGQPLFVYKLEQVSEKGKAYTNYFGRCNVAEHEKLIQKLAQLKPEKDSDEAVTYSLGKFGQRALDFYSIHVTKESTHPVKPLAQIAGNRYASGPVGKALSDACMGTIASFLSKYQDIIIEHQKVVKGNQKRLESLRELAGKENLEYPSVTLPPQPHTKEGVDAYNEVIARVRMWVNLNLWQKLKLSRDDAKPLLRLKGFPSFPLVERQANEVDWWDMVCNVKKLINEKKEDGKVFWQNLAGYKRQEALRPYLSSEEDRKKGKKFARYQLGDLLLHLEKKHGEDWGKVYDEAWERIDKKVEGLSKHIKLEEERRSEDAQSKAALTDWLRAKASFVIEGLKEADKDEFCRCELKLQKWYGDLRGKPFAIEAENSILDISGFSKQYNCAFIWQKDGVKKLNLYLIINYFKGGKLRFKKIKPEAFEANRFYTVINKKSGEIVPMEVNFNFDDPNLIILPLAFGKRQGREFIWNDLLSLETGSLKLANGRVIEKTLYNRRTRQDEPALFVALTFERREVLDSSNIKPMNLIGVDRGENIPAVIALTDPEGCPLSRFKDSLGNPTHILRIGESYKEKQRTIQAKKEVEQRRAGGYSRKYASKAKNLADDMVRNTARDLLYYAVTQDAMLIFENLSRGFGRQGKRTFMAERQYTRMEDWLTAKLAYEGLPSKTYLSKTLAQYTSKTCSNCGFTITSADYDRVLEKLKKTATGWMTTINGKELKVEGQITYYNRYKRQNVVKDLSVELDRLSEESVNNDISSWTKGRSGEALSLLKKRFSHRPVQEKFVCLNCGFETHADEQAALNIARSWLFLRSQEYKKYQTNKTTGNTDKRAFVETWQSFYRKKLKEVWKPAV

SEQ ID NO: 42273 - protein, 977 aa, synthetic construct
  REGION 1..977: note = engineered CasX variant
QEIKRINKIRRRLVKDSNTKKAGKTGPMKTLLVPVMTPDLRERLENLRKKPENIPQPISNTSRANLNKLLTDYTEMKKAILHVYWEEFQKDPVGLMSRVAQPASKKIDQNKLKPEMDEKGNLTTAGFACSQCGQPLFVYKLEQVSEKGKAYTNYFGRCNVAEHEKLIQLAQLKPEKDSDEAVTYSLGKFGQRALDFYSIHVTKESTHPVKPLAQIAGNRYASPVGKALSDACMGTIASFLSKYQDIIIEHQKVVKGNQKRLESLRELAGKENLEYPSVTLPPQPHTKEGVDAYNEVIARVRMWVNLNLWQKLKLSRDDAKPLLRLKGFPSFPLVERQANEVDWWDMVCNVKKLINEKKEDGKVFWQNLAGYKRQEALRPYLSSEEDRKKGKKFARYQLGDLLLHLEKKHGEDWGKVYDEAWERIDKKVEGLSKHIKLEEERRSEDAQSKAALTDWLRAKASFVIEGLKEADKDEFCRCELKLQKWYGDLRGKPFAIEAENSILDISGFSKQYNCAFIWQKDGVKKLNLYLIINYFKGGKLRFKKIKPEAFEANRFYTVINKKSGEIVPMEVNFNFDDPNLIILPLAFGKRQGREFIWNDLLSLETGSLKLANGRVIEKTLYNRRTRQDEPALFVALTFERREVLDSSNIKPMNLIGVDRGENIPAVIALTDPEGCPLSRFKDSLGNPTHILRIGESYKEKQRTIQAKKEVEQRRAGGYSRKYASKAKNLADDMVRNTARDLLYYAVTQDAMLIFENLSRGFGRQGKRTFMAERQYTRMEDWLTAKLAYEGLPSKTYLSKTLAQYTSKTCSNCGFTITSADYDRVLEKLKKTATGWMTTINGKELKVEGQITYYNRYKRQNVVKDLSVELDRLSEESVNNDISSWTKGRSGEALSLLKKRFSHRPVQEKFVCLNCGFETHADEQAALNIARSWLFLRSQEYKKYQTNKTTGNTDKRAFVETWQSFYRKKLKEVWKPAV

SEQ ID NO: 42274 - protein, 978 aa, synthetic construct
  REGION 1..978: note = engineered CasX variant
QEIKRINKIRRRLVKDSNTKKAGKTGPMKTLLVPVMTPDLRERLENLRKKPENIPQPISNTSRANLNKLLTDYTEMKKAILHVYWEEFQKDPVGLMSRVAQPASKKIDQNKLKPEMDEKGNLTTAGFACSQCGQPLFVYKLEQVSEKGKAYTNYFGRCNVAEHEKLILLAQLKPEKDSDEAVTYSLGKFGQRALDFYSIHVTKESTHPVKPLAQIAGNRYASYPVGKALSDACMGTIASFLSKYQDIIIEHQKVVKGNQKRLESLRELAGKENLEYPSVTLPPQPHTKEGVDAYNEVIARVRMWVNLNLWQKLKLSRDDAKPLLRLKGFPSFPLVERQANEVDWWDMVCNVKKLINEKKEDGKVFWQNLAIYKRQEALRPYLSSEEDRKKGKKFARYQLGDLLLHLEKKHGEDWGKVYDEAWERIDKKVEGLSKHIKLEEERRSEDAQSKAALTDWLRAKASFVIEGLKEADKDEFCRCELKLQKWYGDLRGKPFAIEAENSILDISGFSKQYNCAFIWQKDGVKKLNLYLIINYFKGGKLRFKKIKPEAFEANRFYTVINKKSGEIVPMEVNFNFDDPNLIILPLAFGKRQGREFIWNDLLSLETGSLKLANGRVIEKTLYNRRTRQDEPALFVALTFERREVLDSSNIKPMNLIGVDRGENIPAVIALTDPEGCPLSRFKDSLGNPTHILRIGESYKEKQRTIQAKKEVEQRRAGGYSRKYASKAKNLADDMVRNTARDLLYYAVTQDAMLIFENLSRGFGRQGKRTFMAERQYTRMEDWLTAKLAYEGLPSKTYLSKTLAQYTSKTCSNCGFTITSADYDRVLEKLKKTATGWMTTINGKELKVEGQITYYNRYKRQNVVKDLSVELDRLSEESVNNDISSWTKGRSGEALSLLKKRFSHRPVQEKFVCLNCGFETHADEQAALNIARSWLFLRSQEYKKYQTNKTTGNTDKRAFVETWQSFYRKKLKEVWKPAV

SEQ ID NO: 42275 - protein, 978 aa, synthetic construct
  REGION 1..978: note = engineered CasX variant
QEIKRINKIRRRLVKDSNTKKAGKTGPMKTLLVPVMTPDLRERLENLRKKPENIPQPISNTSRANLNKLLTDYTEMKKAILHVYWEEFQKDPVGLMSRVAQPASKKIDQNKLKPEMDEKGNLTTAGFACSQCGQPLFVYKLEQVSEKGKAYTNYFGRCNVAEHEKLILLAQLKPEKDSDEAVTYSLGKFGQRALDFYSIHVTKESTHPVKPLAQIAGNRYASHPVGKALSDACMGTIASFLSKYQDIIIEHQKVVKGNQKRLESLRELAGKENLEYPSVTLPPQPHTKEGVDAYNEVIARVRMWVNLNLWQKLKLSRDDAKPLLRLKGFPSFPLVERQANEVDWWDMVCNVKKLINEKKEDGKVFWQNLAIYKRQEALRPYLSSEEDRKKGKKFARYQLGDLLLHLEKKHGEDWGKVYDEAWERIDKKVEGLSKHIKLEEERRSEDAQSKAALTDWLRAKASFVIEGLKEADKDEFCRCELKLQKWYGDLRGKPFAIEAENSILDISGFSKQYNCAFIWQKDGVKKLNLYLIINYFKGGKLRFKKIKPEAFEANRFYTVINKKSGEIVPMEVNFNFDDPNLIILPLAFGKRQGREFIWNDLLSLETGSLKLANGRVIEKTLYNRRTRQDEPALFVALTFERREVLDSSNIKPMNLIGVDRGENIPAVIALTDPEGCPLSRFKDSLGNPTHILRIGESYKEKQRTIQAKKEVEQRRAGGYSRKYASKAKNLADDMVRNTARDLLYYAVTQDAMLIFENLSRGFGRQGKRTFMAERQYTRMEDWLTAKLAYEGLPSKTYLSKTLAQYTSKTCSNCGFTITSADYDRVLEKLKKTATGWMTTINGKELKVEGQITYYNRYKRQNVVKDLSVELDRLSEESVNNDISSWTKGRSGEALSLLKKRFSHRPVQEKFVCLNCGFETHADEQAALNIARSWLFLRSQEYKKYQTNKTTGNTDKRAFVETWQSFYRKKLKEVWKPAV

SEQ ID NO: 42276 - protein, 978 aa, synthetic construct
  REGION 1..978: note = engineered CasX variant
QEIKRINKIRRRLVKDSNTKKAGKTGPMKTLLVPVMTPDLRERLENLRKKPENIPQPISNTSRANLNKLLTDYTEMKKAILHVYWEEFQKDPVGLMSRVAQPASKKIDQNKLKPEMDEKGNLTTAGFACSQCGQPLFVYKLEQVSEKGKAYTNYFGRCNVAEHEKLILLAQLKPEKDSDEAVTYSLGKFGQRALDFYSIHVTKESTHPVKPLAQIAGNRYASSPVGKALSDACMGTIASFLSKYQDIIIEHQKVVKGNQKRLESLRELAGKENLEYPSVTLPPQPHTKEGVDAYNEVIARVRMWVNLNLWQKLKLSRDDAKPLLRLKGFPSFPLVERQANEVDWWDMVCNVKKLINEKKEDGKVFWQNLAIYKRQEALRPYLSSEEDRKKGKKFARYQLGDLLLHLEKKHGEDWGKVYDEAWERIDKKVEGLSKHIKLEEERRSEDAQSKAALTDWLRAKASFVIEGLKEADKDEFCRCELKLQKWYGDLRGKPFAIEAENSILDISGFSKQYNCAFIWQKDGVKKLNLYLIINYFKGGKLRFKKIKPEAFEANRFYTVINKKSGEIVPMEVNFNFDDPNLIILPLAFGKRQGREFIWNDLLSLETGSLKLANGRVIEKTLYNRRTRQDEPALFVALTFERREVLDSSNIKPMNLIGVDRGENIPAVIALTDPEGCPLSRFKDSLGNPTHILRIGESYKEKQRTIQAKKEVEQRRAGGYSRKYASKAKNLADDMVRNTARDLLYYAVTQDAMLIFENLSRGFGRQGKRTFMAERQYTRMEDWLTAKLAYEGLPSKTYLSKTLAQYTSKTCSNCGFTITSADYDRVLEKLKKTATGWMTTINGKELKVEGQITYYNRYKRQNVVKDLSVELDRLSEESVNNDISSWTKGRSGEALSLLKKRFSHRPVQEKFVCLNCGFETHADEQAALNIARSWLFLRSQEYKKYQTNKTTGNTDKRAFVETWQSFYRKKLKEVWKPAV

SEQ ID NO: 42277 - protein, 978 aa, synthetic construct
  REGION 1..978: note = engineered CasX variant
QEIKRINKIRRRLVKDSNTKKAGKTGPMKTLLVPVMTPDLRERLENLRKKPENIPQPISNTSRANLNKLLTDYTEMKKAILHVYWEEFQKDPVGLMSRVAQPASKKIDQNKLKPEMDEKGNLTTAGFACSQCGQPLFVYKLEQVSEKGKAYTNYFGRCNVAEHEKLILLAQLKPEKDSDEAVTYSLGKFGQRALDFYSIHVTKESTHPVKPLAQIAGNRYASTPVGKALSDACMGTIASFLSKYQDIIIEHQKVVKGNQKRLESLRELAGKENLEYPSVTLPPQPHTKEGVDAYNEVIARVRMWVNLNLWQKLKLSRDDAKPLLRLKGFPSFPLVERQANEVDWWDMVCNVKKLINEKKEDGKVFWQNLAIYKRQEALRPYLSSEEDRKKGKKFARYQLGDLLLHLEKKHGEDWGKVYDEAWERIDKKVEGLSKHIKLEEERRSEDAQSKAALTDWLRAKASFVIEGLKEADKDEFCRCELKLQKWYGDLRGKPFAIEAENSILDISGFSKQYNCAFIWQKDGVKKLNLYLIINYFKGGKLRFKKIKPEAFEANRFYTVINKKSGEIVPMEVNFNFDDPNLIILPLAFGKRQGREFIWNDLLSLETGSLKLANGRVIEKTLYNRRTRQDEPALFVALTFERREVLDSSNIKPMNLIGVDRGENIPAVIALTDPEGCPLSRFKDSLGNPTHILRIGESYKEKQRTIQAKKEVEQRRAGGYSRKYASKAKNLADDMVRNTARDLLYYAVTQDAMLIFENLSRGFGRQGKRTFMAERQYTRMEDWLTAKLAYEGLPSKTYLSKTLAQYTSKTCSNCGFTITSADYDRVLEKLKKTATGWMTTINGKELKVEGQITYYNRYKRQNVVKDLSVELDRLSEESVNNDISSWTKGRSGEALSLLKKRFSHRPVQEKFVCLNCGFETHADEQAALNIARSWLFLRSQEYKKYQTNKTTGNTDKRAFVETWQSFYRKKLKEVWKPAV

SEQ ID NO: 42278 - protein, 978 aa, synthetic construct
  REGION 1..978: note = engineered CasX variant
QEIKRINKIRRRLVKDSNTKKAGKTGPMKTLLVPVMTPDLRERLENLRKKPENIPQPISNTSRANLNKLLTDYTEMKKAILHVYWEEFQKDPVGLMSRVAQPASKKIDQNKLKPEMDEKGNLTTAGFACSQCGQPLFVYKLEQVSEKGKAYTNYFGRCNVAEHEKLILLAQLKPEKDSDEAVTYSLGKFGQRALDFYSIHVTKESTHPVKPLAQIAGNRYASAPVGKALSDACMGTIASFLSKYQDIIIEHQKVVKGNQKRLESLRELAGKENLEYPSVTLPPQPHTKEGVDAYNEVIARVRMWVNLNLWQKLKLSRDDAKPLLRLKGFPSFPLVERQANEVDWWDMVCNVKKLINEKKEDGKVFWQNLAIYKRQEALRPYLSSEEDRKKGKKFARYQLGDLLLHLEKKHGEDWGKVYDEAWERIDKKVEGLSKHIKLEEERRSEDAQSKAALTDWLRAKASFVIEGLKEADKDEFCRCELKLQKWYGDLRGKPFAIEAENSILDISGFSKQYNCAFIWQKDGVKKLNLYLIINYFKGGKLRFKKIKPEAFEANRFYTVINKKSGEIVPMEVNFNFDDPNLIILPLAFGKRQGREFIWNDLLSLETGSLKLANGRVIEKTLYNRRTRQDEPALFVALTFERREVLDSSNIKPMNLIGVDRGENIPAVIALTDPEGCPLSRFKDSLGNPTHILRIGESYKEKQRTIQAKKEVEQRRAGGYSRKYASKAKNLADDMVRNTARDLLYYAVTQDAMLIFENLSRGFGRQGKRTFMAERQYTRMEDWLTAKLAYEGLPSKTYLSKTLAQYTSKTCSNCGFTITSADYDRVLEKLKKTATGWMTTINGKELKVEGQITYYNRYKRQNVVKDLSVELDRLSEESVNNDISSWTKGRSGEALSLLKKRFSHRPVQEKFVCLNCGFETHADEQAALNIARSWLFLRSQEYKKYQTNKTTGNTDKRAFVETWQSFYRKKLKEVWKPAV

SEQ ID NO: 42279 - protein, 978 aa, synthetic construct
  REGION 1..978: note = engineered CasX variant
QEIKRINKIRRRLVKDSNTKKAGKTGPMKTLLVPVMTPDLRERLENLRKKPENIPQPISNTSRANLNKLLTDYTEMKKAILHVYWEEFQKDPVGLMSRVAQPASKKIDQNKLKPEMDEKGNLTTAGFACSQCGQPLFVYKLEQVSEKGKAYTNYFGRCNVAEHEKLILLAQLKPEKDSDEAVTYSLGKFGQRALDFYSIHVTKESTHPVKPLAQIAGNRYASVPVGKALSDACMGTIASFLSKYQDIIIEHQKVVKGNQKRLESLRELAGKENLEYPSVTLPPQPHTKEGVDAYNEVIARVRMWVNLNLWQKLKLSRDDAKPLLRLKGFPSFPLVERQANEVDWWDMVCNVKKLINEKKEDGKVFWQNLAIYKRQEALRPYLSSEEDRKKGKKFARYQLGDLLLHLEKKHGEDWGKVYDEAWERIDKKVEGLSKHIKLEEERRSEDAQSKAALTDWLRAKASFVIEGLKEADKDEFCRCELKLQKWYGDLRGKPFAIEAENSILDISGFSKQYNCAFIWQKDGVKKLNLYLIINYFKGGKLRFKKIKPEAFEANRFYTVINKKSGEIVPMEVNFNFDDPNLIILPLAFGKRQGREFIWNDLLSLETGSLKLANGRVIEKTLYNRRTRQDEPALFVALTFERREVLDSSNIKPMNLIGVDRGENIPAVIALTDPEGCPLSRFKDSLGNPTHILRIGESYKEKQRTIQAKKEVEQRRAGGYSRKYASKAKNLADDMVRNTARDLLYYAVTQDAMLIFENLSRGFGRQGKRTFMAERQYTRMEDWLTAKLAYEGLPSKTYLSKTLAQYTSKTCSNCGFTITSADYDRVLEKLKKTATGWMTTINGKELKVEGQITYYNRYKRQNVVKDLSVELDRLSEESVNNDISSWTKGRSGEALSLLKKRFSHRPVQEKFVCLNCGFETHADEQAALNIARSWLFLRSQEYKKYQTNKTTGNTDKRAFVETWQSFYRKKLKEVWKPAV

SEQ ID NO: 42280 - protein, 978 aa, synthetic construct
  REGION 1..978: note = engineered CasX variant
QEIKRINKIRRRLVKDSNTKKAGKTGPMKTLLVPVMTPDLRERLENLRKKPENIPQPISNTSRANLNKLLTDYTEMKKAILHVYWEEFQKDPVGLMSRVAQPASKKIDQNKLKPEMDEKGNLTTAGFACSQCGQPLFVYKLEQVSEKGKAYTNYFGRCNVAEHEKLIKLAQLKPEKDSDEAVTYSLGKFGQRALDFYSIHVTKESTHPVKPLAQIAGNRYASGPVGKALSDACMGTIASFLSKYQDIIIEHQKVVKGNQKRLESLRELAGKENLEYPSVTLPPQPHTKEGVDAYNEVIARVRMWVNLNLWQKLKLSRDDAKPLLRLKGFPSFPLVERQANEVDWWDMVCNVKKLINEKKEDGKVFWQNLAIYKRQEALRPYLSSEEDRKKGKKFARYQLGDLLLHLEKKHGEDWGKVYDEAWERIDKKVEGLSKHIKLEEERRSEDAQSKAALTDWLRAKASFVIEGLKEADKDEFCRCELKLQKWYGDLRGKPFAIEAENSILDISGFSKQYNCAFIWQKDGVKKLNLYLIINYFKGGKLRFKKIKPEAFEANRFYTVINKKSGEIVPMEVNFNFDDPNLIILPLAFGKRQGREFIWNDLLSLETGSLKLANGRVIEKTLYNRRTRQDEPALFVALTFERREVLDSSNIKPMNLIGVDRGENIPAVIALTDPEGCPLSRFKDSLGNPTHILRIGESYKEKQRTIQAKKEVEQRRAGGYSRKYASKAKNLADDMVRNTARDLLYYAVTQDAMLIFENLSRGFGRQGKRTFMAERQYTRMEDWLTAKLAYEGLPSKTYLSKTLAQYTSKTCSNCGFTITSADYDRVLEKLKKTATGWMTTINGKELKVEGQITYYNRYKRQNVVKDLSVELDRLSEESVNNDISSWTKGRSGEALSLLKKRFSHRPVQEKFVCLNCGFETHADEQAALNIARSWLFLRSQEYKKYQTNKTTGNTDKRAFVETWQSFYRKKLKEVWKPAV

SEQ ID NO: 42281 - protein, 977 aa, synthetic construct
  REGION 1..977: note = engineered CasX variant
QEIKRINKIRRRLVKDSNTKKAGKTGPMKTLLVPVMTPDLRERLENLRKKPENIPQPISNTSRANLNKLLTDYTEMKKAILHVYWEEFQKDPVGLMSRVAQPASKKIDQNKLKPEMDEKGNLTTAGFACSQCGQPLFVYKLEQVSEKGKAYTNYFGRCNVAEHEKLILLAQLKPEKDSDEAVTYSLGKFGQRALDFYSIHVTKESTHPVKPLAQIAGNRYASPVGKALSDACMGTIASFLSKYQDIIIEHQKVVKGNQKRLESLRELAGKENLEYPSVTLPPQPHTKEGVDAYNEVIARVRMWVNLNLWQKLKLSRDDAKPLLRLKGFPSFPLVERQANEVDWWDMVCNVKKLINEKKEDGKVFWQNLAIYKRQEALRPYLSSEEDRKKGKKFARYQLGDLLLHLEKKHGEDWGKVYDEAWERIDKKVEGLSKHIKLEEERRSEDAQSKAALTDWLRAKASFVIEGLKEADKDEFCRCELKLQKWYGDLRGKPFAIEAENSILDISGFSKQYNCAFIWQKDGVKKLNLYLIINYFKGGKLRFKKIKPEAFEANRFYTVINKKSGEIVPMEVNFNFDDPNLIILPLAFGKRQGREFIWNDLLSLETGSLKLANGRVIEKTLYNRRTRQDEPALFVALTFERREVLDSSNIKPMNLIGVDRGENIPAVIALTDPEGCPLSRFKDSLGNPTHILRIGESYKEKQRTIQAKKEVEQRRAGGYSRKYASKAKNLADDMVRNTARDLLYYAVTQDAMLIFENLSRGFGRQGKRTFMAERQYTRMEDWLTAKLAYEGLPSKTYLSKTLAQYTSKTCSNCGFTITSADYDRVLEKLKKTATGWMTTINGKELKVEGQITYYNRYKRQNVVKDLSVELDRLSEESVNNDISSWTKGRSGEALSLLKKRFSHRPVQEKFVCLNCGFETHADEQAALNIARSWLFLRSQEYKKYQTNKTTGNTDKRAFVETWQSFYRKKLKEVWKPAV

SEQ ID NO: 42282 - protein, 978 aa, synthetic construct
  REGION 1..978: note = engineered CasX variant
QEIKRINKIRRRLVKDSNTKKAGKTGPMKTLLVPVMTPDLRERLENLRKKPENIPQPISNTSRANLNKLLTDYTEMKKAILHVYWEEFQKDPVGLMSRVAQPASKKIDQNKLKPEMDEKGNLTTAGFACSQCGQPLFVYKLEQVSEKGKAYTNYFGRCNVAEHEKLILLAQLKPEKDSDEAVTYSLGKFGQRALDFYSIHVTKESTHPVKPLAQIAGNRYASYPVGKALSDACMGTIASFLSKYQDIIIEHQKVVKGNQKRLESLRELAGKENLEYPSVTLPPQPHTKEGVDAYNEVIARVRMWVNLNLWQKLKLSRDDAKPLLRLKGFPSFPLVERQANEVDWWDMVCNVKKLINEKKEDGKVFWQNLAGYKRQEALRPYLSSEEDREKGKKFARYQLGDLLLHLEKKHGEDWGKVYDEAWERIDKKVEGLSKHIKLEEERRSEDAQSKAALTDWLRAKASFVIEGLKEADKDEFCRCELKLQKWYGDLRGKPFAIEAENSILDISGFSKQYNCAFIWQKDGVKKLNLYLIINYFKGGKLRFKKIKPEAFEANRFYTVINKKSGEIVPMEVNFNFDDPNLIILPLAFGKRQGREFIWNDLLSLETGSLKLANGRVIEKTLYNRRTRQDEPALFVALTFERREVLDSSNIKPMNLIGVDRGENIPAVIALTDPEGCPLSRFKDSLGNPTHILRIGESYKEKQRTIQAKKEVEQRRAGGYSRKYASKAKNLADDMVRNTARDLLYYAVTQDAMLIFENLSRGFGRQGKRTFMAERQYTRMEDWLTAKLAYEGLPSKTYLSKTLAQYTSKTCSNCGFTITSADYDRVLEKLKKTATGWMTTINGKELKVEGQITYYNRYKRQNVVKDLSVELDRLSEESVNNDISSWTKGRSGEALSLLKKRFSHRPVQEKFVCLNCGFETHADEQAALNIARSWLFLRSQEYKKYQTNKTTGNTDKRAFVETWQSFYRKKLKEVWKPAV

SEQ ID NO: 42283 - protein, 978 aa, synthetic construct
  REGION 1..978: note = engineered CasX variant
QEIKRINKIRRRLVKDSNTKKAGKTGPMKTLLVPVMTPDLRERLENLRKKPENIPQPISNTSRANLNKLLTDYTEMKKAILHVYWEEFQKDPVGLMSRVAQPASKKIDQNKLKPEMDEKGNLTTAGFACSQCGQPLFVYKLEQVSEKGKAYTNYFGRCNVAEHEKLILLAQLKPEKDSDEAVTYSLGKFGQRALDFYSIHVTKESTHPVKPLAQIAGNRYASHPVGKALSDACMGTIASFLSKYQDIIIEHQKVVKGNQKRLESLRELAGKENLEYPSVTLPPQPHTKEGVDAYNEVIARVRMWVNLNLWQKLKLSRDDAKPLLRLKGFPSFPLVERQANEVDWWDMVCNVKKLINEKKEDGKVFWQNLAGYKRQEALRPYLSSEEDREKGKKFARYQLGDLLLHLEKKHGEDWGKVYDEAWERIDKKVEGLSKHIKLEEERRSEDAQSKAALTDWLRAKASFVIEGLKEADKDEFCRCELKLQKWYGDLRGKPFAIEAENSILDISGFSKQYNCAFIWQKDGVKKLNLYLIINYFKGGKLRFKKIKPEAFEANRFYTVINKKSGEIVPMEVNFNFDDPNLIILPLAFGKRQGREFIWNDLLSLETGSLKLANGRVIEKTLYNRRTRQDEPALFVALTFERREVLDSSNIKPMNLIGVDRGENIPAVIALTDPEGCPLSRFKDSLGNPTHILRIGESYKEKQRTIQAKKEVEQRRAGGYSRKYASKAKNLADDMVRNTARDLLYYAVTQDAMLIFENLSRGFGRQGKRTFMAERQYTRMEDWLTAKLAYEGLPSKTYLSKTLAQYTSKTCSNCGFTITSADYDRVLEKLKKTATGWMTTINGKELKVEGQITYYNRYKRQNVVKDLSVELDRLSEESVNNDISSWTKGRSGEALSLLKKRFSHRPVQEKFVCLNCGFETHADEQAALNIARSWLFLRSQEYKKYQTNKTTGNTDKRAFVETWQSFYRKKLKEVWKPAV

SEQ ID NO: 42284 - protein, 978 aa, synthetic construct
  REGION 1..978: note = engineered CasX variant
QEIKRINKIRRRLVKDSNTKKAGKTGPMKTLLVPVMTPDLRERLENLRKKPENIPQPISNTSRANLNKLLTDYTEMKKAILHVYWEEFQKDPVGLMSRVAQPASKKIDQNKLKPEMDEKGNLTTAGFACSQCGQPLFVYKLEQVSEKGKAYTNYFGRCNVAEHEKLILLAQLKPEKDSDEAVTYSLGKFGQRALDFYSIHVTKESTHPVKPLAQIAGNRYASSPVGKALSDACMGTIASFLSKYQDIIIEHQKVVKGNQKRLESLRELAGKENLEYPSVTLPPQPHTKEGVDAYNEVIARVRMWVNLNLWQKLKLSRDDAKPLLRLKGFPSFPLVERQANEVDWWDMVCNVKKLINEKKEDGKVFWQNLAGYKRQEALRPYLSSEEDREKGKKFARYQLGDLLLHLEKKHGEDWGKVYDEAWERIDKKVEGLSKHIKLEEERRSEDAQSKAALTDWLRAKASFVIEGLKEADKDEFCRCELKLQKWYGDLRGKPFAIEAENSILDISGFSKQYNCAFIWQKDGVKKLNLYLIINYFKGGKLRFKKIKPEAFEANRFYTVINKKSGEIVPMEVNFNFDDPNLIILPLAFGKRQGREFIWNDLLSLETGSLKLANGRVIEKTLYNRRTRQDEPALFVALTFERREVLDSSNIKPMNLIGVDRGENIPAVIALTDPEGCPLSRFKDSLGNPTHILRIGESYKEKQRTIQAKKEVEQRRAGGYSRKYASKAKNLADDMVRNTARDLLYYAVTQDAMLIFENLSRGFGRQGKRTFMAERQYTRMEDWLTAKLAYEGLPSKTYLSKTLAQYTSKTCSNCGFTITSADYDRVLEKLKKTATGWMTTINGKELKVEGQITYYNRYKRQNVVKDLSVELDRLSEESVNNDISSWTKGRSGEALSLLKKRFSHRPVQEKFVCLNCGFETHADEQAALNIARSWLFLRSQEYKKYQTNKTTGNTDKRAFVETWQSFYRKKLKEVWKPAV

SEQ ID NO: 42285 - protein, 978 aa, synthetic construct
  REGION 1..978: note = engineered CasX variant
QEIKRINKIRRRLVKDSNTKKAGKTGPMKTLLVPVMTPDLRERLENLRKKPENIPQPISNTSRANLNKLLTDYTEMKKAILHVYWEEFQKDPVGLMSRVAQPASKKIDQNKLKPEMDEKGNLTTAGFACSQCGQPLFVYKLEQVSEKGKAYTNYFGRCNVAEHEKLILLAQLKPEKDSDEAVTYSLGKFGQRALDFYSIHVTKESTHPVKPLAQIAGNRYASTPVGKALSDACMGTIASFLSKYQDIIIEHQKVVKGNQKRLESLRELAGKENLEYPSVTLPPQPHTKEGVDAYNEVIARVRMWVNLNLWQKLKLSRDDAKPLLRLKGFPSFPLVERQANEVDWWDMVCNVKKLINEKKEDGKVFWQNLAGYKRQEALRPYLSSEEDREKGKKFARYQLGDLLLHLEKKHGEDWGKVYDEAWERIDKKVEGLSKHIKLEEERRSEDAQSKAALTDWLRAKASFVIEGLKEADKDEFCRCELKLQKWYGDLRGKPFAIEAENSILDISGFSKQYNCAFIWQKDGVKKLNLYLIINYFKGGKLRFKKIKPEAFEANRFYTVINKKSGEIVPMEVNFNFDDPNLIILPLAFGKRQGREFIWNDLLSLETGSLKLANGRVIEKTLYNRRTRQDEPALFVALTFERREVLDSSNIKPMNLIGVDRGENIPAVIALTDPEGCPLSRFKDSLGNPTHILRIGESYKEKQRTIQAKKEVEQRRAGGYSRKYASKAKNLADDMVRNTARDLLYYAVTQDAMLIFENLSRGFGRQGKRTFMAERQYTRMEDWLTAKLAYEGLPSKTYLSKTLAQYTSKTCSNCGFTITSADYDRVLEKLKKTATGWMTTINGKELKVEGQITYYNRYKRQNVVKDLSVELDRLSEESVNNDISSWTKGRSGEALSLLKKRFSHRPVQEKFVCLNCGFETHADEQAALNIARSWLFLRSQEYKKYQTNKTTGNTDKRAFVETWQSFYRKKLKEVWKPAV

SEQ ID NO: 42286 - protein, 978 aa, synthetic construct
  REGION 1..978: note = engineered CasX variant
QEIKRINKIRRRLVKDSNTKKAGKTGPMKTLLVPVMTPDLRERLENLRKKPENIPQPISNTSRANLNKLLTDYTEMKKAILHVYWEEFQKDPVGLMSRVAQPASKKIDQNKLKPEMDEKGNLTTAGFACSQCGQPLFVYKLEQVSEKGKAYTNYFGRCNVAEHEKLILLAQLKPEKDSDEAVTYSLGKFGQRALDFYSIHVTKESTHPVKPLAQIAGNRYASAPVGKALSDACMGTIASFLSKYQDIIIEHQKVVKGNQKRLESLRELAGKENLEYPSVTLPPQPHTKEGVDAYNEVIARVRMWVNLNLWQKLKLSRDDAKPLLRLKGFPSFPLVERQANEVDWWDMVCNVKKLINEKKEDGKVFWQNLAGYKRQEALRPYLSSEEDREKGKKFARYQLGDLLLHLEKKHGEDWGKVYDEAWERIDKKVEGLSKHIKLEEERRSEDAQSKAALTDWLRAKASFVIEGLKEADKDEFCRCELKLQKWYGDLRGKPFAIEAENSILDISGFSKQYNCAFIWQKDGVKKLNLYLIINYFKGGKLRFKKIKPEAFEANRFYTVINKKSGEIVPMEVNFNFDDPNLIILPLAFGKRQGREFIWNDLLSLETGSLKLANGRVIEKTLYNRRTRQDEPALFVALTFERREVLDSSNIKPMNLIGVDRGENIPAVIALTDPEGCPLSRFKDSLGNPTHILRIGESYKEKQRTIQAKKEVEQRRAGGYSRKYASKAKNLADDMVRNTARDLLYYAVTQDAMLIFENLSRGFGRQGKRTFMAERQYTRMEDWLTAKLAYEGLPSKTYLSKTLAQYTSKTCSNCGFTITSADYDRVLEKLKKTATGWMTTINGKELKVEGQITYYNRYKRQNVVKDLSVELDRLSEESVNNDISSWTKGRSGEALSLLKKRFSHRPVQEKFVCLNCGFETHADEQAALNIARSWLFLRSQEYKKYQTNKTTGNTDKRAFVETWQSFYRKKLKEVWKPAV

SEQ ID NO: 42287 - protein, 978 aa, synthetic construct
  REGION 1..978: note = engineered CasX variant
QEIKRINKIRRRLVKDSNTKKAGKTGPMKTLLVPVMTPDLRERLENLRKKPENIPQPISNTSRANLNKLLTDYTEMKKAILHVYWEEFQKDPVGLMSRVAQPASKKIDQNKLKPEMDEKGNLTTAGFACSQCGQPLFVYKLEQVSEKGKAYTNYFGRCNVAEHEKLILLAQLKPEKDSDEAVTYSLGKFGQRALDFYSIHVTKESTHPVKPLAQIAGNRYASVPVGKALSDACMGTIASFLSKYQDIIIEHQKVVKGNQKRLESLRELAGKENLEYPSVTLPPQPHTKEGVDAYNEVIARVRMWVNLNLWQKLKLSRDDAKPLLRLKGFPSFPLVERQANEVDWWDMVCNVKKLINEKKEDGKVFWQNLAGYKRQEALRPYLSSEEDREKGKKFARYQLGDLLLHLEKKHGEDWGKVYDEAWERIDKKVEGLSKHIKLEEERRSEDAQSKAALTDWLRAKASFVIEGLKEADKDEFCRCELKLQKWYGDLRGKPFAIEAENSILDISGFSKQYNCAFIWQKDGVKKLNLYLIINYFKGGKLRFKKIKPEAFEANRFYTVINKKSGEIVPMEVNFNFDDPNLIILPLAFGKRQGREFIWNDLLSLETGSLKLANGRVIEKTLYNRRTRQDEPALFVALTFERREVLDSSNIKPMNLIGVDRGENIPAVIALTDPEGCPLSRFKDSLGNPTHILRIGESYKEKQRTIQAKKEVEQRRAGGYSRKYASKAKNLADDMVRNTARDLLYYAVTQDAMLIFENLSRGFGRQGKRTFMAERQYTRMEDWLTAKLAYEGLPSKTYLSKTLAQYTSKTCSNCGFTITSADYDRVLEKLKKTATGWMTTINGKELKVEGQITYYNRYKRQNVVKDLSVELDRLSEESVNNDISSWTKGRSGEALSLLKKRFSHRPVQEKFVCLNCGFETHADEQAALNIARSWLFLRSQEYKKYQTNKTTGNTDKRAFVETWQSFYRKKLKEVWKPAV

SEQ ID NO: 42288 - protein, 978 aa, synthetic construct
  REGION 1..978: note = engineered CasX variant
QEIKRINKIRRRLVKDSNTKKAGKTGPMKTLLVPVMTPDLRERLENLRKKPENIPQPISNTSRANLNKLLTDYTEMKKAILHVYWEEFQKDPVGLMSRVAQPASKKIDQNKLKPEMDEKGNLTTAGFACSQCGQPLFVYKLEQVSEKGKAYTNYFGRCNVAEHEKLIKLAQLKPEKDSDEAVTYSLGKFGQRALDFYSIHVTKESTHPVKPLAQIAGNRYASGPVGKALSDACMGTIASFLSKYQDIIIEHQKVVKGNQKRLESLRELAGKENLEYPSVTLPPQPHTKEGVDAYNEVIARVRMWVNLNLWQKLKLSRDDAKPLLRLKGFPSFPLVERQANEVDWWDMVCNVKKLINEKKEDGKVFWQNLAGYKRQEALRPYLSSEEDREKGKKFARYQLGDLLLHLEKKHGEDWGKVYDEAWERIDKKVEGLSKHIKLEEERRSEDAQSKAALTDWLRAKASFVIEGLKEADKDEFCRCELKLQKWYGDLRGKPFAIEAENSILDISGFSKQYNCAFIWQKDGVKKLNLYLIINYFKGGKLRFKKIKPEAFEANRFYTVINKKSGEIVPMEVNFNFDDPNLIILPLAFGKRQGREFIWNDLLSLETGSLKLANGRVIEKTLYNRRTRQDEPALFVALTFERREVLDSSNIKPMNLIGVDRGENIPAVIALTDPEGCPLSRFKDSLGNPTHILRIGESYKEKQRTIQAKKEVEQRRAGGYSRKYASKAKNLADDMVRNTARDLLYYAVTQDAMLIFENLSRGFGRQGKRTFMAERQYTRMEDWLTAKLAYEGLPSKTYLSKTLAQYTSKTCSNCGFTITSADYDRVLEKLKKTATGWMTTINGKELKVEGQITYYNRYKRQNVVKDLSVELDRLSEESVNNDISSWTKGRSGEALSLLKKRFSHRPVQEKFVCLNCGFETHADEQAALNIARSWLFLRSQEYKKYQTNKTTGNTDKRAFVETWQSFYRKKLKEVWKPAV

SEQ ID NO: 42289 - protein, 977 aa, synthetic construct
  REGION 1..977: note = engineered CasX variant
QEIKRINKIRRRLVKDSNTKKAGKTGPMKTLLVPVMTPDLRERLENLRKKPENIPQPISNTSRANLNKLLTDYTEMKKAILHVYWEEFQKDPVGLMSRVAQPASKKIDQNKLKPEMDEKGNLTTAGFACSQCGQPLFVYKLEQVSEKGKAYTNYFGRCNVAEHEKLILLAQLKPEKDSDEAVTYSLGKFGQRALDFYSIHVTKESTHPVKPLAQIAGNRYASPVGKALSDACMGTIASFLSKYQDIIIEHQKVVKGNQKRLESLRELAGKENLEYPSVTLPPQPHTKEGVDAYNEVIARVRMWVNLNLWQKLKLSRDDAKPLLRLKGFPSFPLVERQANEVDWWDMVCNVKKLINEKKEDGKVFWQNLAGYKRQEALRPYLSSEEDREKGKKFARYQLGDLLLHLEKKHGEDWGKVYDEAWERIDKKVEGLSKHIKLEEERRSEDAQSKAALTDWLRAKASFVIEGLKEADKDEFCRCELKLQKWYGDLRGKPFAIEAENSILDISGFSKQYNCAFIWQKDGVKKLNLYLIINYFKGGKLRFKKIKPEAFEANRFYTVINKKSGEIVPMEVNFNFDDPNLIILPLAFGKRQGREFIWNDLLSLETGSLKLANGRVIEKTLYNRRTRQDEPALFVALTFERREVLDSSNIKPMNLIGVDRGENIPAVIALTDPEGCPLSRFKDSLGNPTHILRIGESYKEKQRTIQAKKEVEQRRAGGYSRKYASKAKNLADDMVRNTARDLLYYAVTQDAMLIFENLSRGFGRQGKRTFMAERQYTRMEDWLTAKLAYEGLPSKTYLSKTLAQYTSKTCSNCGFTITSADYDRVLEKLKKTATGWMTTINGKELKVEGQITYYNRYKRQNVVKDLSVELDRLSEESVNNDISSWTKGRSGEALSLLKKRFSHRPVQEKFVCLNCGFETHADEQAALNIARSWLFLRSQEYKKYQTNKTTGNTDKRAFVETWQSFYRKKLKEVWKPAV

SEQ ID NO: 42290 - protein, 978 aa, synthetic construct
  REGION 1..978: note = engineered CasX variant
QEIKRINKIRRRLVKDSNTKKAGKTGPMKTLLVPVMTPDLRERLENLRKKPENIPQPISNTSRANLNKLLTDYTEMKKAILHVYWEEFQKDPVGLMSRVAQPASKKIDQNKLKPEMDEKGNLTTAGFACSQCGQPLFVYKLEQVSEKGKAYTNYFGRCNVAEHEKLILLAQLKPEKDSDEAVTYSLGKFGQRALDFYSIHVTKESTHPVKPLAQIAGNRYASYPVGKALSDACMGTIASFLSKYQDIIIEHQKVVKGNQKRLESLRELAGKENLEYPSVTLPPQPHTKEGVDAYNEVIARVRMWVNLNLWQKLKLSRDDAKPLLRLKGFPSFPLVERQANEVDWWDMVCNVKKLINEKKEDGKVFWQNLAGYKRQEALRPYLSSEEDRKKGKKFARYQLGDLLLHLEKKHGEDWGKVYDEAWERIDKKVEGLSKHIKLEEERRSEDAQSKAALTDWLRAKASFVIEGLKEADKDEFCRCELKLQKWYGDLRGKPFAIEAENSILDISGFSKQYNCAFIWQKDGVKKLNLYLIINYFKGGKLRFKKIKPEAFEANRFYTVINKKSGEIVIMEVNFNFDDPNLIILPLAFGKRQGREFIWNDLLSLETGSLKLANGRVIEKTLYNRRTRQDEPALFVALTFERREVLDSSNIKPMNLIGVDRGENIPAVIALTDPEGCPLSRFKDSLGNPTHILRIGESYKEKQRTIQAKKEVEQRRAGGYSRKYASKAKNLADDMVRNTARDLLYYAVTQDAMLIFENLSRGFGRQGKRTFMAERQYTRMEDWLTAKLAYEGLPSKTYLSKTLAQYTSKTCSNCGFTITSADYDRVLEKLKKTATGWMTTINGKELKVEGQITYYNRYKRQNVVKDLSVELDRLSEESVNNDISSWTKGRSGEALSLLKKRFSHRPVQEKFVCLNCGFETHADEQAALNIARSWLFLRSQEYKKYQTNKTTGNTDKRAFVETWQSFYRKKLKEVWKPAV

SEQ ID NO: 42291 - protein, 978 aa, synthetic construct
  REGION 1..978: note = engineered CasX variant
QEIKRINKIRRRLVKDSNTKKAGKTGPMKTLLVPVMTPDLRERLENLRKKPENIPQPISNTSRANLNKLLTDYTEMKKAILHVYWEEFQKDPVGLMSRVAQPASKKIDQNKLKPEMDEKGNLTTAGFACSQCGQPLFVYKLEQVSEKGKAYTNYFGRCNVAEHEKLILLAQLKPEKDSDEAVTYSLGKFGQRALDFYSIHVTKESTHPVKPLAQIAGNRYASHPVGKALSDACMGTIASFLSKYQDIIIEHQKVVKGNQKRLESLRELAGKENLEYPSVTLPPQPHTKEGVDAYNEVIARVRMWVNLNLWQKLKLSRDDAKPLLRLKGFPSFPLVERQANEVDWWDMVCNVKKLINEKKEDGKVFWQNLAGYKRQEALRPYLSSEEDRKKGKKFARYQLGDLLLHLEKKHGEDWGKVYDEAWERIDKKVEGLSKHIKLEEERRSEDAQSKAALTDWLRAKASFVIEGLKEADKDEFCRCELKLQKWYGDLRGKPFAIEAENSILDISGFSKQYNCAFIWQKDGVKKLNLYLIINYFKGGKLRFKKIKPEAFEANRFYTVINKKSGEIVIMEVNFNFDDPNLIILPLAFGKRQGREFIWNDLLSLETGSLKLANGRVIEKTLYNRRTRQDEPALFVALTFERREVLDSSNIKPMNLIGVDRGENIPAVIALTDPEGCPLSRFKDSLGNPTHILRIGESYKEKQRTIQAKKEVEQRRAGGYSRKYASKAKNLADDMVRNTARDLLYYAVTQDAMLIFENLSRGFGRQGKRTFMAERQYTRMEDWLTAKLAYEGLPSKTYLSKTLAQYTSKTCSNCGFTITSADYDRVLEKLKKTATGWMTTINGKELKVEGQITYYNRYKRQNVVKDLSVELDRLSEESVNNDISSWTKGRSGEALSLLKKRFSHRPVQEKFVCLNCGFETHADEQAALNIARSWLFLRSQEYKKYQTNKTTGNTDKRAFVETWQSFYRKKLKEVWKPAV

SEQ ID NO: 42292 - protein, 978 aa, synthetic construct
  REGION 1..978: note = engineered CasX variant
QEIKRINKIRRRLVKDSNTKKAGKTGPMKTLLVPVMTPDLRERLENLRKKPENIPQPISNTSRANLNKLLTDYTEMKKAILHVYWEEFQKDPVGLMSRVAQPASKKIDQNKLKPEMDEKGNLTTAGFACSQCGQPLFVYKLEQVSEKGKAYTNYFGRCNVAEHEKLILLAQLKPEKDSDEAVTYSLGKFGQRALDFYSIHVTKESTHPVKPLAQIAGNRYASSPVGKALSDACMGTIASFLSKYQDIIIEHQKVVKGNQKRLESLRELAGKENLEYPSVTLPPQPHTKEGVDAYNEVIARVRMWVNLNLWQKLKLSRDDAKPLLRLKGFPSFPLVERQANEVDWWDMVCNVKKLINEKKEDGKVFWQNLAGYKRQEALRPYLSSEEDRKKGKKFARYQLGDLLLHLEKKHGEDWGKVYDEAWERIDKKVEGLSKHIKLEEERRSEDAQSKAALTDWLRAKASFVIEGLKEADKDEFCRCELKLQKWYGDLRGKPFAIEAENSILDISGFSKQYNCAFIWQKDGVKKLNLYLIINYFKGGKLRFKKIKPEAFEANRFYTVINKKSGEIVIMEVNFNFDDPNLIILPLAFGKRQGREFIWNDLLSLETGSLKLANGRVIEKTLYNRRTRQDEPALFVALTFERREVLDSSNIKPMNLIGVDRGENIPAVIALTDPEGCPLSRFKDSLGNPTHILRIGESYKEKQRTIQAKKEVEQRRAGGYSRKYASKAKNLADDMVRNTARDLLYYAVTQDAMLIFENLSRGFGRQGKRTFMAERQYTRMEDWLTAKLAYEGLPSKTYLSKTLAQYTSKTCSNCGFTITSADYDRVLEKLKKTATGWMTTINGKELKVEGQITYYNRYKRQNVVKDLSVELDRLSEESVNNDISSWTKGRSGEALSLLKKRFSHRPVQEKFVCLNCGFETHADEQAALNIARSWLFLRSQEYKKYQTNKTTGNTDKRAFVETWQSFYRKKLKEVWKPAV

SEQ ID NO: 42293 - protein, 978 aa, synthetic construct
  REGION 1..978: note = engineered CasX variant
QEIKRINKIRRRLVKDSNTKKAGKTGPMKTLLVPVMTPDLRERLENLRKKPENIPQPISNTSRANLNKLLTDYTEMKKAILHVYWEEFQKDPVGLMSRVAQPASKKIDQNKLKPEMDEKGNLTTAGFACSQCGQPLFVYKLEQVSEKGKAYTNYFGRCNVAEHEKLILLAQLKPEKDSDEAVTYSLGKFGQRALDFYSIHVTKESTHPVKPLAQIAGNRYASTPVGKALSDACMGTIASFLSKYQDIIIEHQKVVKGNQKRLESLRELAGKENLEYPSVTLPPQPHTKEGVDAYNEVIARVRMWVNLNLWQKLKLSRDDAKPLLRLKGFPSFPLVERQANEVDWWDMVCNVKKLINEKKEDGKVFWQNLAGYKRQEALRPYLSSEEDRKKGKKFARYQLGDLLLHLEKKHGEDWGKVYDEAWERIDKKVEGLSKHIKLEEERRSEDAQSKAALTDWLRAKASFVIEGLKEADKDEFCRCELKLQKWYGDLRGKPFAIEAENSILDISGFSKQYNCAFIWQKDGVKKLNLYLIINYFKGGKLRFKKIKPEAFEANRFYTVINKKSGEIVIMEVNFNFDDPNLIILPLAFGKRQGREFIWNDLLSLETGSLKLANGRVIEKTLYNRRTRQDEPALFVALTFERREVLDSSNIKPMNLIGVDRGENIPAVIALTDPEGCPLSRFKDSLGNPTHILRIGESYKEKQRTIQAKKEVEQRRAGGYSRKYASKAKNLADDMVRNTARDLLYYAVTQDAMLIFENLSRGFGRQGKRTFMAERQYTRMEDWLTAKLAYEGLPSKTYLSKTLAQYTSKTCSNCGFTITSADYDRVLEKLKKTATGWMTTINGKELKVEGQITYYNRYKRQNVVKDLSVELDRLSEESVNNDISSWTKGRSGEALSLLKKRFSHRPVQEKFVCLNCGFETHADEQAALNIARSWLFLRSQEYKKYQTNKTTGNTDKRAFVETWQSFYRKKLKEVWKPAV

SEQ ID NO: 42294 - protein, 978 aa, synthetic construct
  REGION 1..978: note = engineered CasX variant
QEIKRINKIRRRLVKDSNTKKAGKTGPMKTLLVPVMTPDLRERLENLRKKPENIPQPISNTSRANLNKLLTDYTEMKKAILHVYWEEFQKDPVGLMSRVAQPASKKIDQNKLKPEMDEKGNLTTAGFACSQCGQPLFVYKLEQVSEKGKAYTNYFGRCNVAEHEKLILLAQLKPEKDSDEAVTYSLGKFGQRALDFYSIHVTKESTHPVKPLAQIAGNRYASAPVGKALSDACMGTIASFLSKYQDIIIEHQKVVKGNQKRLESLRELAGKENLEYPSVTLPPQPHTKEGVDAYNEVIARVRMWVNLNLWQKLKLSRDDAKPLLRLKGFPSFPLVERQANEVDWWDMVCNVKKLINEKKEDGKVFWQNLAGYKRQEALRPYLSSEEDRKKGKKFARYQLGDLLLHLEKKHGEDWGKVYDEAWERIDKKVEGLSKHIKLEEERRSEDAQSKAALTDWLRAKASFVIEGLKEADKDEFCRCELKLQKWYGDLRGKPFAIEAENSILDISGFSKQYNCAFIWQKDGVKKLNLYLIINYFKGGKLRFKKIKPEAFEANRFYTVINKKSGEIVIMEVNFNFDDPNLIILPLAFGKRQGREFIWNDLLSLETGSLKLANGRVIEKTLYNRRTRQDEPALFVALTFERREVLDSSNIKPMNLIGVDRGENIPAVIALTDPEGCPLSRFKDSLGNPTHILRIGESYKEKQRTIQAKKEVEQRRAGGYSRKYASKAKNLADDMVRNTARDLLYYAVTQDAMLIFENLSRGFGRQGKRTFMAERQYTRMEDWLTAKLAYEGLPSKTYLSKTLAQYTSKTCSNCGFTITSADYDRVLEKLKKTATGWMTTINGKELKVEGQITYYNRYKRQNVVKDLSVELDRLSEESVNNDISSWTKGRSGEALSLLKKRFSHRPVQEKFVCLNCGFETHADEQAALNIARSWLFLRSQEYKKYQTNKTTGNTDKRAFVETWQSFYRKKLKEVWKPAV

SEQ ID NO: 42295 - protein, 978 aa, synthetic construct
  REGION 1..978: note = engineered CasX variant
QEIKRINKIRRRLVKDSNTKKAGKTGPMKTLLVPVMTPDLRERLENLRKKPENIPQPISNTSRANLNKLLTDYTEMKKAILHVYWEEFQKDPVGLMSRVAQPASKKIDQNKLKPEMDEKGNLTTAGFACSQCGQPLFVYKLEQVSEKGKAYTNYFGRCNVAEHEKLILLAQLKPEKDSDEAVTYSLGKFGQRALDFYSIHVTKESTHPVKPLAQIAGNRYASVPVGKALSDACMGTIASFLSKYQDIIIEHQKVVKGNQKRLESLRELAGKENLEYPSVTLPPQPHTKEGVDAYNEVIARVRMWVNLNLWQKLKLSRDDAKPLLRLKGFPSFPLVERQANEVDWWDMVCNVKKLINEKKEDGKVFWQNLAGYKRQEALRPYLSSEEDRKKGKKFARYQLGDLLLHLEKKHGEDWGKVYDEAWERIDKKVEGLSKHIKLEEERRSEDAQSKAALTDWLRAKASFVIEGLKEADKDEFCRCELKLQKWYGDLRGKPFAIEAENSILDISGFSKQYNCAFIWQKDGVKKLNLYLIINYFKGGKLRFKKIKPEAFEANRFYTVINKKSGEIVIMEVNFNFDDPNLIILPLAFGKRQGREFIWNDLLSLETGSLKLANGRVIEKTLYNRRTRQDEPALFVALTFERREVLDSSNIKPMNLIGVDRGENIPAVIALTDPEGCPLSRFKDSLGNPTHILRIGESYKEKQRTIQAKKEVEQRRAGGYSRKYASKAKNLADDMVRNTARDLLYYAVTQDAMLIFENLSRGFGRQGKRTFMAERQYTRMEDWLTAKLAYEGLPSKTYLSKTLAQYTSKTCSNCGFTITSADYDRVLEKLKKTATGWMTTINGKELKVEGQITYYNRYKRQNVVKDLSVELDRLSEESVNNDISSWTKGRSGEALSLLKKRFSHRPVQEKFVCLNCGFETHADEQAALNIARSWLFLRSQEYKKYQTNKTTGNTDKRAFVETWQSFYRKKLKEVWKPAV

SEQ ID NO: 42296 - protein, 978 aa, synthetic construct
  REGION 1..978: note = engineered CasX variant
QEIKRINKIRRRLVKDSNTKKAGKTGPMKTLLVPVMTPDLRERLENLRKKPENIPQPISNTSRANLNKLLTDYTEMKKAILHVYWEEFQKDPVGLMSRVAQPASKKIDQNKLKPEMDEKGNLTTAGFACSQCGQPLFVYKLEQVSEKGKAYTNYFGRCNVAEHEKLIKLAQLKPEKDSDEAVTYSLGKFGQRALDFYSIHVTKESTHPVKPLAQIAGNRYASGPVGKALSDACMGTIASFLSKYQDIIIEHQKVVKGNQKRLESLRELAGKENLEYPSVTLPPQPHTKEGVDAYNEVIARVRMWVNLNLWQKLKLSRDDAKPLLRLKGFPSFPLVERQANEVDWWDMVCNVKKLINEKKEDGKVFWQNLAGYKRQEALRPYLSSEEDRKKGKKFARYQLGDLLLHLEKKHGEDWGKVYDEAWERIDKKVEGLSKHIKLEEERRSEDAQSKAALTDWLRAKASFVIEGLKEADKDEFCRCELKLQKWYGDLRGKPFAIEAENSILDISGFSKQYNCAFIWQKDGVKKLNLYLIINYFKGGKLRFKKIKPEAFEANRFYTVINKKSGEIVIMEVNFNFDDPNLIILPLAFGKRQGREFIWNDLLSLETGSLKLANGRVIEKTLYNRRTRQDEPALFVALTFERREVLDSSNIKPMNLIGVDRGENIPAVIALTDPEGCPLSRFKDSLGNPTHILRIGESYKEKQRTIQAKKEVEQRRAGGYSRKYASKAKNLADDMVRNTARDLLYYAVTQDAMLIFENLSRGFGRQGKRTFMAERQYTRMEDWLTAKLAYEGLPSKTYLSKTLAQYTSKTCSNCGFTITSADYDRVLEKLKKTATGWMTTINGKELKVEGQITYYNRYKRQNVVKDLSVELDRLSEESVNNDISSWTKGRSGEALSLLKKRFSHRPVQEKFVCLNCGFETHADEQAALNIARSWLFLRSQEYKKYQTNKTTGNTDKRAFVETWQSFYRKKLKEVWKPAV

SEQ ID NO: 42297 - protein, 977 aa, synthetic construct
  REGION 1..977: note = engineered CasX variant
QEIKRINKIRRRLVKDSNTKKAGKTGPMKTLLVPVMTPDLRERLENLRKKPENIPQPISNTSRANLNKLLTDYTEMKKAILHVYWEEFQKDPVGLMSRVAQPASKKIDQNKLKPEMDEKGNLTTAGFACSQCGQPLFVYKLEQVSEKGKAYTNYFGRCNVAEHEKLILLAQLKPEKDSDEAVTYSLGKFGQRALDFYSIHVTKESTHPVKPLAQIAGNRYASPVGKALSDACMGTIASFLSKYQDIIIEHQKVVKGNQKRLESLRELAGKENLEYPSVTLPPQPHTKEGVDAYNEVIARVRMWVNLNLWQKLKLSRDDAKPLLRLKGFPSFPLVERQANEVDWWDMVCNVKKLINEKKEDGKVFWQNLAGYKRQEALRPYLSSEEDRKKGKKFARYQLGDLLLHLEKKHGEDWGKVYDEAWERIDKKVEGLSKHIKLEEERRSEDAQSKAALTDWLRAKASFVIEGLKEADKDEFCRCELKLQKWYGDLRGKPFAIEAENSILDISGFSKQYNCAFIWQKDGVKKLNLYLIINYFKGGKLRFKKIKPEAFEANRFYTVINKKSGEIVIMEVNFNFDDPNLIILPLAFGKRQGREFIWNDLLSLETGSLKLANGRVIEKTLYNRRTRQDEPALFVALTFERREVLDSSNIKPMNLIGVDRGENIPAVIALTDPEGCPLSRFKDSLGNPTHILRIGESYKEKQRTIQAKKEVEQRRAGGYSRKYASKAKNLADDMVRNTARDLLYYAVTQDAMLIFENLSRGFGRQGKRTFMAERQYTRMEDWLTAKLAYEGLPSKTYLSKTLAQYTSKTCSNCGFTITSADYDRVLEKLKKTATGWMTTINGKELKVEGQITYYNRYKRQNVVKDLSVELDRLSEESVNNDISSWTKGRSGEALSLLKKRFSHRPVQEKFVCLNCGFETHADEQAALNIARSWLFLRSQEYKKYQTNKTTGNTDKRAFVETWQSFYRKKLKEVWKPAV

SEQ ID NO: 42298 - protein, 978 aa, synthetic construct
  REGION 1..978: note = engineered CasX variant
QEIKRINKIRRRLVKDSNTKKAGKTGPMKTLLVRVMTPDLRERLENLRKKPPNIPQPISNTSRANLNKLLTDYTEMKKAILHVYWEEFQKDPVGLMSRVAQPASKKIDQNKLKPEMDEKGNLTTAGFACSQCGQPLFVYKLEQVSEKGKAYTNYFGRCNVAEHEKLILLAQLKPEKDSDEAVTYSLGKFGQRALDFYSIHVTKESTHPVKPLAQIAGNRYASYPVGKALSGACMGTIASFLSKYQDIIIEHQKVVKGNQKRLESLRELAGKENLEYPSVTLPPQPHTKEGVDAYNEVIARVRMWVNLNLWQKLKLSRDDAKPLLRLKGFPSFPLVERQANEVDWWDMVCNVKKLINEKKEDGKVFWQNLAGYKRQEALRPYLSSEEDRKKGKKFARYQLGDLLLHLEKKHGEDWGKVYDEAWERIDKKVEGLSKHIKLEEERRSEDAQSKAALTDWLRAKASFVIEGLKEADKDEFCRCELKLQKWYGDLRGKPFAIEAENSILDISGFSKQYNCAFIWQKDGVKKLNLYLIINYFKGGKLRFKKIKPEAFEANRFYTVINKKSGEIVPMEVNFNFDDPNLIILPLAFGKRQGREFIWNDLLSLETGSLKLANGRVIEKTLYNRRTRQDEPALFVALTFERREVLDSSNIKPMNLIGVDRGENIPAVIALTDPEGCPLSRFKDSLGNPTHILRIGESYKEKQRTIQAKKEVEQRRAGGYSRKYASKAKNLADDMVRNTARDLLYYAVTQDAMLIFENLSRGFGRQGKRTFMAERQYTRMEDWLTAKLAYEGLPSKTYLSKTLAQYTSKTCSNCGFTITSADYDRVLEKLKKTATGWMTTINGKELKVEGQITYYNRYKRQNVVKDLSVELDRLSEESVNNDISSWTKGRSGEALSLLKKRFSHRPVQEKFVCLNCGFETHADEQAALNIARSWLFLRSQEYKKYQTNKTTGNTDKRAFVETWQSFYRKKLKEVWKPAV

SEQ ID NO: 42299 - protein, 978 aa, synthetic construct
  REGION 1..978: note = engineered CasX variant
QEIKRINKIRRRLVKDSNTKKAGKTGPMKTLLVRVMTPDLRERLENLRKKPPNIPQPISNTSRANLNKLLTDYTEMKKAILHVYWEEFQKDPVGLMSRVAQPASKKIDQNKLKPEMDEKGNLTTAGFACSQCGQPLFVYKLEQVSEKGKAYTNYFGRCNVAEHEKLILLAQLKPEKDSDEAVTYSLGKFGQRALDFYSIHVTKESTHPVKPLAQIAGNRYASHPVGKALSGACMGTIASFLSKYQDIIIEHQKVVKGNQKRLESLRELAGKENLEYPSVTLPPQPHTKEGVDAYNEVIARVRMWVNLNLWQKLKLSRDDAKPLLRLKGFPSFPLVERQANEVDWWDMVCNVKKLINEKKEDGKVFWQNLAGYKRQEALRPYLSSEEDRKKGKKFARYQLGDLLLHLEKKHGEDWGKVYDEAWERIDKKVEGLSKHIKLEEERRSEDAQSKAALTDWLRAKASFVIEGLKEADKDEFCRCELKLQKWYGDLRGKPFAIEAENSILDISGFSKQYNCAFIWQKDGVKKLNLYLIINYFKGGKLRFKKIKPEAFEANRFYTVINKKSGEIVPMEVNFNFDDPNLIILPLAFGKRQGREFIWNDLLSLETGSLKLANGRVIEKTLYNRRTRQDEPALFVALTFERREVLDSSNIKPMNLIGVDRGENIPAVIALTDPEGCPLSRFKDSLGNPTHILRIGESYKEKQRTIQAKKEVEQRRAGGYSRKYASKAKNLADDMVRNTARDLLYYAVTQDAMLIFENLSRGFGRQGKRTFMAERQYTRMEDWLTAKLAYEGLPSKTYLSKTLAQYTSKTCSNCGFTITSADYDRVLEKLKKTATGWMTTINGKELKVEGQITYYNRYKRQNVVKDLSVELDRLSEESVNNDISSWTKGRSGEALSLLKKRFSHRPVQEKFVCLNCGFETHADEQAALNIARSWLFLRSQEYKKYQTNKTTGNTDKRAFVETWQSFYRKKLKEVWKPAV

SEQ ID NO: 42300 - protein, 978 aa, synthetic construct
  REGION 1..978: note = engineered CasX variant
QEIKRINKIRRRLVKDSNTKKAGKTGPMKTLLVRVMTPDLRERLENLRKKPPNIPQPISNTSRANLNKLLTDYTEMKKAILHVYWEEFQKDPVGLMSRVAQPASKKIDQNKLKPEMDEKGNLTTAGFACSQCGQPLFVYKLEQVSEKGKAYTNYFGRCNVAEHEKLILLAQLKPEKDSDEAVTYSLGKFGQRALDFYSIHVTKESTHPVKPLAQIAGNRYASSPVGKALSGACMGTIASFLSKYQDIIIEHQKVVKGNQKRLESLRELAGKENLEYPSVTLPPQPHTKEGVDAYNEVIARVRMWVNLNLWQKLKLSRDDAKPLLRLKGFPSFPLVERQANEVDWWDMVCNVKKLINEKKEDGKVFWQNLAGYKRQEALRPYLSSEEDRKKGKKFARYQLGDLLLHLEKKHGEDWGKVYDEAWERIDKKVEGLSKHIKLEEERRSEDAQSKAALTDWLRAKASFVIEGLKEADKDEFCRCELKLQKWYGDLRGKPFAIEAENSILDISGFSKQYNCAFIWQKDGVKKLNLYLIINYFKGGKLRFKKIKPEAFEANRFYTVINKKSGEIVPMEVNFNFDDPNLIILPLAFGKRQGREFIWNDLLSLETGSLKLANGRVIEKTLYNRRTRQDEPALFVALTFERREVLDSSNIKPMNLIGVDRGENIPAVIALTDPEGCPLSRFKDSLGNPTHILRIGESYKEKQRTIQAKKEVEQRRAGGYSRKYASKAKNLADDMVRNTARDLLYYAVTQDAMLIFENLSRGFGRQGKRTFMAERQYTRMEDWLTAKLAYEGLPSKTYLSKTLAQYTSKTCSNCGFTITSADYDRVLEKLKKTATGWMTTINGKELKVEGQITYYNRYKRQNVVKDLSVELDRLSEESVNNDISSWTKGRSGEALSLLKKRFSHRPVQEKFVCLNCGFETHADEQAALNIARSWLFLRSQEYKKYQTNKTTGNTDKRAFVETWQSFYRKKLKEVWKPAV

SEQ ID NO: 42301 - protein, 978 aa, synthetic construct
  REGION 1..978: note = engineered CasX variant
QEIKRINKIRRRLVKDSNTKKAGKTGPMKTLLVRVMTPDLRERLENLRKKPPNIPQPISNTSRANLNKLLTDYTEMKKAILHVYWEEFQKDPVGLMSRVAQPASKKIDQNKLKPEMDEKGNLTTAGFACSQCGQPLFVYKLEQVSEKGKAYTNYFGRCNVAEHEKLILLAQLKPEKDSDEAVTYSLGKFGQRALDFYSIHVTKESTHPVKPLAQIAGNRYASTPVGKALSGACMGTIASFLSKYQDIIIEHQKVVKGNQKRLESLRELAGKENLEYPSVTLPPQPHTKEGVDAYNEVIARVRMWVNLNLWQKLKLSRDDAKPLLRLKGFPSFPLVERQANEVDWWDMVCNVKKLINEKKEDGKVFWQNLAGYKRQEALRPYLSSEEDRKKGKKFARYQLGDLLLHLEKKHGEDWGKVYDEAWERIDKKVEGLSKHIKLEEERRSEDAQSKAALTDWLRAKASFVIEGLKEADKDEFCRCELKLQKWYGDLRGKPFAIEAENSILDISGFSKQYNCAFIWQKDGVKKLNLYLIINYFKGGKLRFKKIKPEAFEANRFYTVINKKSGEIVPMEVNFNFDDPNLIILPLAFGKRQGREFIWNDLLSLETGSLKLANGRVIEKTLYNRRTRQDEPALFVALTFERREVLDSSNIKPMNLIGVDRGENIPAVIALTDPEGCPLSRFKDSLGNPTHILRIGESYKEKQRTIQAKKEVEQRRAGGYSRKYASKAKNLADDMVRNTARDLLYYAVTQDAMLIFENLSRGFGRQGKRTFMAERQYTRMEDWLTAKLAYEGLPSKTYLSKTLAQYTSKTCSNCGFTITSADYDRVLEKLKKTATGWMTTINGKELKVEGQITYYNRYKRQNVVKDLSVELDRLSEESVNNDISSWTKGRSGEALSLLKKRFSHRPVQEKFVCLNCGFETHADEQAALNIARSWLFLRSQEYKKYQTNKTTGNTDKRAFVETWQSFYRKKLKEVWKPAV

SEQ ID NO: 42302 - protein, 978 aa, synthetic construct
  REGION 1..978: note = engineered CasX variant
QEIKRINKIRRRLVKDSNTKKAGKTGPMKTLLVRVMTPDLRERLENLRKKPPNIPQPISNTSRANLNKLLTDYTEMKKAILHVYWEEFQKDPVGLMSRVAQPASKKIDQNKLKPEMDEKGNLTTAGFACSQCGQPLFVYKLEQVSEKGKAYTNYFGRCNVAEHEKLILLAQLKPEKDSDEAVTYSLGKFGQRALDFYSIHVTKESTHPVKPLAQIAGNRYASAPVGKALSGACMGTIASFLSKYQDIIIEHQKVVKGNQKRLESLRELAGKENLEYPSVTLPPQPHTKEGVDAYNEVIARVRMWVNLNLWQKLKLSRDDAKPLLRLKGFPSFPLVERQANEVDWWDMVCNVKKLINEKKEDGKVFWQNLAGYKRQEALRPYLSSEEDRKKGKKFARYQLGDLLLHLEKKHGEDWGKVYDEAWERIDKKVEGLSKHIKLEEERRSEDAQSKAALTDWLRAKASFVIEGLKEADKDEFCRCELKLQKWYGDLRGKPFAIEAENSILDISGFSKQYNCAFIWQKDGVKKLNLYLIINYFKGGKLRFKKIKPEAFEANRFYTVINKKSGEIVPMEVNFNFDDPNLIILPLAFGKRQGREFIWNDLLSLETGSLKLANGRVIEKTLYNRRTRQDEPALFVALTFERREVLDSSNIKPMNLIGVDRGENIPAVIALTDPEGCPLSRFKDSLGNPTHILRIGESYKEKQRTIQAKKEVEQRRAGGYSRKYASKAKNLADDMVRNTARDLLYYAVTQDAMLIFENLSRGFGRQGKRTFMAERQYTRMEDWLTAKLAYEGLPSKTYLSKTLAQYTSKTCSNCGFTITSADYDRVLEKLKKTATGWMTTINGKELKVEGQITYYNRYKRQNVVKDLSVELDRLSEESVNNDISSWTKGRSGEALSLLKKRFSHRPVQEKFVCLNCGFETHADEQAALNIARSWLFLRSQEYKKYQTNKTTGNTDKRAFVETWQSFYRKKLKEVWKPAV

SEQ ID NO: 42303 - protein, 978 aa, synthetic construct
  REGION 1..978: note = engineered CasX variant
QEIKRINKIRRRLVKDSNTKKAGKTGPMKTLLVRVMTPDLRERLENLRKKPPNIPQPISNTSRANLNKLLTDYTEMKKAILHVYWEEFQKDPVGLMSRVAQPASKKIDQNKLKPEMDEKGNLTTAGFACSQCGQPLFVYKLEQVSEKGKAYTNYFGRCNVAEHEKLILLAQLKPEKDSDEAVTYSLGKFGQRALDFYSIHVTKESTHPVKPLAQIAGNRYASVPVGKALSGACMGTIASFLSKYQDIIIEHQKVVKGNQKRLESLRELAGKENLEYPSVTLPPQPHTKEGVDAYNEVIARVRMWVNLNLWQKLKLSRDDAKPLLRLKGFPSFPLVERQANEVDWWDMVCNVKKLINEKKEDGKVFWQNLAGYKRQEALRPYLSSEEDRKKGKKFARYQLGDLLLHLEKKHGEDWGKVYDEAWERIDKKVEGLSKHIKLEEERRSEDAQSKAALTDWLRAKASFVIEGLKEADKDEFCRCELKLQKWYGDLRGKPFAIEAENSILDISGFSKQYNCAFIWQKDGVKKLNLYLIINYFKGGKLRFKKIKPEAFEANRFYTVINKKSGEIVPMEVNFNFDDPNLIILPLAFGKRQGREFIWNDLLSLETGSLKLANGRVIEKTLYNRRTRQDEPALFVALTFERREVLDSSNIKPMNLIGVDRGENIPAVIALTDPEGCPLSRFKDSLGNPTHILRIGESYKEKQRTIQAKKEVEQRRAGGYSRKYASKAKNLADDMVRNTARDLLYYAVTQDAMLIFENLSRGFGRQGKRTFMAERQYTRMEDWLTAKLAYEGLPSKTYLSKTLAQYTSKTCSNCGFTITSADYDRVLEKLKKTATGWMTTINGKELKVEGQITYYNRYKRQNVVKDLSVELDRLSEESVNNDISSWTKGRSGEALSLLKKRFSHRPVQEKFVCLNCGFETHADEQAALNIARSWLFLRSQEYKKYQTNKTTGNTDKRAFVETWQSFYRKKLKEVWKPAV

SEQ ID NO: 42304 - protein, 978 aa, synthetic construct
  REGION 1..978: note = engineered CasX variant
QEIKRINKIRRRLVKDSNTKKAGKTGPMKTLLVRVMTPDLRERLENLRKKPPNIPQPISNTSRANLNKLLTDYTEMKKAILHVYWEEFQKDPVGLMSRVAQPASKKIDQNKLKPEMDEKGNLTTAGFACSQCGQPLFVYKLEQVSEKGKAYTNYFGRCNVAEHEKLIKLAQLKPEKDSDEAVTYSLGKFGQRALDFYSIHVTKESTHPVKPLAQIAGNRYASGPVGKALSGACMGTIASFLSKYQDIIIEHQKVVKGNQKRLESLRELAGKENLEYPSVTLPPQPHTKEGVDAYNEVIARVRMWVNLNLWQKLKLSRDDAKPLLRLKGFPSFPLVERQANEVDWWDMVCNVKKLINEKKEDGKVFWQNLAGYKRQEALRPYLSSEEDRKKGKKFARYQLGDLLLHLEKKHGEDWGKVYDEAWERIDKKVEGLSKHIKLEEERRSEDAQSKAALTDWLRAKASFVIEGLKEADKDEFCRCELKLQKWYGDLRGKPFAIEAENSILDISGFSKQYNCAFIWQKDGVKKLNLYLIINYFKGGKLRFKKIKPEAFEANRFYTVINKKSGEIVPMEVNFNFDDPNLIILPLAFGKRQGREFIWNDLLSLETGSLKLANGRVIEKTLYNRRTRQDEPALFVALTFERREVLDSSNIKPMNLIGVDRGENIPAVIALTDPEGCPLSRFKDSLGNPTHILRIGESYKEKQRTIQAKKEVEQRRAGGYSRKYASKAKNLADDMVRNTARDLLYYAVTQDAMLIFENLSRGFGRQGKRTFMAERQYTRMEDWLTAKLAYEGLPSKTYLSKTLAQYTSKTCSNCGFTITSADYDRVLEKLKKTATGWMTTINGKELKVEGQITYYNRYKRQNVVKDLSVELDRLSEESVNNDISSWTKGRSGEALSLLKKRFSHRPVQEKFVCLNCGFETHADEQAALNIARSWLFLRSQEYKKYQTNKTTGNTDKRAFVETWQSFYRKKLKEVWKPAV

SEQ ID NO: 42305 - protein, 977 aa, synthetic construct
  REGION 1..977: note = engineered CasX variant
QEIKRINKIRRRLVKDSNTKKAGKTGPMKTLLVRVMTPDLRERLENLRKKPPNIPQPISNTSRANLNKLLTDYTEMKKAILHVYWEEFQKDPVGLMSRVAQPASKKIDQNKLKPEMDEKGNLTTAGFACSQCGQPLFVYKLEQVSEKGKAYTNYFGRCNVAEHEKLILLAQLKPEKDSDEAVTYSLGKFGQRALDFYSIHVTKESTHPVKPLAQIAGNRYASPVGKALSGACMGTIASFLSKYQDIIIEHQKVVKGNQKRLESLRELAGKENLEYPSVTLPPQPHTKEGVDAYNEVIARVRMWVNLNLWQKLKLSRDDAKPLLRLKGFPSFPLVERQANEVDWWDMVCNVKKLINEKKEDGKVFWQNLAGYKRQEALRPYLSSEEDRKKGKKFARYQLGDLLLHLEKKHGEDWGKVYDEAWERIDKKVEGLSKHIKLEEERRSEDAQSKAALTDWLRAKASFVIEGLKEADKDEFCRCELKLQKWYGDLRGKPFAIEAENSILDISGFSKQYNCAFIWQKDGVKKLNLYLIINYFKGGKLRFKKIKPEAFEANRFYTVINKKSGEIVPMEVNFNFDDPNLIILPLAFGKRQGREFIWNDLLSLETGSLKLANGRVIEKTLYNRRTRQDEPALFVALTFERREVLDSSNIKPMNLIGVDRGENIPAVIALTDPEGCPLSRFKDSLGNPTHILRIGESYKEKQRTIQAKKEVEQRRAGGYSRKYASKAKNLADDMVRNTARDLLYYAVTQDAMLIFENLSRGFGRQGKRTFMAERQYTRMEDWLTAKLAYEGLPSKTYLSKTLAQYTSKTCSNCGFTITSADYDRVLEKLKKTATGWMTTINGKELKVEGQITYYNRYKRQNVVKDLSVELDRLSEESVNNDISSWTKGRSGEALSLLKKRFSHRPVQEKFVCLNCGFETHADEQAALNIARSWLFLRSQEYKKYQTNKTTGNTDKRAFVETWQSFYRKKLKEVWKPAV

SEQ ID NO: 42306 - protein, 978 aa, synthetic construct
  REGION 1..978: note = engineered CasX variant
QEIKRINKIRRRLVKDSNTKKAGKTGPMKTLLVRVMTPDLRERLENLRKKPPNIPQPISNTSRANLNKLLTDYTEMKKAILHVYWEEFQKDPVGLMSRVAQPASKKIDQNKLKPEMDEKGNLTTAGFACSQCGQPLFVYKLEQVSEKGKAYTNYFGRCNVAEHEKLILLAQLKPEKDSDEAVTYSLGKFGQRALDFYSIHVTKESTHPVKPLAQIAGNRYASYPVGKALSDACMGTIASFLSKYQDIIIEHQKVVKGNQKRLESLRELAGKENLEYPSVTLPPQPHTKEGVDAYNEVIARVRMWVNLNLWQKLKLSRDDAKPLLRLKNFPSFPLVERQANEVDWWDMVCNVKKLINEKKEDGKVFWQNLAGYKRQEALRPYLSSEEDRKKGKKFARYQLGDLLLHLEKKHGEDWGKVYDEAWERIDKKVEGLSKHIKLEEERRSEDAQSKAALTDWLRAKASFVIEGLKEADKDEFCRCELKLQKWYGDLRGKPFAIEAENSILDISGFSKQYNCAFIWQKDGVKKLNLYLIINYFKGGKLRFKKIKPEAFEANRFYTVINKKSGEIVPMEVNFNFDDPNLIILPLAFGKRQGREFIWNDLLSLETGSLKLANGRVIEKTLYNRRTRQDEPALFVALTFERREVLDSSNIKPMNLIGVDRGENIPAVIALTDPEGCPLSRFKDSLGNPTHILRIGESYKEKQRTIQAKKEVEQRRAGGYSRKYASKAKNLADDMVRNTARDLLYYAVTQDAMLIFENLSRGFGRQGKRTFMAERQYTRMEDWLTAKLAYEGLPSKTYLSKTLAQYTSKTCSNCGFTITSADYDRVLEKLKKTATGWMTTINGKELKVEGQITYYNRYKRQNVVKDLSVELDRLSEESVNNDISSWTKGRSGEALSLLKKRFSHRPVQEKFVCLNCGFETHADEQAALNIARSWLFLRSQEYKKYQTNKTTGNTDKRAFVETWQSFYRKKLKEVWKPAV

SEQ ID NO: 42307 - protein, 978 aa, synthetic construct
  REGION 1..978: note = engineered CasX variant
QEIKRINKIRRRLVKDSNTKKAGKTGPMKTLLVRVMTPDLRERLENLRKKPPNIPQPISNTSRANLNKLLTDYTEMKKAILHVYWEEFQKDPVGLMSRVAQPASKKIDQNKLKPEMDEKGNLTTAGFACSQCGQPLFVYKLEQVSEKGKAYTNYFGRCNVAEHEKLILLAQLKPEKDSDEAVTYSLGKFGQRALDFYSIHVTKESTHPVKPLAQIAGNRYASHPVGKALSDACMGTIASFLSKYQDIIIEHQKVVKGNQKRLESLRELAGKENLEYPSVTLPPQPHTKEGVDAYNEVIARVRMWVNLNLWQKLKLSRDDAKPLLRLKNFPSFPLVERQANEVDWWDMVCNVKKLINEKKEDGKVFWQNLAGYKRQEALRPYLSSEEDRKKGKKFARYQLGDLLLHLEKKHGEDWGKVYDEAWERIDKKVEGLSKHIKLEEERRSEDAQSKAALTDWLRAKASFVIEGLKEADKDEFCRCELKLQKWYGDLRGKPFAIEAENSILDISGFSKQYNCAFIWQKDGVKKLNLYLIINYFKGGKLRFKKIKPEAFEANRFYTVINKKSGEIVPMEVNFNFDDPNLIILPLAFGKRQGREFIWNDLLSLETGSLKLANGRVIEKTLYNRRTRQDEPALFVALTFERREVLDSSNIKPMNLIGVDRGENIPAVIALTDPEGCPLSRFKDSLGNPTHILRIGESYKEKQRTIQAKKEVEQRRAGGYSRKYASKAKNLADDMVRNTARDLLYYAVTQDAMLIFENLSRGFGRQGKRTFMAERQYTRMEDWLTAKLAYEGLPSKTYLSKTLAQYTSKTCSNCGFTITSADYDRVLEKLKKTATGWMTTINGKELKVEGQITYYNRYKRQNVVKDLSVELDRLSEESVNNDISSWTKGRSGEALSLLKKRFSHRPVQEKFVCLNCGFETHADEQAALNIARSWLFLRSQEYKKYQTNKTTGNTDKRAFVETWQSFYRKKLKEVWKPAV

SEQ ID NO: 42308 - protein, 978 aa, synthetic construct
  REGION 1..978: note = engineered CasX variant
QEIKRINKIRRRLVKDSNTKKAGKTGPMKTLLVRVMTPDLRERLENLRKKPPNIPQPISNTSRANLNKLLTDYTEMKKAILHVYWEEFQKDPVGLMSRVAQPASKKIDQNKLKPEMDEKGNLTTAGFACSQCGQPLFVYKLEQVSEKGKAYTNYFGRCNVAEHEKLILLAQLKPEKDSDEAVTYSLGKFGQRALDFYSIHVTKESTHPVKPLAQIAGNRYASSPVGKALSDACMGTIASFLSKYQDIIIEHQKVVKGNQKRLESLRELAGKENLEYPSVTLPPQPHTKEGVDAYNEVIARVRMWVNLNLWQKLKLSRDDAKPLLRLKNFPSFPLVERQANEVDWWDMVCNVKKLINEKKEDGKVFWQNLAGYKRQEALRPYLSSEEDRKKGKKFARYQLGDLLLHLEKKHGEDWGKVYDEAWERIDKKVEGLSKHIKLEEERRSEDAQSKAALTDWLRAKASFVIEGLKEADKDEFCRCELKLQKWYGDLRGKPFAIEAENSILDISGFSKQYNCAFIWQKDGVKKLNLYLIINYFKGGKLRFKKIKPEAFEANRFYTVINKKSGEIVPMEVNFNFDDPNLIILPLAFGKRQGREFIWNDLLSLETGSLKLANGRVIEKTLYNRRTRQDEPALFVALTFERREVLDSSNIKPMNLIGVDRGENIPAVIALTDPEGCPLSRFKDSLGNPTHILRIGESYKEKQRTIQAKKEVEQRRAGGYSRKYASKAKNLADDMVRNTARDLLYYAVTQDAMLIFENLSRGFGRQGKRTFMAERQYTRMEDWLTAKLAYEGLPSKTYLSKTLAQYTSKTCSNCGFTITSADYDRVLEKLKKTATGWMTTINGKELKVEGQITYYNRYKRQNVVKDLSVELDRLSEESVNNDISSWTKGRSGEALSLLKKRFSHRPVQEKFVCLNCGFETHADEQAALNIARSWLFLRSQEYKKYQTNKTTGNTDKRAFVETWQSFYRKKLKEVWKPAV

SEQ ID NO: 42309 - protein, 978 aa, synthetic construct
  REGION 1..978: note = engineered CasX variant
QEIKRINKIRRRLVKDSNTKKAGKTGPMKTLLVRVMTPDLRERLENLRKKPPNIPQPISNTSRANLNKLLTDYTEMKKAILHVYWEEFQKDPVGLMSRVAQPASKKIDQNKLKPEMDEKGNLTTAGFACSQCGQPLFVYKLEQVSEKGKAYTNYFGRCNVAEHEKLILLAQLKPEKDSDEAVTYSLGKFGQRALDFYSIHVTKESTHPVKPLAQIAGNRYASTPVGKALSDACMGTIASFLSKYQDIIIEHQKVVKGNQKRLESLRELAGKENLEYPSVTLPPQPHTKEGVDAYNEVIARVRMWVNLNLWQKLKLSRDDAKPLLRLKNFPSFPLVERQANEVDWWDMVCNVKKLINEKKEDGKVFWQNLAGYKRQEALRPYLSSEEDRKKGKKFARYQLGDLLLHLEKKHGEDWGKVYDEAWERIDKKVEGLSKHIKLEEERRSEDAQSKAALTDWLRAKASFVIEGLKEADKDEFCRCELKLQKWYGDLRGKPFAIEAENSILDISGFSKQYNCAFIWQKDGVKKLNLYLIINYFKGGKLRFKKIKPEAFEANRFYTVINKKSGEIVPMEVNFNFDDPNLIILPLAFGKRQGREFIWNDLLSLETGSLKLANGRVIEKTLYNRRTRQDEPALFVALTFERREVLDSSNIKPMNLIGVDRGENIPAVIALTDPEGCPLSRFKDSLGNPTHILRIGESYKEKQRTIQAKKEVEQRRAGGYSRKYASKAKNLADDMVRNTARDLLYYAVTQDAMLIFENLSRGFGRQGKRTFMAERQYTRMEDWLTAKLAYEGLPSKTYLSKTLAQYTSKTCSNCGFTITSADYDRVLEKLKKTATGWMTTINGKELKVEGQITYYNRYKRQNVVKDLSVELDRLSEESVNNDISSWTKGRSGEALSLLKKRFSHRPVQEKFVCLNCGFETHADEQAALNIARSWLFLRSQEYKKYQTNKTTGNTDKRAFVETWQSFYRKKLKEVWKPAV

SEQ ID NO: 42310 - protein, 978 aa, synthetic construct
  REGION 1..978: note = engineered CasX variant
QEIKRINKIRRRLVKDSNTKKAGKTGPMKTLLVRVMTPDLRERLENLRKKPPNIPQPISNTSRANLNKLLTDYTEMKKAILHVYWEEFQKDPVGLMSRVAQPASKKIDQNKLKPEMDEKGNLTTAGFACSQCGQPLFVYKLEQVSEKGKAYTNYFGRCNVAEHEKLILLAQLKPEKDSDEAVTYSLGKFGQRALDFYSIHVTKESTHPVKPLAQIAGNRYASAPVGKALSDACMGTIASFLSKYQDIIIEHQKVVKGNQKRLESLRELAGKENLEYPSVTLPPQPHTKEGVDAYNEVIARVRMWVNLNLWQKLKLSRDDAKPLLRLKNFPSFPLVERQANEVDWWDMVCNVKKLINEKKEDGKVFWQNLAGYKRQEALRPYLSSEEDRKKGKKFARYQLGDLLLHLEKKHGEDWGKVYDEAWERIDKKVEGLSKHIKLEEERRSEDAQSKAALTDWLRAKASFVIEGLKEADKDEFCRCELKLQKWYGDLRGKPFAIEAENSILDISGFSKQYNCAFIWQKDGVKKLNLYLIINYFKGGKLRFKKIKPEAFEANRFYTVINKKSGEIVPMEVNFNFDDPNLIILPLAFGKRQGREFIWNDLLSLETGSLKLANGRVIEKTLYNRRTRQDEPALFVALTFERREVLDSSNIKPMNLIGVDRGENIPAVIALTDPEGCPLSRFKDSLGNPTHILRIGESYKEKQRTIQAKKEVEQRRAGGYSRKYASKAKNLADDMVRNTARDLLYYAVTQDAMLIFENLSRGFGRQGKRTFMAERQYTRMEDWLTAKLAYEGLPSKTYLSKTLAQYTSKTCSNCGFTITSADYDRVLEKLKKTATGWMTTINGKELKVEGQITYYNRYKRQNVVKDLSVELDRLSEESVNNDISSWTKGRSGEALSLLKKRFSHRPVQEKFVCLNCGFETHADEQAALNIARSWLFLRSQEYKKYQTNKTTGNTDKRAFVETWQSFYRKKLKEVWKPAV

SEQ ID NO: 42311 - protein, 978 aa, synthetic construct
  REGION 1..978: note = engineered CasX variant
QEIKRINKIRRRLVKDSNTKKAGKTGPMKTLLVRVMTPDLRERLENLRKKPPNIPQPISNTSRANLNKLLTDYTEMKKAILHVYWEEFQKDPVGLMSRVAQPASKKIDQNKLKPEMDEKGNLTTAGFACSQCGQPLFVYKLEQVSEKGKAYTNYFGRCNVAEHEKLILLAQLKPEKDSDEAVTYSLGKFGQRALDFYSIHVTKESTHPVKPLAQIAGNRYASVPVGKALSDACMGTIASFLSKYQDIIIEHQKVVKGNQKRLESLRELAGKENLEYPSVTLPPQPHTKEGVDAYNEVIARVRMWVNLNLWQKLKLSRDDAKPLLRLKNFPSFPLVERQANEVDWWDMVCNVKKLINEKKEDGKVFWQNLAGYKRQEALRPYLSSEEDRKKGKKFARYQLGDLLLHLEKKHGEDWGKVYDEAWERIDKKVEGLSKHIKLEEERRSEDAQSKAALTDWLRAKASFVIEGLKEADKDEFCRCELKLQKWYGDLRGKPFAIEAENSILDISGFSKQYNCAFIWQKDGVKKLNLYLIINYFKGGKLRFKKIKPEAFEANRFYTVINKKSGEIVPMEVNFNFDDPNLIILPLAFGKRQGREFIWNDLLSLETGSLKLANGRVIEKTLYNRRTRQDEPALFVALTFERREVLDSSNIKPMNLIGVDRGENIPAVIALTDPEGCPLSRFKDSLGNPTHILRIGESYKEKQRTIQAKKEVEQRRAGGYSRKYASKAKNLADDMVRNTARDLLYYAVTQDAMLIFENLSRGFGRQGKRTFMAERQYTRMEDWLTAKLAYEGLPSKTYLSKTLAQYTSKTCSNCGFTITSADYDRVLEKLKKTATGWMTTINGKELKVEGQITYYNRYKRQNVVKDLSVELDRLSEESVNNDISSWTKGRSGEALSLLKKRFSHRPVQEKFVCLNCGFETHADEQAALNIARSWLFLRSQEYKKYQTNKTTGNTDKRAFVETWQSFYRKKLKEVWKPAV

SEQ ID NO: 42312 - protein, 978 aa, synthetic construct
  REGION 1..978: note = engineered CasX variant
QEIKRINKIRRRLVKDSNTKKAGKTGPMKTLLVRVMTPDLRERLENLRKKPPNIPQPISNTSRANLNKLLTDYTEMKKAILHVYWEEFQKDPVGLMSRVAQPASKKIDQNKLKPEMDEKGNLTTAGFACSQCGQPLFVYKLEQVSEKGKAYTNYFGRCNVAEHEKLIKLAQLKPEKDSDEAVTYSLGKFGQRALDFYSIHVTKESTHPVKPLAQIAGNRYASGPVGKALSDACMGTIASFLSKYQDIIIEHQKVVKGNQKRLESLRELAGKENLEYPSVTLPPQPHTKEGVDAYNEVIARVRMWVNLNLWQKLKLSRDDAKPLLRLKNFPSFPLVERQANEVDWWDMVCNVKKLINEKKEDGKVFWQNLAGYKRQEALRPYLSSEEDRKKGKKFARYQLGDLLLHLEKKHGEDWGKVYDEAWERIDKKVEGLSKHIKLEEERRSEDAQSKAALTDWLRAKASFVIEGLKEADKDEFCRCELKLQKWYGDLRGKPFAIEAENSILDISGFSKQYNCAFIWQKDGVKKLNLYLIINYFKGGKLRFKKIKPEAFEANRFYTVINKKSGEIVPMEVNFNFDDPNLIILPLAFGKRQGREFIWNDLLSLETGSLKLANGRVIEKTLYNRRTRQDEPALFVALTFERREVLDSSNIKPMNLIGVDRGENIPAVIALTDPEGCPLSRFKDSLGNPTHILRIGESYKEKQRTIQAKKEVEQRRAGGYSRKYASKAKNLADDMVRNTARDLLYYAVTQDAMLIFENLSRGFGRQGKRTFMAERQYTRMEDWLTAKLAYEGLPSKTYLSKTLAQYTSKTCSNCGFTITSADYDRVLEKLKKTATGWMTTINGKELKVEGQITYYNRYKRQNVVKDLSVELDRLSEESVNNDISSWTKGRSGEALSLLKKRFSHRPVQEKFVCLNCGFETHADEQAALNIARSWLFLRSQEYKKYQTNKTTGNTDKRAFVETWQSFYRKKLKEVWKPAV

SEQ ID NO: 42313 - protein, 977 aa, synthetic construct
  REGION 1..977: note = engineered CasX variant
QEIKRINKIRRRLVKDSNTKKAGKTGPMKTLLVRVMTPDLRERLENLRKKPPNIPQPISNTSRANLNKLLTDYTEMKKAILHVYWEEFQKDPVGLMSRVAQPASKKIDQNKLKPEMDEKGNLTTAGFACSQCGQPLFVYKLEQVSEKGKAYTNYFGRCNVAEHEKLILLAQLKPEKDSDEAVTYSLGKFGQRALDFYSIHVTKESTHPVKPLAQIAGNRYASPVGKALSDACMGTIASFLSKYQDIIIEHQKVVKGNQKRLESLRELAGKENLEYPSVTLPPQPHTKEGVDAYNEVIARVRMWVNLNLWQKLKLSRDDAKPLLRLKNFPSFPLVERQANEVDWWDMVCNVKKLINEKKEDGKVFWQNLAGYKRQEALRPYLSSEEDRKKGKKFARYQLGDLLLHLEKKHGEDWGKVYDEAWERIDKKVEGLSKHIKLEEERRSEDAQSKAALTDWLRAKASFVIEGLKEADKDEFCRCELKLQKWYGDLRGKPFAIEAENSILDISGFSKQYNCAFIWQKDGVKKLNLYLIINYFKGGKLRFKKIKPEAFEANRFYTVINKKSGEIVPMEVNFNFDDPNLIILPLAFGKRQGREFIWNDLLSLETGSLKLANGRVIEKTLYNRRTRQDEPALFVALTFERREVLDSSNIKPMNLIGVDRGENIPAVIALTDPEGCPLSRFKDSLGNPTHILRIGESYKEKQRTIQAKKEVEQRRAGGYSRKYASKAKNLADDMVRNTARDLLYYAVTQDAMLIFENLSRGFGRQGKRTFMAERQYTRMEDWLTAKLAYEGLPSKTYLSKTLAQYTSKTCSNCGFTITSADYDRVLEKLKKTATGWMTTINGKELKVEGQITYYNRYKRQNVVKDLSVELDRLSEESVNNDISSWTKGRSGEALSLLKKRFSHRPVQEKFVCLNCGFETHADEQAALNIARSWLFLRSQEYKKYQTNKTTGNTDKRAFVETWQSFYRKKLKEVWKPAV

SEQ ID NO: 42314 - protein, 978 aa, synthetic construct
  REGION 1..978: note = engineered CasX variant
QEIKRINKIRRRLVKDSNTKKAGKTGPMKTLLVRVMTPDLRERLENLRKKPPNIPQPISNTSRANLNKLLTDYTEMKKAILHVYWEEFQKDPVGLMSRVAQPASKKIDQNKLKPEMDEKGNLTTAGFACSQCGQPLFVYKLEQVSEKGKAYTNYFGRCNVAEHEKLILLAQLKPEKDSDEAVTYSLGKFGQRALDFYSIHVTKESTHPVKPLAQIAGNRYASYPVGKALSDACMGTIASFLSKYQDIIIEHQKVVKGNQKRLESLRELAGKENLEYPSVTLPPQPHTKEGVDAYNEVIARVRMWVNLNLWQKLKLSRDDAKPLLRLKGFPSFPLVERQANEVDWWDMVCNVKKLINEKKEDGKVFWQNLAGYKRQEALRPYLSSEEDRKKGKKFARYQLGDLLNHLEKKHGEDWGKVYDEAWERIDKKVEGLSKHIKLEEERRSEDAQSKAALTDWLRAKASFVIEGLKEADKDEFCRCELKLQKWYGDLRGKPFAIEAENSILDISGFSKQYNCAFIWQKDGVKKLNLYLIINYFKGGKLRFKKIKPEAFEANRFYTVINKKSGEIVPMEVNFNFDDPNLIILPLAFGKRQGREFIWNDLLSLETGSLKLANGRVIEKTLYNRRTRQDEPALFVALTFERREVLDSSNIKPMNLIGVDRGENIPAVIALTDPEGCPLSRFKDSLGNPTHILRIGESYKEKQRTIQAKKEVEQRRAGGYSRKYASKAKNLADDMVRNTARDLLYYAVTQDAMLIFENLSRGFGRQGKRTFMAERQYTRMEDWLTAKLAYEGLPSKTYLSKTLAQYTSKTCSNCGFTITSADYDRVLEKLKKTATGWMTTINGKELKVEGQITYYNRYKRQNVVKDLSVELDRLSEESVNNDISSWTKGRSGEALSLLKKRFSHRPVQEKFVCLNCGFETHADEQAALNIARSWLFLRSQEYKKYQTNKTTGNTDKRAFVETWQSFYRKKLKEVWKPAV

SEQ ID NO: 42315 - protein, 978 aa, synthetic construct
  REGION 1..978: note = engineered CasX variant
QEIKRINKIRRRLVKDSNTKKAGKTGPMKTLLVRVMTPDLRERLENLRKKPPNIPQPISNTSRANLNKLLTDYTEMKKAILHVYWEEFQKDPVGLMSRVAQPASKKIDQNKLKPEMDEKGNLTTAGFACSQCGQPLFVYKLEQVSEKGKAYTNYFGRCNVAEHEKLILLAQLKPEKDSDEAVTYSLGKFGQRALDFYSIHVTKESTHPVKPLAQIAGNRYASHPVGKALSDACMGTIASFLSKYQDIIIEHQKVVKGNQKRLESLRELAGKENLEYPSVTLPPQPHTKEGVDAYNEVIARVRMWVNLNLWQKLKLSRDDAKPLLRLKGFPSFPLVERQANEVDWWDMVCNVKKLINEKKEDGKVFWQNLAGYKRQEALRPYLSSEEDRKKGKKFARYQLGDLLNHLEKKHGEDWGKVYDEAWERIDKKVEGLSKHIKLEEERRSEDAQSKAALTDWLRAKASFVIEGLKEADKDEFCRCELKLQKWYGDLRGKPFAIEAENSILDISGFSKQYNCAFIWQKDGVKKLNLYLIINYFKGGKLRFKKIKPEAFEANRFYTVINKKSGEIVPMEVNFNFDDPNLIILPLAFGKRQGREFIWNDLLSLETGSLKLANGRVIEKTLYNRRTRQDEPALFVALTFERREVLDSSNIKPMNLIGVDRGENIPAVIALTDPEGCPLSRFKDSLGNPTHILRIGESYKEKQRTIQAKKEVEQRRAGGYSRKYASKAKNLADDMVRNTARDLLYYAVTQDAMLIFENLSRGFGRQGKRTFMAERQYTRMEDWLTAKLAYEGLPSKTYLSKTLAQYTSKTCSNCGFTITSADYDRVLEKLKKTATGWMTTINGKELKVEGQITYYNRYKRQNVVKDLSVELDRLSEESVNNDISSWTKGRSGEALSLLKKRFSHRPVQEKFVCLNCGFETHADEQAALNIARSWLFLRSQEYKKYQTNKTTGNTDKRAFVETWQSFYRKKLKEVWKPAV

SEQ ID NO: 42316 - protein, 978 aa, synthetic construct
  REGION 1..978: note = engineered CasX variant
QEIKRINKIRRRLVKDSNTKKAGKTGPMKTLLVRVMTPDLRERLENLRKKPPNIPQPISNTSRANLNKLLTDYTEMKKAILHVYWEEFQKDPVGLMSRVAQPASKKIDQNKLKPEMDEKGNLTTAGFACSQCGQPLFVYKLEQVSEKGKAYTNYFGRCNVAEHEKLILLAQLKPEKDSDEAVTYSLGKFGQRALDFYSIHVTKESTHPVKPLAQIAGNRYASSPVGKALSDACMGTIASFLSKYQDIIIEHQKVVKGNQKRLESLRELAGKENLEYPSVTLPPQPHTKEGVDAYNEVIARVRMWVNLNLWQKLKLSRDDAKPLLRLKGFPSFPLVERQANEVDWWDMVCNVKKLINEKKEDGKVFWQNLAGYKRQEALRPYLSSEEDRKKGKKFARYQLGDLLNHLEKKHGEDWGKVYDEAWERIDKKVEGLSKHIKLEEERRSEDAQSKAALTDWLRAKASFVIEGLKEADKDEFCRCELKLQKWYGDLRGKPFAIEAENSILDISGFSKQYNCAFIWQKDGVKKLNLYLIINYFKGGKLRFKKIKPEAFEANRFYTVINKKSGEIVPMEVNFNFDDPNLIILPLAFGKRQGREFIWNDLLSLETGSLKLANGRVIEKTLYNRRTRQDEPALFVALTFERREVLDSSNIKPMNLIGVDRGENIPAVIALTDPEGCPLSRFKDSLGNPTHILRIGESYKEKQRTIQAKKEVEQRRAGGYSRKYASKAKNLADDMVRNTARDLLYYAVTQDAMLIFENLSRGFGRQGKRTFMAERQYTRMEDWLTAKLAYEGLPSKTYLSKTLAQYTSKTCSNCGFTITSADYDRVLEKLKKTATGWMTTINGKELKVEGQITYYNRYKRQNVVKDLSVELDRLSEESVNNDISSWTKGRSGEALSLLKKRFSHRPVQEKFVCLNCGFETHADEQAALNIARSWLFLRSQEYKKYQTNKTTGNTDKRAFVETWQSFYRKKLKEVWKPAV

SEQ ID NO: 42317 - protein, 978 aa, synthetic construct
  REGION 1..978: note = engineered CasX variant
QEIKRINKIRRRLVKDSNTKKAGKTGPMKTLLVRVMTPDLRERLENLRKKPPNIPQPISNTSRANLNKLLTDYTEMKKAILHVYWEEFQKDPVGLMSRVAQPASKKIDQNKLKPEMDEKGNLTTAGFACSQCGQPLFVYKLEQVSEKGKAYTNYFGRCNVAEHEKLILLAQLKPEKDSDEAVTYSLGKFGQRALDFYSIHVTKESTHPVKPLAQIAGNRYASTPVGKALSDACMGTIASFLSKYQDIIIEHQKVVKGNQKRLESLRELAGKENLEYPSVTLPPQPHTKEGVDAYNEVIARVRMWVNLNLWQKLKLSRDDAKPLLRLKGFPSFPLVERQANEVDWWDMVCNVKKLINEKKEDGKVFWQNLAGYKRQEALRPYLSSEEDRKKGKKFARYQLGDLLNHLEKKHGEDWGKVYDEAWERIDKKVEGLSKHIKLEEERRSEDAQSKAALTDWLRAKASFVIEGLKEADKDEFCRCELKLQKWYGDLRGKPFAIEAENSILDISGFSKQYNCAFIWQKDGVKKLNLYLIINYFKGGKLRFKKIKPEAFEANRFYTVINKKSGEIVPMEVNFNFDDPNLIILPLAFGKRQGREFIWNDLLSLETGSLKLANGRVIEKTLYNRRTRQDEPALFVALTFERREVLDSSNIKPMNLIGVDRGENIPAVIALTDPEGCPLSRFKDSLGNPTHILRIGESYKEKQRTIQAKKEVEQRRAGGYSRKYASKAKNLADDMVRNTARDLLYYAVTQDAMLIFENLSRGFGRQGKRTFMAERQYTRMEDWLTAKLAYEGLPSKTYLSKTLAQYTSKTCSNCGFTITSADYDRVLEKLKKTATGWMTTINGKELKVEGQITYYNRYKRQNVVKDLSVELDRLSEESVNNDISSWTKGRSGEALSLLKKRFSHRPVQEKFVCLNCGFETHADEQAALNIARSWLFLRSQEYKKYQTNKTTGNTDKRAFVETWQSFYRKKLKEVWKPAV

SEQ ID NO: 42318 - protein, 978 aa, synthetic construct
  REGION 1..978: note = engineered CasX variant
QEIKRINKIRRRLVKDSNTKKAGKTGPMKTLLVRVMTPDLRERLENLRKKPPNIPQPISNTSRANLNKLLTDYTEMKKAILHVYWEEFQKDPVGLMSRVAQPASKKIDQNKLKPEMDEKGNLTTAGFACSQCGQPLFVYKLEQVSEKGKAYTNYFGRCNVAEHEKLILLAQLKPEKDSDEAVTYSLGKFGQRALDFYSIHVTKESTHPVKPLAQIAGNRYASAPVGKALSDACMGTIASFLSKYQDIIIEHQKVVKGNQKRLESLRELAGKENLEYPSVTLPPQPHTKEGVDAYNEVIARVRMWVNLNLWQKLKLSRDDAKPLLRLKGFPSFPLVERQANEVDWWDMVCNVKKLINEKKEDGKVFWQNLAGYKRQEALRPYLSSEEDRKKGKKFARYQLGDLLNHLEKKHGEDWGKVYDEAWERIDKKVEGLSKHIKLEEERRSEDAQSKAALTDWLRAKASFVIEGLKEADKDEFCRCELKLQKWYGDLRGKPFAIEAENSILDISGFSKQYNCAFIWQKDGVKKLNLYLIINYFKGGKLRFKKIKPEAFEANRFYTVINKKSGEIVPMEVNFNFDDPNLIILPLAFGKRQGREFIWNDLLSLETGSLKLANGRVIEKTLYNRRTRQDEPALFVALTFERREVLDSSNIKPMNLIGVDRGENIPAVIALTDPEGCPLSRFKDSLGNPTHILRIGESYKEKQRTIQAKKEVEQRRAGGYSRKYASKAKNLADDMVRNTARDLLYYAVTQDAMLIFENLSRGFGRQGKRTFMAERQYTRMEDWLTAKLAYEGLPSKTYLSKTLAQYTSKTCSNCGFTITSADYDRVLEKLKKTATGWMTTINGKELKVEGQITYYNRYKRQNVVKDLSVELDRLSEESVNNDISSWTKGRSGEALSLLKKRFSHRPVQEKFVCLNCGFETHADEQAALNIARSWLFLRSQEYKKYQTNKTTGNTDKRAFVETWQSFYRKKLKEVWKPAV

SEQ ID NO: 42319 - protein, 978 aa, synthetic construct
  REGION 1..978: note = engineered CasX variant
QEIKRINKIRRRLVKDSNTKKAGKTGPMKTLLVRVMTPDLRERLENLRKKPPNIPQPISNTSRANLNKLLTDYTEMKKAILHVYWEEFQKDPVGLMSRVAQPASKKIDQNKLKPEMDEKGNLTTAGFACSQCGQPLFVYKLEQVSEKGKAYTNYFGRCNVAEHEKLILLAQLKPEKDSDEAVTYSLGKFGQRALDFYSIHVTKESTHPVKPLAQIAGNRYASVPVGKALSDACMGTIASFLSKYQDIIIEHQKVVKGNQKRLESLRELAGKENLEYPSVTLPPQPHTKEGVDAYNEVIARVRMWVNLNLWQKLKLSRDDAKPLLRLKGFPSFPLVERQANEVDWWDMVCNVKKLINEKKEDGKVFWQNLAGYKRQEALRPYLSSEEDRKKGKKFARYQLGDLLNHLEKKHGEDWGKVYDEAWERIDKKVEGLSKHIKLEEERRSEDAQSKAALTDWLRAKASFVIEGLKEADKDEFCRCELKLQKWYGDLRGKPFAIEAENSILDISGFSKQYNCAFIWQKDGVKKLNLYLIINYFKGGKLRFKKIKPEAFEANRFYTVINKKSGEIVPMEVNFNFDDPNLIILPLAFGKRQGREFIWNDLLSLETGSLKLANGRVIEKTLYNRRTRQDEPALFVALTFERREVLDSSNIKPMNLIGVDRGENIPAVIALTDPEGCPLSRFKDSLGNPTHILRIGESYKEKQRTIQAKKEVEQRRAGGYSRKYASKAKNLADDMVRNTARDLLYYAVTQDAMLIFENLSRGFGRQGKRTFMAERQYTRMEDWLTAKLAYEGLPSKTYLSKTLAQYTSKTCSNCGFTITSADYDRVLEKLKKTATGWMTTINGKELKVEGQITYYNRYKRQNVVKDLSVELDRLSEESVNNDISSWTKGRSGEALSLLKKRFSHRPVQEKFVCLNCGFETHADEQAALNIARSWLFLRSQEYKKYQTNKTTGNTDKRAFVETWQSFYRKKLKEVWKPAV

SEQ ID NO: 42320 - protein, 978 aa, synthetic construct
  REGION 1..978: note = engineered CasX variant
QEIKRINKIRRRLVKDSNTKKAGKTGPMKTLLVRVMTPDLRERLENLRKKPPNIPQPISNTSRANLNKLLTDYTEMKKAILHVYWEEFQKDPVGLMSRVAQPASKKIDQNKLKPEMDEKGNLTTAGFACSQCGQPLFVYKLEQVSEKGKAYTNYFGRCNVAEHEKLIKLAQLKPEKDSDEAVTYSLGKFGQRALDFYSIHVTKESTHPVKPLAQIAGNRYASGPVGKALSDACMGTIASFLSKYQDIIIEHQKVVKGNQKRLESLRELAGKENLEYPSVTLPPQPHTKEGVDAYNEVIARVRMWVNLNLWQKLKLSRDDAKPLLRLKGFPSFPLVERQANEVDWWDMVCNVKKLINEKKEDGKVFWQNLAGYKRQEALRPYLSSEEDRKKGKKFARYQLGDLLNHLEKKHGEDWGKVYDEAWERIDKKVEGLSKHIKLEEERRSEDAQSKAALTDWLRAKASFVIEGLKEADKDEFCRCELKLQKWYGDLRGKPFAIEAENSILDISGFSKQYNCAFIWQKDGVKKLNLYLIINYFKGGKLRFKKIKPEAFEANRFYTVINKKSGEIVPMEVNFNFDDPNLIILPLAFGKRQGREFIWNDLLSLETGSLKLANGRVIEKTLYNRRTRQDEPALFVALTFERREVLDSSNIKPMNLIGVDRGENIPAVIALTDPEGCPLSRFKDSLGNPTHILRIGESYKEKQRTIQAKKEVEQRRAGGYSRKYASKAKNLADDMVRNTARDLLYYAVTQDAMLIFENLSRGFGRQGKRTFMAERQYTRMEDWLTAKLAYEGLPSKTYLSKTLAQYTSKTCSNCGFTITSADYDRVLEKLKKTATGWMTTINGKELKVEGQITYYNRYKRQNVVKDLSVELDRLSEESVNNDISSWTKGRSGEALSLLKKRFSHRPVQEKFVCLNCGFETHADEQAALNIARSWLFLRSQEYKKYQTNKTTGNTDKRAFVETWQSFYRKKLKEVWKPAV

SEQ ID NO: 42321 - protein, 977 aa, synthetic construct
  REGION 1..977: note = engineered CasX variant
QEIKRINKIRRRLVKDSNTKKAGKTGPMKTLLVRVMTPDLRERLENLRKKPPNIPQPISNTSRANLNKLLTDYTEMKKAILHVYWEEFQKDPVGLMSRVAQPASKKIDQNKLKPEMDEKGNLTTAGFACSQCGQPLFVYKLEQVSEKGKAYTNYFGRCNVAEHEKLILLAQLKPEKDSDEAVTYSLGKFGQRALDFYSIHVTKESTHPVKPLAQIAGNRYASPVGKALSDACMGTIASFLSKYQDIIIEHQKVVKGNQKRLESLRELAGKENLEYPSVTLPPQPHTKEGVDAYNEVIARVRMWVNLNLWQKLKLSRDDAKPLLRLKGFPSFPLVERQANEVDWWDMVCNVKKLINEKKEDGKVFWQNLAGYKRQEALRPYLSSEEDRKKGKKFARYQLGDLLNHLEKKHGEDWGKVYDEAWERIDKKVEGLSKHIKLEEERRSEDAQSKAALTDWLRAKASFVIEGLKEADKDEFCRCELKLQKWYGDLRGKPFAIEAENSILDISGFSKQYNCAFIWQKDGVKKLNLYLIINYFKGGKLRFKKIKPEAFEANRFYTVINKKSGEIVPMEVNFNFDDPNLIILPLAFGKRQGREFIWNDLLSLETGSLKLANGRVIEKTLYNRRTRQDEPALFVALTFERREVLDSSNIKPMNLIGVDRGENIPAVIALTDPEGCPLSRFKDSLGNPTHILRIGESYKEKQRTIQAKKEVEQRRAGGYSRKYASKAKNLADDMVRNTARDLLYYAVTQDAMLIFENLSRGFGRQGKRTFMAERQYTRMEDWLTAKLAYEGLPSKTYLSKTLAQYTSKTCSNCGFTITSADYDRVLEKLKKTATGWMTTINGKELKVEGQITYYNRYKRQNVVKDLSVELDRLSEESVNNDISSWTKGRSGEALSLLKKRFSHRPVQEKFVCLNCGFETHADEQAALNIARSWLFLRSQEYKKYQTNKTTGNTDKRAFVETWQSFYRKKLKEVWKPAV

SEQ ID NO: 42322 - protein, 978 aa, synthetic construct
  REGION 1..978: note = engineered CasX variant
QEIKRINKIRRRLVKDSNTKKAGKTGPMKTLLVRVMTPDLRERLENLRKKPPNIPQPISNTSRANLNKLLTDYTEMKKAILHVYWEEFQKDPVGLMSRVAQPASKKIDQNKLKPEMDEKGNLTTAGFACSQCGQPLFVYKLEQVSEKGKAYTNYFGRCNVAEHEKLILLAQLKPEKDSDEAVTYSLGKFGQRALDFYSIHVTKESTHPVKPLAQIAGNRYASYPVGKALSDACMGTIASFLSKYQDIIIEHQKVVKGNQKRLESLRELAGKENLEYPSVTLPPQPHTKEGVDAYNEVIARVRMWVNLNLWQKLKLSRDDAKPLLRLKGFPSFPLVERQANEVDWWDMVCNVKKLINEKKEDGKVFWQNLAGYKRQEALRPYLSSEEDRKKGKKFARYQLGDLLWHLEKKHGEDWGKVYDEAWERIDKKVEGLSKHIKLEEERRSEDAQSKAALTDWLRAKASFVIEGLKEADKDEFCRCELKLQKWYGDLRGKPFAIEAENSILDISGFSKQYNCAFIWQKDGVKKLNLYLIINYFKGGKLRFKKIKPEAFEANRFYTVINKKSGEIVPMEVNFNFDDPNLIILPLAFGKRQGREFIWNDLLSLETGSLKLANGRVIEKTLYNRRTRQDEPALFVALTFERREVLDSSNIKPMNLIGVDRGENIPAVIALTDPEGCPLSRFKDSLGNPTHILRIGESYKEKQRTIQAKKEVEQRRAGGYSRKYASKAKNLADDMVRNTARDLLYYAVTQDAMLIFENLSRGFGRQGKRTFMAERQYTRMEDWLTAKLAYEGLPSKTYLSKTLAQYTSKTCSNCGFTITSADYDRVLEKLKKTATGWMTTINGKELKVEGQITYYNRYKRQNVVKDLSVELDRLSEESVNNDISSWTKGRSGEALSLLKKRFSHRPVQEKFVCLNCGFETHADEQAALNIARSWLFLRSQEYKKYQTNKTTGNTDKRAFVETWQSFYRKKLKEVWKPAV

SEQ ID NO: 42323 - protein, 978 aa, synthetic construct
  REGION 1..978: note = engineered CasX variant
QEIKRINKIRRRLVKDSNTKKAGKTGPMKTLLVRVMTPDLRERLENLRKKPPNIPQPISNTSRANLNKLLTDYTEMKKAILHVYWEEFQKDPVGLMSRVAQPASKKIDQNKLKPEMDEKGNLTTAGFACSQCGQPLFVYKLEQVSEKGKAYTNYFGRCNVAEHEKLILLAQLKPEKDSDEAVTYSLGKFGQRALDFYSIHVTKESTHPVKPLAQIAGNRYASHPVGKALSDACMGTIASFLSKYQDIIIEHQKVVKGNQKRLESLRELAGKENLEYPSVTLPPQPHTKEGVDAYNEVIARVRMWVNLNLWQKLKLSRDDAKPLLRLKGFPSFPLVERQANEVDWWDMVCNVKKLINEKKEDGKVFWQNLAGYKRQEALRPYLSSEEDRKKGKKFARYQLGDLLWHLEKKHGEDWGKVYDEAWERIDKKVEGLSKHIKLEEERRSEDAQSKAALTDWLRAKASFVIEGLKEADKDEFCRCELKLQKWYGDLRGKPFAIEAENSILDISGFSKQYNCAFIWQKDGVKKLNLYLIINYFKGGKLRFKKIKPEAFEANRFYTVINKKSGEIVPMEVNFNFDDPNLIILPLAFGKRQGREFIWNDLLSLETGSLKLANGRVIEKTLYNRRTRQDEPALFVALTFERREVLDSSNIKPMNLIGVDRGENIPAVIALTDPEGCPLSRFKDSLGNPTHILRIGESYKEKQRTIQAKKEVEQRRAGGYSRKYASKAKNLADDMVRNTARDLLYYAVTQDAMLIFENLSRGFGRQGKRTFMAERQYTRMEDWLTAKLAYEGLPSKTYLSKTLAQYTSKTCSNCGFTITSADYDRVLEKLKKTATGWMTTINGKELKVEGQITYYNRYKRQNVVKDLSVELDRLSEESVNNDISSWTKGRSGEALSLLKKRFSHRPVQEKFVCLNCGFETHADEQAALNIARSWLFLRSQEYKKYQTNKTTGNTDKRAFVETWQSFYRKKLKEVWKPAV

SEQ ID NO: 42324 - protein, 978 aa, synthetic construct
  REGION 1..978: note = engineered CasX variant
QEIKRINKIRRRLVKDSNTKKAGKTGPMKTLLVRVMTPDLRERLENLRKKPPNIPQPISNTSRANLNKLLTDYTEMKKAILHVYWEEFQKDPVGLMSRVAQPASKKIDQNKLKPEMDEKGNLTTAGFACSQCGQPLFVYKLEQVSEKGKAYTNYFGRCNVAEHEKLILLAQLKPEKDSDEAVTYSLGKFGQRALDFYSIHVTKESTHPVKPLAQIAGNRYASSPVGKALSDACMGTIASFLSKYQDIIIEHQKVVKGNQKRLESLRELAGKENLEYPSVTLPPQPHTKEGVDAYNEVIARVRMWVNLNLWQKLKLSRDDAKPLLRLKGFPSFPLVERQANEVDWWDMVCNVKKLINEKKEDGKVFWQNLAGYKRQEALRPYLSSEEDRKKGKKFARYQLGDLLWHLEKKHGEDWGKVYDEAWERIDKKVEGLSKHIKLEEERRSEDAQSKAALTDWLRAKASFVIEGLKEADKDEFCRCELKLQKWYGDLRGKPFAIEAENSILDISGFSKQYNCAFIWQKDGVKKLNLYLIINYFKGGKLRFKKIKPEAFEANRFYTVINKKSGEIVPMEVNFNFDDPNLIILPLAFGKRQGREFIWNDLLSLETGSLKLANGRVIEKTLYNRRTRQDEPALFVALTFERREVLDSSNIKPMNLIGVDRGENIPAVIALTDPEGCPLSRFKDSLGNPTHILRIGESYKEKQRTIQAKKEVEQRRAGGYSRKYASKAKNLADDMVRNTARDLLYYAVTQDAMLIFENLSRGFGRQGKRTFMAERQYTRMEDWLTAKLAYEGLPSKTYLSKTLAQYTSKTCSNCGFTITSADYDRVLEKLKKTATGWMTTINGKELKVEGQITYYNRYKRQNVVKDLSVELDRLSEESVNNDISSWTKGRSGEALSLLKKRFSHRPVQEKFVCLNCGFETHADEQAALNIARSWLFLRSQEYKKYQTNKTTGNTDKRAFVETWQSFYRKKLKEVWKPAV

SEQ ID NO: 42325 - protein, 978 aa, synthetic construct
  REGION 1..978: note = engineered CasX variant
QEIKRINKIRRRLVKDSNTKKAGKTGPMKTLLVRVMTPDLRERLENLRKKPPNIPQPISNTSRANLNKLLTDYTEMKKAILHVYWEEFQKDPVGLMSRVAQPASKKIDQNKLKPEMDEKGNLTTAGFACSQCGQPLFVYKLEQVSEKGKAYTNYFGRCNVAEHEKLILLAQLKPEKDSDEAVTYSLGKFGQRALDFYSIHVTKESTHPVKPLAQIAGNRYASTPVGKALSDACMGTIASFLSKYQDIIIEHQKVVKGNQKRLESLRELAGKENLEYPSVTLPPQPHTKEGVDAYNEVIARVRMWVNLNLWQKLKLSRDDAKPLLRLKGFPSFPLVERQANEVDWWDMVCNVKKLINEKKEDGKVFWQNLAGYKRQEALRPYLSSEEDRKKGKKFARYQLGDLLWHLEKKHGEDWGKVYDEAWERIDKKVEGLSKHIKLEEERRSEDAQSKAALTDWLRAKASFVIEGLKEADKDEFCRCELKLQKWYGDLRGKPFAIEAENSILDISGFSKQYNCAFIWQKDGVKKLNLYLIINYFKGGKLRFKKIKPEAFEANRFYTVINKKSGEIVPMEVNFNFDDPNLIILPLAFGKRQGREFIWNDLLSLETGSLKLANGRVIEKTLYNRRTRQDEPALFVALTFERREVLDSSNIKPMNLIGVDRGENIPAVIALTDPEGCPLSRFKDSLGNPTHILRIGESYKEKQRTIQAKKEVEQRRAGGYSRKYASKAKNLADDMVRNTARDLLYYAVTQDAMLIFENLSRGFGRQGKRTFMAERQYTRMEDWLTAKLAYEGLPSKTYLSKTLAQYTSKTCSNCGFTITSADYDRVLEKLKKTATGWMTTINGKELKVEGQITYYNRYKRQNVVKDLSVELDRLSEESVNNDISSWTKGRSGEALSLLKKRFSHRPVQEKFVCLNCGFETHADEQAALNIARSWLFLRSQEYKKYQTNKTTGNTDKRAFVETWQSFYRKKLKEVWKPAV

SEQ ID NO: 42326 - protein, 978 aa, synthetic construct
  REGION 1..978: note = engineered CasX variant
QEIKRINKIRRRLVKDSNTKKAGKTGPMKTLLVRVMTPDLRERLENLRKKPPNIPQPISNTSRANLNKLLTDYTEMKKAILHVYWEEFQKDPVGLMSRVAQPASKKIDQNKLKPEMDEKGNLTTAGFACSQCGQPLFVYKLEQVSEKGKAYTNYFGRCNVAEHEKLILLAQLKPEKDSDEAVTYSLGKFGQRALDFYSIHVTKESTHPVKPLAQIAGNRYASAPVGKALSDACMGTIASFLSKYQDIIIEHQKVVKGNQKRLESLRELAGKENLEYPSVTLPPQPHTKEGVDAYNEVIARVRMWVNLNLWQKLKLSRDDAKPLLRLKGFPSFPLVERQANEVDWWDMVCNVKKLINEKKEDGKVFWQNLAGYKRQEALRPYLSSEEDRKKGKKFARYQLGDLLWHLEKKHGEDWGKVYDEAWERIDKKVEGLSKHIKLEEERRSEDAQSKAALTDWLRAKASFVIEGLKEADKDEFCRCELKLQKWYGDLRGKPFAIEAENSILDISGFSKQYNCAFIWQKDGVKKLNLYLIINYFKGGKLRFKKIKPEAFEANRFYTVINKKSGEIVPMEVNFNFDDPNLIILPLAFGKRQGREFIWNDLLSLETGSLKLANGRVIEKTLYNRRTRQDEPALFVALTFERREVLDSSNIKPMNLIGVDRGENIPAVIALTDPEGCPLSRFKDSLGNPTHILRIGESYKEKQRTIQAKKEVEQRRAGGYSRKYASKAKNLADDMVRNTARDLLYYAVTQDAMLIFENLSRGFGRQGKRTFMAERQYTRMEDWLTAKLAYEGLPSKTYLSKTLAQYTSKTCSNCGFTITSADYDRVLEKLKKTATGWMTTINGKELKVEGQITYYNRYKRQNVVKDLSVELDRLSEESVNNDISSWTKGRSGEALSLLKKRFSHRPVQEKFVCLNCGFETHADEQAALNIARSWLFLRSQEYKKYQTNKTTGNTDKRAFVETWQSFYRKKLKEVWKPAV

SEQ ID NO: 42327 - protein, 978 aa, synthetic construct
  REGION 1..978: note = engineered CasX variant
QEIKRINKIRRRLVKDSNTKKAGKTGPMKTLLVRVMTPDLRERLENLRKKPPNIPQPISNTSRANLNKLLTDYTEMKKAILHVYWEEFQKDPVGLMSRVAQPASKKIDQNKLKPEMDEKGNLTTAGFACSQCGQPLFVYKLEQVSEKGKAYTNYFGRCNVAEHEKLILLAQLKPEKDSDEAVTYSLGKFGQRALDFYSIHVTKESTHPVKPLAQIAGNRYASVPVGKALSDACMGTIASFLSKYQDIIIEHQKVVKGNQKRLESLRELAGKENLEYPSVTLPPQPHTKEGVDAYNEVIARVRMWVNLNLWQKLKLSRDDAKPLLRLKGFPSFPLVERQANEVDWWDMVCNVKKLINEKKEDGKVFWQNLAGYKRQEALRPYLSSEEDRKKGKKFARYQLGDLLWHLEKKHGEDWGKVYDEAWERIDKKVEGLSKHIKLEEERRSEDAQSKAALTDWLRAKASFVIEGLKEADKDEFCRCELKLQKWYGDLRGKPFAIEAENSILDISGFSKQYNCAFIWQKDGVKKLNLYLIINYFKGGKLRFKKIKPEAFEANRFYTVINKKSGEIVPMEVNFNFDDPNLIILPLAFGKRQGREFIWNDLLSLETGSLKLANGRVIEKTLYNRRTRQDEPALFVALTFERREVLDSSNIKPMNLIGVDRGENIPAVIALTDPEGCPLSRFKDSLGNPTHILRIGESYKEKQRTIQAKKEVEQRRAGGYSRKYASKAKNLADDMVRNTARDLLYYAVTQDAMLIFENLSRGFGRQGKRTFMAERQYTRMEDWLTAKLAYEGLPSKTYLSKTLAQYTSKTCSNCGFTITSADYDRVLEKLKKTATGWMTTINGKELKVEGQITYYNRYKRQNVVKDLSVELDRLSEESVNNDISSWTKGRSGEALSLLKKRFSHRPVQEKFVCLNCGFETHADEQAALNIARSWLFLRSQEYKKYQTNKTTGNTDKRAFVETWQSFYRKKLKEVWKPAV

SEQ ID NO: 42328 - protein, 978 aa, synthetic construct
  REGION 1..978: note = engineered CasX variant
QEIKRINKIRRRLVKDSNTKKAGKTGPMKTLLVRVMTPDLRERLENLRKKPPNIPQPISNTSRANLNKLLTDYTEMKKAILHVYWEEFQKDPVGLMSRVAQPASKKIDQNKLKPEMDEKGNLTTAGFACSQCGQPLFVYKLEQVSEKGKAYTNYFGRCNVAEHEKLIKLAQLKPEKDSDEAVTYSLGKFGQRALDFYSIHVTKESTHPVKPLAQIAGNRYASGPVGKALSDACMGTIASFLSKYQDIIIEHQKVVKGNQKRLESLRELAGKENLEYPSVTLPPQPHTKEGVDAYNEVIARVRMWVNLNLWQKLKLSRDDAKPLLRLKGFPSFPLVERQANEVDWWDMVCNVKKLINEKKEDGKVFWQNLAGYKRQEALRPYLSSEEDRKKGKKFARYQLGDLLWHLEKKHGEDWGKVYDEAWERIDKKVEGLSKHIKLEEERRSEDAQSKAALTDWLRAKASFVIEGLKEADKDEFCRCELKLQKWYGDLRGKPFAIEAENSILDISGFSKQYNCAFIWQKDGVKKLNLYLIINYFKGGKLRFKKIKPEAFEANRFYTVINKKSGEIVPMEVNFNFDDPNLIILPLAFGKRQGREFIWNDLLSLETGSLKLANGRVIEKTLYNRRTRQDEPALFVALTFERREVLDSSNIKPMNLIGVDRGENIPAVIALTDPEGCPLSRFKDSLGNPTHILRIGESYKEKQRTIQAKKEVEQRRAGGYSRKYASKAKNLADDMVRNTARDLLYYAVTQDAMLIFENLSRGFGRQGKRTFMAERQYTRMEDWLTAKLAYEGLPSKTYLSKTLAQYTSKTCSNCGFTITSADYDRVLEKLKKTATGWMTTINGKELKVEGQITYYNRYKRQNVVKDLSVELDRLSEESVNNDISSWTKGRSGEALSLLKKRFSHRPVQEKFVCLNCGFETHADEQAALNIARSWLFLRSQEYKKYQTNKTTGNTDKRAFVETWQSFYRKKLKEVWKPAV

SEQ ID NO: 42329 - protein, 977 aa, synthetic construct
  REGION 1..977: note = engineered CasX variant
QEIKRINKIRRRLVKDSNTKKAGKTGPMKTLLVRVMTPDLRERLENLRKKPPNIPQPISNTSRANLNKLLTDYTEMKKAILHVYWEEFQKDPVGLMSRVAQPASKKIDQNKLKPEMDEKGNLTTAGFACSQCGQPLFVYKLEQVSEKGKAYTNYFGRCNVAEHEKLILLAQLKPEKDSDEAVTYSLGKFGQRALDFYSIHVTKESTHPVKPLAQIAGNRYASPVGKALSDACMGTIASFLSKYQDIIIEHQKVVKGNQKRLESLRELAGKENLEYPSVTLPPQPHTKEGVDAYNEVIARVRMWVNLNLWQKLKLSRDDAKPLLRLKGFPSFPLVERQANEVDWWDMVCNVKKLINEKKEDGKVFWQNLAGYKRQEALRPYLSSEEDRKKGKKFARYQLGDLLWHLEKKHGEDWGKVYDEAWERIDKKVEGLSKHIKLEEERRSEDAQSKAALTDWLRAKASFVIEGLKEADKDEFCRCELKLQKWYGDLRGKPFAIEAENSILDISGFSKQYNCAFIWQKDGVKKLNLYLIINYFKGGKLRFKKIKPEAFEANRFYTVINKKSGEIVPMEVNFNFDDPNLIILPLAFGKRQGREFIWNDLLSLETGSLKLANGRVIEKTLYNRRTRQDEPALFVALTFERREVLDSSNIKPMNLIGVDRGENIPAVIALTDPEGCPLSRFKDSLGNPTHILRIGESYKEKQRTIQAKKEVEQRRAGGYSRKYASKAKNLADDMVRNTARDLLYYAVTQDAMLIFENLSRGFGRQGKRTFMAERQYTRMEDWLTAKLAYEGLPSKTYLSKTLAQYTSKTCSNCGFTITSADYDRVLEKLKKTATGWMTTINGKELKVEGQITYYNRYKRQNVVKDLSVELDRLSEESVNNDISSWTKGRSGEALSLLKKRFSHRPVQEKFVCLNCGFETHADEQAALNIARSWLFLRSQEYKKYQTNKTTGNTDKRAFVETWQSFYRKKLKEVWKPAV

SEQ ID NO: 42330 - protein, 978 aa, synthetic construct
  REGION 1..978: note = engineered CasX variant
QEIKRINKIRRRLVKDSNTKKAGKTGPMKTLLVRVMTPDLRERLENLRKKPPNIPQPISNTSRANLNKLLTDYTEMKKAILHVYWEEFQKDPVGLMSRVAQPASKKIDQNKLKPEMDEKGNLTTAGFACSQCGQPLFVYKLEQVSEKGKAYTNYFGRCNVAEHEKLILLAQLKPEKDSDEAVTYSLGKFGQRALDFYSIHVTKESTHPVKPLAQIAGNRYASYPVGKALSDACMGTIASFLSKYQDIIIEHQKVVKGNQKRLESLRELAGKENLEYPSVTLPPQPHTKEGVDAYNEVIARVRMWVNLNLWQKLKLSRDDAKPLLRLKGFPSFPLVERQANEVDWWDMVCNVKKLINEKKEDGKVFWQNLAGYKRQEALRPYLSSEEDRKKGKKFARYQLGDLLLHLYKKHGEDWGKVYDEAWERIDKKVEGLSKHIKLEEERRSEDAQSKAALTDWLRAKASFVIEGLKEADKDEFCRCELKLQKWYGDLRGKPFAIEAENSILDISGFSKQYNCAFIWQKDGVKKLNLYLIINYFKGGKLRFKKIKPEAFEANRFYTVINKKSGEIVPMEVNFNFDDPNLIILPLAFGKRQGREFIWNDLLSLETGSLKLANGRVIEKTLYNRRTRQDEPALFVALTFERREVLDSSNIKPMNLIGVDRGENIPAVIALTDPEGCPLSRFKDSLGNPTHILRIGESYKEKQRTIQAKKEVEQRRAGGYSRKYASKAKNLADDMVRNTARDLLYYAVTQDAMLIFENLSRGFGRQGKRTFMAERQYTRMEDWLTAKLAYEGLPSKTYLSKTLAQYTSKTCSNCGFTITSADYDRVLEKLKKTATGWMTTINGKELKVEGQITYYNRYKRQNVVKDLSVELDRLSEESVNNDISSWTKGRSGEALSLLKKRFSHRPVQEKFVCLNCGFETHADEQAALNIARSWLFLRSQEYKKYQTNKTTGNTDKRAFVETWQSFYRKKLKEVWKPAV

SEQ ID NO: 42331 - protein, 978 aa, synthetic construct
  REGION 1..978: note = engineered CasX variant
QEIKRINKIRRRLVKDSNTKKAGKTGPMKTLLVRVMTPDLRERLENLRKKPPNIPQPISNTSRANLNKLLTDYTEMKKAILHVYWEEFQKDPVGLMSRVAQPASKKIDQNKLKPEMDEKGNLTTAGFACSQCGQPLFVYKLEQVSEKGKAYTNYFGRCNVAEHEKLILLAQLKPEKDSDEAVTYSLGKFGQRALDFYSIHVTKESTHPVKPLAQIAGNRYASHPVGKALSDACMGTIASFLSKYQDIIIEHQKVVKGNQKRLESLRELAGKENLEYPSVTLPPQPHTKEGVDAYNEVIARVRMWVNLNLWQKLKLSRDDAKPLLRLKGFPSFPLVERQANEVDWWDMVCNVKKLINEKKEDGKVFWQNLAGYKRQEALRPYLSSEEDRKKGKKFARYQLGDLLLHLYKKHGEDWGKVYDEAWERIDKKVEGLSKHIKLEEERRSEDAQSKAALTDWLRAKASFVIEGLKEADKDEFCRCELKLQKWYGDLRGKPFAIEAENSILDISGFSKQYNCAFIWQKDGVKKLNLYLIINYFKGGKLRFKKIKPEAFEANRFYTVINKKSGEIVPMEVNFNFDDPNLIILPLAFGKRQGREFIWNDLLSLETGSLKLANGRVIEKTLYNRRTRQDEPALFVALTFERREVLDSSNIKPMNLIGVDRGENIPAVIALTDPEGCPLSRFKDSLGNPTHILRIGESYKEKQRTIQAKKEVEQRRAGGYSRKYASKAKNLADDMVRNTARDLLYYAVTQDAMLIFENLSRGFGRQGKRTFMAERQYTRMEDWLTAKLAYEGLPSKTYLSKTLAQYTSKTCSNCGFTITSADYDRVLEKLKKTATGWMTTINGKELKVEGQITYYNRYKRQNVVKDLSVELDRLSEESVNNDISSWTKGRSGEALSLLKKRFSHRPVQEKFVCLNCGFETHADEQAALNIARSWLFLRSQEYKKYQTNKTTGNTDKRAFVETWQSFYRKKLKEVWKPAV

SEQ ID NO: 42332 - protein, 978 aa, synthetic construct
  REGION 1..978: note = engineered CasX variant
QEIKRINKIRRRLVKDSNTKKAGKTGPMKTLLVRVMTPDLRERLENLRKKPPNIPQPISNTSRANLNKLLTDYTEMKKAILHVYWEEFQKDPVGLMSRVAQPASKKIDQNKLKPEMDEKGNLTTAGFACSQCGQPLFVYKLEQVSEKGKAYTNYFGRCNVAEHEKLILLAQLKPEKDSDEAVTYSLGKFGQRALDFYSIHVTKESTHPVKPLAQIAGNRYASSPVGKALSDACMGTIASFLSKYQDIIIEHQKVVKGNQKRLESLRELAGKENLEYPSVTLPPQPHTKEGVDAYNEVIARVRMWVNLNLWQKLKLSRDDAKPLLRLKGFPSFPLVERQANEVDWWDMVCNVKKLINEKKEDGKVFWQNLAGYKRQEALRPYLSSEEDRKKGKKFARYQLGDLLLHLYKKHGEDWGKVYDEAWERIDKKVEGLSKHIKLEEERRSEDAQSKAALTDWLRAKASFVIEGLKEADKDEFCRCELKLQKWYGDLRGKPFAIEAENSILDISGFSKQYNCAFIWQKDGVKKLNLYLIINYFKGGKLRFKKIKPEAFEANRFYTVINKKSGEIVPMEVNFNFDDPNLIILPLAFGKRQGREFIWNDLLSLETGSLKLANGRVIEKTLYNRRTRQDEPALFVALTFERREVLDSSNIKPMNLIGVDRGENIPAVIALTDPEGCPLSRFKDSLGNPTHILRIGESYKEKQRTIQAKKEVEQRRAGGYSRKYASKAKNLADDMVRNTARDLLYYAVTQDAMLIFENLSRGFGRQGKRTFMAERQYTRMEDWLTAKLAYEGLPSKTYLSKTLAQYTSKTCSNCGFTITSADYDRVLEKLKKTATGWMTTINGKELKVEGQITYYNRYKRQNVVKDLSVELDRLSEESVNNDISSWTKGRSGEALSLLKKRFSHRPVQEKFVCLNCGFETHADEQAALNIARSWLFLRSQEYKKYQTNKTTGNTDKRAFVETWQSFYRKKLKEVWKPAV

SEQ ID NO: 42333 - protein, 978 aa, synthetic construct
  REGION 1..978: note = engineered CasX variant
QEIKRINKIRRRLVKDSNTKKAGKTGPMKTLLVRVMTPDLRERLENLRKKPPNIPQPISNTSRANLNKLLTDYTEMKKAILHVYWEEFQKDPVGLMSRVAQPASKKIDQNKLKPEMDEKGNLTTAGFACSQCGQPLFVYKLEQVSEKGKAYTNYFGRCNVAEHEKLILLAQLKPEKDSDEAVTYSLGKFGQRALDFYSIHVTKESTHPVKPLAQIAGNRYASTPVGKALSDACMGTIASFLSKYQDIIIEHQKVVKGNQKRLESLRELAGKENLEYPSVTLPPQPHTKEGVDAYNEVIARVRMWVNLNLWQKLKLSRDDAKPLLRLKGFPSFPLVERQANEVDWWDMVCNVKKLINEKKEDGKVFWQNLAGYKRQEALRPYLSSEEDRKKGKKFARYQLGDLLLHLYKKHGEDWGKVYDEAWERIDKKVEGLSKHIKLEEERRSEDAQSKAALTDWLRAKASFVIEGLKEADKDEFCRCELKLQKWYGDLRGKPFAIEAENSILDISGFSKQYNCAFIWQKDGVKKLNLYLIINYFKGGKLRFKKIKPEAFEANRFYTVINKKSGEIVPMEVNFNFDDPNLIILPLAFGKRQGREFIWNDLLSLETGSLKLANGRVIEKTLYNRRTRQDEPALFVALTFERREVLDSSNIKPMNLIGVDRGENIPAVIALTDPEGCPLSRFKDSLGNPTHILRIGESYKEKQRTIQAKKEVEQRRAGGYSRKYASKAKNLADDMVRNTARDLLYYAVTQDAMLIFENLSRGFGRQGKRTFMAERQYTRMEDWLTAKLAYEGLPSKTYLSKTLAQYTSKTCSNCGFTITSADYDRVLEKLKKTATGWMTTINGKELKVEGQITYYNRYKRQNVVKDLSVELDRLSEESVNNDISSWTKGRSGEALSLLKKRFSHRPVQEKFVCLNCGFETHADEQAALNIARSWLFLRSQEYKKYQTNKTTGNTDKRAFVETWQSFYRKKLKEVWKPAV

SEQ ID NO: 42334 - protein, 978 aa, synthetic construct
  REGION 1..978: note = engineered CasX variant
QEIKRINKIRRRLVKDSNTKKAGKTGPMKTLLVRVMTPDLRERLENLRKKPPNIPQPISNTSRANLNKLLTDYTEMKKAILHVYWEEFQKDPVGLMSRVAQPASKKIDQNKLKPEMDEKGNLTTAGFACSQCGQPLFVYKLEQVSEKGKAYTNYFGRCNVAEHEKLILLAQLKPEKDSDEAVTYSLGKFGQRALDFYSIHVTKESTHPVKPLAQIAGNRYASAPVGKALSDACMGTIASFLSKYQDIIIEHQKVVKGNQKRLESLRELAGKENLEYPSVTLPPQPHTKEGVDAYNEVIARVRMWVNLNLWQKLKLSRDDAKPLLRLKGFPSFPLVERQANEVDWWDMVCNVKKLINEKKEDGKVFWQNLAGYKRQEALRPYLSSEEDRKKGKKFARYQLGDLLLHLYKKHGEDWGKVYDEAWERIDKKVEGLSKHIKLEEERRSEDAQSKAALTDWLRAKASFVIEGLKEADKDEFCRCELKLQKWYGDLRGKPFAIEAENSILDISGFSKQYNCAFIWQKDGVKKLNLYLIINYFKGGKLRFKKIKPEAFEANRFYTVINKKSGEIVPMEVNFNFDDPNLIILPLAFGKRQGREFIWNDLLSLETGSLKLANGRVIEKTLYNRRTRQDEPALFVALTFERREVLDSSNIKPMNLIGVDRGENIPAVIALTDPEGCPLSRFKDSLGNPTHILRIGESYKEKQRTIQAKKEVEQRRAGGYSRKYASKAKNLADDMVRNTARDLLYYAVTQDAMLIFENLSRGFGRQGKRTFMAERQYTRMEDWLTAKLAYEGLPSKTYLSKTLAQYTSKTCSNCGFTITSADYDRVLEKLKKTATGWMTTINGKELKVEGQITYYNRYKRQNVVKDLSVELDRLSEESVNNDISSWTKGRSGEALSLLKKRFSHRPVQEKFVCLNCGFETHADEQAALNIARSWLFLRSQEYKKYQTNKTTGNTDKRAFVETWQSFYRKKLKEVWKPAV

SEQ ID NO: 42335 - protein, 978 aa, synthetic construct
  REGION 1..978: note = engineered CasX variant
QEIKRINKIRRRLVKDSNTKKAGKTGPMKTLLVRVMTPDLRERLENLRKKPPNIPQPISNTSRANLNKLLTDYTEMKKAILHVYWEEFQKDPVGLMSRVAQPASKKIDQNKLKPEMDEKGNLTTAGFACSQCGQPLFVYKLEQVSEKGKAYTNYFGRCNVAEHEKLILLAQLKPEKDSDEAVTYSLGKFGQRALDFYSIHVTKESTHPVKPLAQIAGNRYASVPVGKALSDACMGTIASFLSKYQDIIIEHQKVVKGNQKRLESLRELAGKENLEYPSVTLPPQPHTKEGVDAYNEVIARVRMWVNLNLWQKLKLSRDDAKPLLRLKGFPSFPLVERQANEVDWWDMVCNVKKLINEKKEDGKVFWQNLAGYKRQEALRPYLSSEEDRKKGKKFARYQLGDLLLHLYKKHGEDWGKVYDEAWERIDKKVEGLSKHIKLEEERRSEDAQSKAALTDWLRAKASFVIEGLKEADKDEFCRCELKLQKWYGDLRGKPFAIEAENSILDISGFSKQYNCAFIWQKDGVKKLNLYLIINYFKGGKLRFKKIKPEAFEANRFYTVINKKSGEIVPMEVNFNFDDPNLIILPLAFGKRQGREFIWNDLLSLETGSLKLANGRVIEKTLYNRRTRQDEPALFVALTFERREVLDSSNIKPMNLIGVDRGENIPAVIALTDPEGCPLSRFKDSLGNPTHILRIGESYKEKQRTIQAKKEVEQRRAGGYSRKYASKAKNLADDMVRNTARDLLYYAVTQDAMLIFENLSRGFGRQGKRTFMAERQYTRMEDWLTAKLAYEGLPSKTYLSKTLAQYTSKTCSNCGFTITSADYDRVLEKLKKTATGWMTTINGKELKVEGQITYYNRYKRQNVVKDLSVELDRLSEESVNNDISSWTKGRSGEALSLLKKRFSHRPVQEKFVCLNCGFETHADEQAALNIARSWLFLRSQEYKKYQTNKTTGNTDKRAFVETWQSFYRKKLKEVWKPAV

SEQ ID NO: 42336 - protein, 978 aa, synthetic construct
  REGION 1..978: note = engineered CasX variant
QEIKRINKIRRRLVKDSNTKKAGKTGPMKTLLVRVMTPDLRERLENLRKKPPNIPQPISNTSRANLNKLLTDYTEMKKAILHVYWEEFQKDPVGLMSRVAQPASKKIDQNKLKPEMDEKGNLTTAGFACSQCGQPLFVYKLEQVSEKGKAYTNYFGRCNVAEHEKLIKLAQLKPEKDSDEAVTYSLGKFGQRALDFYSIHVTKESTHPVKPLAQIAGNRYASGPVGKALSDACMGTIASFLSKYQDIIIEHQKVVKGNQKRLESLRELAGKENLEYPSVTLPPQPHTKEGVDAYNEVIARVRMWVNLNLWQKLKLSRDDAKPLLRLKGFPSFPLVERQANEVDWWDMVCNVKKLINEKKEDGKVFWQNLAGYKRQEALRPYLSSEEDRKKGKKFARYQLGDLLLHLYKKHGEDWGKVYDEAWERIDKKVEGLSKHIKLEEERRSEDAQSKAALTDWLRAKASFVIEGLKEADKDEFCRCELKLQKWYGDLRGKPFAIEAENSILDISGFSKQYNCAFIWQKDGVKKLNLYLIINYFKGGKLRFKKIKPEAFEANRFYTVINKKSGEIVPMEVNFNFDDPNLIILPLAFGKRQGREFIWNDLLSLETGSLKLANGRVIEKTLYNRRTRQDEPALFVALTFERREVLDSSNIKPMNLIGVDRGENIPAVIALTDPEGCPLSRFKDSLGNPTHILRIGESYKEKQRTIQAKKEVEQRRAGGYSRKYASKAKNLADDMVRNTARDLLYYAVTQDAMLIFENLSRGFGRQGKRTFMAERQYTRMEDWLTAKLAYEGLPSKTYLSKTLAQYTSKTCSNCGFTITSADYDRVLEKLKKTATGWMTTINGKELKVEGQITYYNRYKRQNVVKDLSVELDRLSEESVNNDISSWTKGRSGEALSLLKKRFSHRPVQEKFVCLNCGFETHADEQAALNIARSWLFLRSQEYKKYQTNKTTGNTDKRAFVETWQSFYRKKLKEVWKPAV

SEQ ID NO: 42337 - protein, 977 aa, synthetic construct
  REGION 1..977: note = engineered CasX variant
QEIKRINKIRRRLVKDSNTKKAGKTGPMKTLLVRVMTPDLRERLENLRKKPPNIPQPISNTSRANLNKLLTDYTEMKKAILHVYWEEFQKDPVGLMSRVAQPASKKIDQNKLKPEMDEKGNLTTAGFACSQCGQPLFVYKLEQVSEKGKAYTNYFGRCNVAEHEKLILLAQLKPEKDSDEAVTYSLGKFGQRALDFYSIHVTKESTHPVKPLAQIAGNRYASPVGKALSDACMGTIASFLSKYQDIIIEHQKVVKGNQKRLESLRELAGKENLEYPSVTLPPQPHTKEGVDAYNEVIARVRMWVNLNLWQKLKLSRDDAKPLLRLKGFPSFPLVERQANEVDWWDMVCNVKKLINEKKEDGKVFWQNLAGYKRQEALRPYLSSEEDRKKGKKFARYQLGDLLLHLYKKHGEDWGKVYDEAWERIDKKVEGLSKHIKLEEERRSEDAQSKAALTDWLRAKASFVIEGLKEADKDEFCRCELKLQKWYGDLRGKPFAIEAENSILDISGFSKQYNCAFIWQKDGVKKLNLYLIINYFKGGKLRFKKIKPEAFEANRFYTVINKKSGEIVPMEVNFNFDDPNLIILPLAFGKRQGREFIWNDLLSLETGSLKLANGRVIEKTLYNRRTRQDEPALFVALTFERREVLDSSNIKPMNLIGVDRGENIPAVIALTDPEGCPLSRFKDSLGNPTHILRIGESYKEKQRTIQAKKEVEQRRAGGYSRKYASKAKNLADDMVRNTARDLLYYAVTQDAMLIFENLSRGFGRQGKRTFMAERQYTRMEDWLTAKLAYEGLPSKTYLSKTLAQYTSKTCSNCGFTITSADYDRVLEKLKKTATGWMTTINGKELKVEGQITYYNRYKRQNVVKDLSVELDRLSEESVNNDISSWTKGRSGEALSLLKKRFSHRPVQEKFVCLNCGFETHADEQAALNIARSWLFLRSQEYKKYQTNKTTGNTDKRAFVETWQSFYRKKLKEVWKPAV

SEQ ID NO: 42338 - protein, 978 aa, synthetic construct
  REGION 1..978: note = engineered CasX variant
QEIKRINKIRRRLVKDSNTKKAGKTGPMKTLLVRVMTPDLRERLENLRKKPPNIPQPISNTSRANLNKLLTDYTEMKKAILHVYWEEFQKDPVGLMSRVAQPASKKIDQNKLKPEMDEKGNLTTAGFACSQCGQPLFVYKLEQVSEKGKAYTNYFGRCNVAEHEKLILLAQLKPEKDSDEAVTYSLGKFGQRALDFYSIHVTKESTHPVKPLAQIAGNRYASYPVGKALSDACMGTIASFLSKYQDIIIEHQKVVKGNQKRLESLRELAGKENLEYPSVTLPPQPHTKEGVDAYNEVIARVRMWVNLNLWQKLKLSRDDAKPLLRLKGFPSFPLVERQANEVDWWDMVCNVKKLINEKKEDGKVFWQNLAGYKRQEALRPYLSSEEDRKKGKKFARYQLGDLLLHLEKKHPEDWGKVYDEAWERIDKKVEGLSKHIKLEEERRSEDAQSKAALTDWLRAKASFVIEGLKEADKDEFCRCELKLQKWYGDLRGKPFAIEAENSILDISGFSKQYNCAFIWQKDGVKKLNLYLIINYFKGGKLRFKKIKPEAFEANRFYTVINKKSGEIVPMEVNFNFDDPNLIILPLAFGKRQGREFIWNDLLSLETGSLKLANGRVIEKTLYNRRTRQDEPALFVALTFERREVLDSSNIKPMNLIGVDRGENIPAVIALTDPEGCPLSRFKDSLGNPTHILRIGESYKEKQRTIQAKKEVEQRRAGGYSRKYASKAKNLADDMVRNTARDLLYYAVTQDAMLIFENLSRGFGRQGKRTFMAERQYTRMEDWLTAKLAYEGLPSKTYLSKTLAQYTSKTCSNCGFTITSADYDRVLEKLKKTATGWMTTINGKELKVEGQITYYNRYKRQNVVKDLSVELDRLSEESVNNDISSWTKGRSGEALSLLKKRFSHRPVQEKFVCLNCGFETHADEQAALNIARSWLFLRSQEYKKYQTNKTTGNTDKRAFVETWQSFYRKKLKEVWKPAV

SEQ ID NO: 42339 - protein, 978 aa, synthetic construct
  REGION 1..978: note = engineered CasX variant
QEIKRINKIRRRLVKDSNTKKAGKTGPMKTLLVRVMTPDLRERLENLRKKPPNIPQPISNTSRANLNKLLTDYTEMKKAILHVYWEEFQKDPVGLMSRVAQPASKKIDQNKLKPEMDEKGNLTTAGFACSQCGQPLFVYKLEQVSEKGKAYTNYFGRCNVAEHEKLILLAQLKPEKDSDEAVTYSLGKFGQRALDFYSIHVTKESTHPVKPLAQIAGNRYASHPVGKALSDACMGTIASFLSKYQDIIIEHQKVVKGNQKRLESLRELAGKENLEYPSVTLPPQPHTKEGVDAYNEVIARVRMWVNLNLWQKLKLSRDDAKPLLRLKGFPSFPLVERQANEVDWWDMVCNVKKLINEKKEDGKVFWQNLAGYKRQEALRPYLSSEEDRKKGKKFARYQLGDLLLHLEKKHPEDWGKVYDEAWERIDKKVEGLSKHIKLEEERRSEDAQSKAALTDWLRAKASFVIEGLKEADKDEFCRCELKLQKWYGDLRGKPFAIEAENSILDISGFSKQYNCAFIWQKDGVKKLNLYLIINYFKGGKLRFKKIKPEAFEANRFYTVINKKSGEIVPMEVNFNFDDPNLIILPLAFGKRQGREFIWNDLLSLETGSLKLANGRVIEKTLYNRRTRQDEPALFVALTFERREVLDSSNIKPMNLIGVDRGENIPAVIALTDPEGCPLSRFKDSLGNPTHILRIGESYKEKQRTIQAKKEVEQRRAGGYSRKYASKAKNLADDMVRNTARDLLYYAVTQDAMLIFENLSRGFGRQGKRTFMAERQYTRMEDWLTAKLAYEGLPSKTYLSKTLAQYTSKTCSNCGFTITSADYDRVLEKLKKTATGWMTTINGKELKVEGQITYYNRYKRQNVVKDLSVELDRLSEESVNNDISSWTKGRSGEALSLLKKRFSHRPVQEKFVCLNCGFETHADEQAALNIARSWLFLRSQEYKKYQTNKTTGNTDKRAFVETWQSFYRKKLKEVWKPAV

SEQ ID NO: 42340 - protein, 978 aa, synthetic construct
  REGION 1..978: note = engineered CasX variant
QEIKRINKIRRRLVKDSNTKKAGKTGPMKTLLVRVMTPDLRERLENLRKKPPNIPQPISNTSRANLNKLLTDYTEMKKAILHVYWEEFQKDPVGLMSRVAQPASKKIDQNKLKPEMDEKGNLTTAGFACSQCGQPLFVYKLEQVSEKGKAYTNYFGRCNVAEHEKLILLAQLKPEKDSDEAVTYSLGKFGQRALDFYSIHVTKESTHPVKPLAQIAGNRYASSPVGKALSDACMGTIASFLSKYQDIIIEHQKVVKGNQKRLESLRELAGKENLEYPSVTLPPQPHTKEGVDAYNEVIARVRMWVNLNLWQKLKLSRDDAKPLLRLKGFPSFPLVERQANEVDWWDMVCNVKKLINEKKEDGKVFWQNLAGYKRQEALRPYLSSEEDRKKGKKFARYQLGDLLLHLEKKHPEDWGKVYDEAWERIDKKVEGLSKHIKLEEERRSEDAQSKAALTDWLRAKASFVIEGLKEADKDEFCRCELKLQKWYGDLRGKPFAIEAENSILDISGFSKQYNCAFIWQKDGVKKLNLYLIINYFKGGKLRFKKIKPEAFEANRFYTVINKKSGEIVPMEVNFNFDDPNLIILPLAFGKRQGREFIWNDLLSLETGSLKLANGRVIEKTLYNRRTRQDEPALFVALTFERREVLDSSNIKPMNLIGVDRGENIPAVIALTDPEGCPLSRFKDSLGNPTHILRIGESYKEKQRTIQAKKEVEQRRAGGYSRKYASKAKNLADDMVRNTARDLLYYAVTQDAMLIFENLSRGFGRQGKRTFMAERQYTRMEDWLTAKLAYEGLPSKTYLSKTLAQYTSKTCSNCGFTITSADYDRVLEKLKKTATGWMTTINGKELKVEGQITYYNRYKRQNVVKDLSVELDRLSEESVNNDISSWTKGRSGEALSLLKKRFSHRPVQEKFVCLNCGFETHADEQAALNIARSWLFLRSQEYKKYQTNKTTGNTDKRAFVETWQSFYRKKLKEVWKPAV

SEQ ID NO: 42341 - protein, 978 aa, synthetic construct
  REGION 1..978: note = engineered CasX variant
QEIKRINKIRRRLVKDSNTKKAGKTGPMKTLLVRVMTPDLRERLENLRKKPPNIPQPISNTSRANLNKLLTDYTEMKKAILHVYWEEFQKDPVGLMSRVAQPASKKIDQNKLKPEMDEKGNLTTAGFACSQCGQPLFVYKLEQVSEKGKAYTNYFGRCNVAEHEKLILLAQLKPEKDSDEAVTYSLGKFGQRALDFYSIHVTKESTHPVKPLAQIAGNRYASTPVGKALSDACMGTIASFLSKYQDIIIEHQKVVKGNQKRLESLRELAGKENLEYPSVTLPPQPHTKEGVDAYNEVIARVRMWVNLNLWQKLKLSRDDAKPLLRLKGFPSFPLVERQANEVDWWDMVCNVKKLINEKKEDGKVFWQNLAGYKRQEALRPYLSSEEDRKKGKKFARYQLGDLLLHLEKKHPEDWGKVYDEAWERIDKKVEGLSKHIKLEEERRSEDAQSKAALTDWLRAKASFVIEGLKEADKDEFCRCELKLQKWYGDLRGKPFAIEAENSILDISGFSKQYNCAFIWQKDGVKKLNLYLIINYFKGGKLRFKKIKPEAFEANRFYTVINKKSGEIVPMEVNFNFDDPNLIILPLAFGKRQGREFIWNDLLSLETGSLKLANGRVIEKTLYNRRTRQDEPALFVALTFERREVLDSSNIKPMNLIGVDRGENIPAVIALTDPEGCPLSRFKDSLGNPTHILRIGESYKEKQRTIQAKKEVEQRRAGGYSRKYASKAKNLADDMVRNTARDLLYYAVTQDAMLIFENLSRGFGRQGKRTFMAERQYTRMEDWLTAKLAYEGLPSKTYLSKTLAQYTSKTCSNCGFTITSADYDRVLEKLKKTATGWMTTINGKELKVEGQITYYNRYKRQNVVKDLSVELDRLSEESVNNDISSWTKGRSGEALSLLKKRFSHRPVQEKFVCLNCGFETHADEQAALNIARSWLFLRSQEYKKYQTNKTTGNTDKRAFVETWQSFYRKKLKEVWKPAV

SEQ ID NO: 42342 - protein, 978 aa, synthetic construct
  REGION 1..978: note = engineered CasX variant
QEIKRINKIRRRLVKDSNTKKAGKTGPMKTLLVRVMTPDLRERLENLRKKPPNIPQPISNTSRANLNKLLTDYTEMKKAILHVYWEEFQKDPVGLMSRVAQPASKKIDQNKLKPEMDEKGNLTTAGFACSQCGQPLFVYKLEQVSEKGKAYTNYFGRCNVAEHEKLILLAQLKPEKDSDEAVTYSLGKFGQRALDFYSIHVTKESTHPVKPLAQIAGNRYASAPVGKALSDACMGTIASFLSKYQDIIIEHQKVVKGNQKRLESLRELAGKENLEYPSVTLPPQPHTKEGVDAYNEVIARVRMWVNLNLWQKLKLSRDDAKPLLRLKGFPSFPLVERQANEVDWWDMVCNVKKLINEKKEDGKVFWQNLAGYKRQEALRPYLSSEEDRKKGKKFARYQLGDLLLHLEKKHPEDWGKVYDEAWERIDKKVEGLSKHIKLEEERRSEDAQSKAALTDWLRAKASFVIEGLKEADKDEFCRCELKLQKWYGDLRGKPFAIEAENSILDISGFSKQYNCAFIWQKDGVKKLNLYLIINYFKGGKLRFKKIKPEAFEANRFYTVINKKSGEIVPMEVNFNFDDPNLIILPLAFGKRQGREFIWNDLLSLETGSLKLANGRVIEKTLYNRRTRQDEPALFVALTFERREVLDSSNIKPMNLIGVDRGENIPAVIALTDPEGCPLSRFKDSLGNPTHILRIGESYKEKQRTIQAKKEVEQRRAGGYSRKYASKAKNLADDMVRNTARDLLYYAVTQDAMLIFENLSRGFGRQGKRTFMAERQYTRMEDWLTAKLAYEGLPSKTYLSKTLAQYTSKTCSNCGFTITSADYDRVLEKLKKTATGWMTTINGKELKVEGQITYYNRYKRQNVVKDLSVELDRLSEESVNNDISSWTKGRSGEALSLLKKRFSHRPVQEKFVCLNCGFETHADEQAALNIARSWLFLRSQEYKKYQTNKTTGNTDKRAFVETWQSFYRKKLKEVWKPAV

SEQ ID NO: 42343 - protein, 978 aa, synthetic construct
  REGION 1..978: note = engineered CasX variant
QEIKRINKIRRRLVKDSNTKKAGKTGPMKTLLVRVMTPDLRERLENLRKKPPNIPQPISNTSRANLNKLLTDYTEMKKAILHVYWEEFQKDPVGLMSRVAQPASKKIDQNKLKPEMDEKGNLTTAGFACSQCGQPLFVYKLEQVSEKGKAYTNYFGRCNVAEHEKLILLAQLKPEKDSDEAVTYSLGKFGQRALDFYSIHVTKESTHPVKPLAQIAGNRYASVPVGKALSDACMGTIASFLSKYQDIIIEHQKVVKGNQKRLESLRELAGKENLEYPSVTLPPQPHTKEGVDAYNEVIARVRMWVNLNLWQKLKLSRDDAKPLLRLKGFPSFPLVERQANEVDWWDMVCNVKKLINEKKEDGKVFWQNLAGYKRQEALRPYLSSEEDRKKGKKFARYQLGDLLLHLEKKHPEDWGKVYDEAWERIDKKVEGLSKHIKLEEERRSEDAQSKAALTDWLRAKASFVIEGLKEADKDEFCRCELKLQKWYGDLRGKPFAIEAENSILDISGFSKQYNCAFIWQKDGVKKLNLYLIINYFKGGKLRFKKIKPEAFEANRFYTVINKKSGEIVPMEVNFNFDDPNLIILPLAFGKRQGREFIWNDLLSLETGSLKLANGRVIEKTLYNRRTRQDEPALFVALTFERREVLDSSNIKPMNLIGVDRGENIPAVIALTDPEGCPLSRFKDSLGNPTHILRIGESYKEKQRTIQAKKEVEQRRAGGYSRKYASKAKNLADDMVRNTARDLLYYAVTQDAMLIFENLSRGFGRQGKRTFMAERQYTRMEDWLTAKLAYEGLPSKTYLSKTLAQYTSKTCSNCGFTITSADYDRVLEKLKKTATGWMTTINGKELKVEGQITYYNRYKRQNVVKDLSVELDRLSEESVNNDISSWTKGRSGEALSLLKKRFSHRPVQEKFVCLNCGFETHADEQAALNIARSWLFLRSQEYKKYQTNKTTGNTDKRAFVETWQSFYRKKLKEVWKPAV

SEQ ID NO: 42344 - protein, 978 aa, synthetic construct
  REGION 1..978: note = engineered CasX variant
QEIKRINKIRRRLVKDSNTKKAGKTGPMKTLLVRVMTPDLRERLENLRKKPPNIPQPISNTSRANLNKLLTDYTEMKKAILHVYWEEFQKDPVGLMSRVAQPASKKIDQNKLKPEMDEKGNLTTAGFACSQCGQPLFVYKLEQVSEKGKAYTNYFGRCNVAEHEKLIKLAQLKPEKDSDEAVTYSLGKFGQRALDFYSIHVTKESTHPVKPLAQIAGNRYASGPVGKALSDACMGTIASFLSKYQDIIIEHQKVVKGNQKRLESLRELAGKENLEYPSVTLPPQPHTKEGVDAYNEVIARVRMWVNLNLWQKLKLSRDDAKPLLRLKGFPSFPLVERQANEVDWWDMVCNVKKLINEKKEDGKVFWQNLAGYKRQEALRPYLSSEEDRKKGKKFARYQLGDLLLHLEKKHPEDWGKVYDEAWERIDKKVEGLSKHIKLEEERRSEDAQSKAALTDWLRAKASFVIEGLKEADKDEFCRCELKLQKWYGDLRGKPFAIEAENSILDISGFSKQYNCAFIWQKDGVKKLNLYLIINYFKGGKLRFKKIKPEAFEANRFYTVINKKSGEIVPMEVNFNFDDPNLIILPLAFGKRQGREFIWNDLLSLETGSLKLANGRVIEKTLYNRRTRQDEPALFVALTFERREVLDSSNIKPMNLIGVDRGENIPAVIALTDPEGCPLSRFKDSLGNPTHILRIGESYKEKQRTIQAKKEVEQRRAGGYSRKYASKAKNLADDMVRNTARDLLYYAVTQDAMLIFENLSRGFGRQGKRTFMAERQYTRMEDWLTAKLAYEGLPSKTYLSKTLAQYTSKTCSNCGFTITSADYDRVLEKLKKTATGWMTTINGKELKVEGQITYYNRYKRQNVVKDLSVELDRLSEESVNNDISSWTKGRSGEALSLLKKRFSHRPVQEKFVCLNCGFETHADEQAALNIARSWLFLRSQEYKKYQTNKTTGNTDKRAFVETWQSFYRKKLKEVWKPAV

SEQ ID NO: 42345 - protein, 977 aa, synthetic construct
  REGION 1..977: note = engineered CasX variant
QEIKRINKIRRRLVKDSNTKKAGKTGPMKTLLVRVMTPDLRERLENLRKKPPNIPQPISNTSRANLNKLLTDYTEMKKAILHVYWEEFQKDPVGLMSRVAQPASKKIDQNKLKPEMDEKGNLTTAGFACSQCGQPLFVYKLEQVSEKGKAYTNYFGRCNVAEHEKLILLAQLKPEKDSDEAVTYSLGKFGQRALDFYSIHVTKESTHPVKPLAQIAGNRYASPVGKALSDACMGTIASFLSKYQDIIIEHQKVVKGNQKRLESLRELAGKENLEYPSVTLPPQPHTKEGVDAYNEVIARVRMWVNLNLWQKLKLSRDDAKPLLRLKGFPSFPLVERQANEVDWWDMVCNVKKLINEKKEDGKVFWQNLAGYKRQEALRPYLSSEEDRKKGKKFARYQLGDLLLHLEKKHPEDWGKVYDEAWERIDKKVEGLSKHIKLEEERRSEDAQSKAALTDWLRAKASFVIEGLKEADKDEFCRCELKLQKWYGDLRGKPFAIEAENSILDISGFSKQYNCAFIWQKDGVKKLNLYLIINYFKGGKLRFKKIKPEAFEANRFYTVINKKSGEIVPMEVNFNFDDPNLIILPLAFGKRQGREFIWNDLLSLETGSLKLANGRVIEKTLYNRRTRQDEPALFVALTFERREVLDSSNIKPMNLIGVDRGENIPAVIALTDPEGCPLSRFKDSLGNPTHILRIGESYKEKQRTIQAKKEVEQRRAGGYSRKYASKAKNLADDMVRNTARDLLYYAVTQDAMLIFENLSRGFGRQGKRTFMAERQYTRMEDWLTAKLAYEGLPSKTYLSKTLAQYTSKTCSNCGFTITSADYDRVLEKLKKTATGWMTTINGKELKVEGQITYYNRYKRQNVVKDLSVELDRLSEESVNNDISSWTKGRSGEALSLLKKRFSHRPVQEKFVCLNCGFETHADEQAALNIARSWLFLRSQEYKKYQTNKTTGNTDKRAFVETWQSFYRKKLKEVWKPAV

SEQ ID NO: 42346 - protein, 979 aa, synthetic construct
  REGION 1..979: note = engineered CasX variant
QEIKRINKIRRRLVKDSNTKKAGKTGPMKTLLVRVMTPDLRERLENLRKKPPNIPQPISNTSRANLNKLLTDYTEMKKAILHVYWEEFQKDPVGLMSRVAQPASKKIDQNKLKPEMDEKGNLTTAGFACSQCGQPLFVYKLEQVSEKGKAYTNYFGRCNVAEHEKLILLAQLKPEKDSDEAVTYSLGKFGQRALDFYSIHVTKESTHPVKPLAQIAGNRYASYPVGKALSDACMGTIASFLSKYQDIIIEHQKVVKGNQKRLESLRELAGKENLEYPSVTLPPQPHTKEGVDAYNEVIARVRMWVNLNLWQKLKLSRDDAKPLLRLKGFPSFPLVERQANEVDWWDMVCNVKKLINEKKEDGKVFWQNLAGYKRQEALRPYLSSEEDRKKGKKFARYQLGDLLLHLEKKHGERDWGKVYDEAWERIDKKVEGLSKHIKLEEERRSEDAQSKAALTDWLRAKASFVIEGLKEADKDEFCRCELKLQKWYGDLRGKPFAIEAENSILDISGFSKQYNCAFIWQKDGVKKLNLYLIINYFKGGKLRFKKIKPEAFEANRFYTVINKKSGEIVPMEVNFNFDDPNLIILPLAFGKRQGREFIWNDLLSLETGSLKLANGRVIEKTLYNRRTRQDEPALFVALTFERREVLDSSNIKPMNLIGVDRGENIPAVIALTDPEGCPLSRFKDSLGNPTHILRIGESYKEKQRTIQAKKEVEQRRAGGYSRKYASKAKNLADDMVRNTARDLLYYAVTQDAMLIFENLSRGFGRQGKRTFMAERQYTRMEDWLTAKLAYEGLPSKTYLSKTLAQYTSKTCSNCGFTITSADYDRVLEKLKKTATGWMTTINGKELKVEGQITYYNRYKRQNVVKDLSVELDRLSEESVNNDISSWTKGRSGEALSLLKKRFSHRPVQEKFVCLNCGFETHADEQAALNIARSWLFLRSQEYKKYQTNKTTGNTDKRAFVETWQSFYRKKLKEVWKPAV

SEQ ID NO: 42347 - protein, 979 aa, synthetic construct
  REGION 1..979: note = engineered CasX variant
QEIKRINKIRRRLVKDSNTKKAGKTGPMKTLLVRVMTPDLRERLENLRKKPPNIPQPISNTSRANLNKLLTDYTEMKKAILHVYWEEFQKDPVGLMSRVAQPASKKIDQNKLKPEMDEKGNLTTAGFACSQCGQPLFVYKLEQVSEKGKAYTNYFGRCNVAEHEKLILLAQLKPEKDSDEAVTYSLGKFGQRALDFYSIHVTKESTHPVKPLAQIAGNRYASHPVGKALSDACMGTIASFLSKYQDIIIEHQKVVKGNQKRLESLRELAGKENLEYPSVTLPPQPHTKEGVDAYNEVIARVRMWVNLNLWQKLKLSRDDAKPLLRLKGFPSFPLVERQANEVDWWDMVCNVKKLINEKKEDGKVFWQNLAGYKRQEALRPYLSSEEDRKKGKKFARYQLGDLLLHLEKKHGERDWGKVYDEAWERIDKKVEGLSKHIKLEEERRSEDAQSKAALTDWLRAKASFVIEGLKEADKDEFCRCELKLQKWYGDLRGKPFAIEAENSILDISGFSKQYNCAFIWQKDGVKKLNLYLIINYFKGGKLRFKKIKPEAFEANRFYTVINKKSGEIVPMEVNFNFDDPNLIILPLAFGKRQGREFIWNDLLSLETGSLKLANGRVIEKTLYNRRTRQDEPALFVALTFERREVLDSSNIKPMNLIGVDRGENIPAVIALTDPEGCPLSRFKDSLGNPTHILRIGESYKEKQRTIQAKKEVEQRRAGGYSRKYASKAKNLADDMVRNTARDLLYYAVTQDAMLIFENLSRGFGRQGKRTFMAERQYTRMEDWLTAKLAYEGLPSKTYLSKTLAQYTSKTCSNCGFTITSADYDRVLEKLKKTATGWMTTINGKELKVEGQITYYNRYKRQNVVKDLSVELDRLSEESVNNDISSWTKGRSGEALSLLKKRFSHRPVQEKFVCLNCGFETHADEQAALNIARSWLFLRSQEYKKYQTNKTTGNTDKRAFVETWQSFYRKKLKEVWKPAV

SEQ ID NO: 42348 - protein, 979 aa, synthetic construct
  REGION 1..979: note = engineered CasX variant
QEIKRINKIRRRLVKDSNTKKAGKTGPMKTLLVRVMTPDLRERLENLRKKPPNIPQPISNTSRANLNKLLTDYTEMKKAILHVYWEEFQKDPVGLMSRVAQPASKKIDQNKLKPEMDEKGNLTTAGFACSQCGQPLFVYKLEQVSEKGKAYTNYFGRCNVAEHEKLILLAQLKPEKDSDEAVTYSLGKFGQRALDFYSIHVTKESTHPVKPLAQIAGNRYASSPVGKALSDACMGTIASFLSKYQDIIIEHQKVVKGNQKRLESLRELAGKENLEYPSVTLPPQPHTKEGVDAYNEVIARVRMWVNLNLWQKLKLSRDDAKPLLRLKGFPSFPLVERQANEVDWWDMVCNVKKLINEKKEDGKVFWQNLAGYKRQEALRPYLSSEEDRKKGKKFARYQLGDLLLHLEKKHGERDWGKVYDEAWERIDKKVEGLSKHIKLEEERRSEDAQSKAALTDWLRAKASFVIEGLKEADKDEFCRCELKLQKWYGDLRGKPFAIEAENSILDISGFSKQYNCAFIWQKDGVKKLNLYLIINYFKGGKLRFKKIKPEAFEANRFYTVINKKSGEIVPMEVNFNFDDPNLIILPLAFGKRQGREFIWNDLLSLETGSLKLANGRVIEKTLYNRRTRQDEPALFVALTFERREVLDSSNIKPMNLIGVDRGENIPAVIALTDPEGCPLSRFKDSLGNPTHILRIGESYKEKQRTIQAKKEVEQRRAGGYSRKYASKAKNLADDMVRNTARDLLYYAVTQDAMLIFENLSRGFGRQGKRTFMAERQYTRMEDWLTAKLAYEGLPSKTYLSKTLAQYTSKTCSNCGFTITSADYDRVLEKLKKTATGWMTTINGKELKVEGQITYYNRYKRQNVVKDLSVELDRLSEESVNNDISSWTKGRSGEALSLLKKRFSHRPVQEKFVCLNCGFETHADEQAALNIARSWLFLRSQEYKKYQTNKTTGNTDKRAFVETWQSFYRKKLKEVWKPAV

SEQ ID NO: 42349 - protein, 979 aa, synthetic construct
  REGION 1..979: note = engineered CasX variant
QEIKRINKIRRRLVKDSNTKKAGKTGPMKTLLVRVMTPDLRERLENLRKKPPNIPQPISNTSRANLNKLLTDYTEMKKAILHVYWEEFQKDPVGLMSRVAQPASKKIDQNKLKPEMDEKGNLTTAGFACSQCGQPLFVYKLEQVSEKGKAYTNYFGRCNVAEHEKLILLAQLKPEKDSDEAVTYSLGKFGQRALDFYSIHVTKESTHPVKPLAQIAGNRYASTPVGKALSDACMGTIASFLSKYQDIIIEHQKVVKGNQKRLESLRELAGKENLEYPSVTLPPQPHTKEGVDAYNEVIARVRMWVNLNLWQKLKLSRDDAKPLLRLKGFPSFPLVERQANEVDWWDMVCNVKKLINEKKEDGKVFWQNLAGYKRQEALRPYLSSEEDRKKGKKFARYQLGDLLLHLEKKHGERDWGKVYDEAWERIDKKVEGLSKHIKLEEERRSEDAQSKAALTDWLRAKASFVIEGLKEADKDEFCRCELKLQKWYGDLRGKPFAIEAENSILDISGFSKQYNCAFIWQKDGVKKLNLYLIINYFKGGKLRFKKIKPEAFEANRFYTVINKKSGEIVPMEVNFNFDDPNLIILPLAFGKRQGREFIWNDLLSLETGSLKLANGRVIEKTLYNRRTRQDEPALFVALTFERREVLDSSNIKPMNLIGVDRGENIPAVIALTDPEGCPLSRFKDSLGNPTHILRIGESYKEKQRTIQAKKEVEQRRAGGYSRKYASKAKNLADDMVRNTARDLLYYAVTQDAMLIFENLSRGFGRQGKRTFMAERQYTRMEDWLTAKLAYEGLPSKTYLSKTLAQYTSKTCSNCGFTITSADYDRVLEKLKKTATGWMTTINGKELKVEGQITYYNRYKRQNVVKDLSVELDRLSEESVNNDISSWTKGRSGEALSLLKKRFSHRPVQEKFVCLNCGFETHADEQAALNIARSWLFLRSQEYKKYQTNKTTGNTDKRAFVETWQSFYRKKLKEVWKPAV

SEQ ID NO: 42350 - protein, 979 aa, synthetic construct
  REGION 1..979: note = engineered CasX variant
QEIKRINKIRRRLVKDSNTKKAGKTGPMKTLLVRVMTPDLRERLENLRKKPPNIPQPISNTSRANLNKLLTDYTEMKKAILHVYWEEFQKDPVGLMSRVAQPASKKIDQNKLKPEMDEKGNLTTAGFACSQCGQPLFVYKLEQVSEKGKAYTNYFGRCNVAEHEKLILLAQLKPEKDSDEAVTYSLGKFGQRALDFYSIHVTKESTHPVKPLAQIAGNRYASAPVGKALSDACMGTIASFLSKYQDIIIEHQKVVKGNQKRLESLRELAGKENLEYPSVTLPPQPHTKEGVDAYNEVIARVRMWVNLNLWQKLKLSRDDAKPLLRLKGFPSFPLVERQANEVDWWDMVCNVKKLINEKKEDGKVFWQNLAGYKRQEALRPYLSSEEDRKKGKKFARYQLGDLLLHLEKKHGERDWGKVYDEAWERIDKKVEGLSKHIKLEEERRSEDAQSKAALTDWLRAKASFVIEGLKEADKDEFCRCELKLQKWYGDLRGKPFAIEAENSILDISGFSKQYNCAFIWQKDGVKKLNLYLIINYFKGGKLRFKKIKPEAFEANRFYTVINKKSGEIVPMEVNFNFDDPNLIILPLAFGKRQGREFIWNDLLSLETGSLKLANGRVIEKTLYNRRTRQDEPALFVALTFERREVLDSSNIKPMNLIGVDRGENIPAVIALTDPEGCPLSRFKDSLGNPTHILRIGESYKEKQRTIQAKKEVEQRRAGGYSRKYASKAKNLADDMVRNTARDLLYYAVTQDAMLIFENLSRGFGRQGKRTFMAERQYTRMEDWLTAKLAYEGLPSKTYLSKTLAQYTSKTCSNCGFTITSADYDRVLEKLKKTATGWMTTINGKELKVEGQITYYNRYKRQNVVKDLSVELDRLSEESVNNDISSWTKGRSGEALSLLKKRFSHRPVQEKFVCLNCGFETHADEQAALNIARSWLFLRSQEYKKYQTNKTTGNTDKRAFVETWQSFYRKKLKEVWKPAV

SEQ ID NO: 42351 - protein, 979 aa, synthetic construct
  REGION 1..979: note = engineered CasX variant
QEIKRINKIRRRLVKDSNTKKAGKTGPMKTLLVRVMTPDLRERLENLRKKPPNIPQPISNTSRANLNKLLTDYTEMKKAILHVYWEEFQKDPVGLMSRVAQPASKKIDQNKLKPEMDEKGNLTTAGFACSQCGQPLFVYKLEQVSEKGKAYTNYFGRCNVAEHEKLILLAQLKPEKDSDEAVTYSLGKFGQRALDFYSIHVTKESTHPVKPLAQIAGNRYASVPVGKALSDACMGTIASFLSKYQDIIIEHQKVVKGNQKRLESLRELAGKENLEYPSVTLPPQPHTKEGVDAYNEVIARVRMWVNLNLWQKLKLSRDDAKPLLRLKGFPSFPLVERQANEVDWWDMVCNVKKLINEKKEDGKVFWQNLAGYKRQEALRPYLSSEEDRKKGKKFARYQLGDLLLHLEKKHGERDWGKVYDEAWERIDKKVEGLSKHIKLEEERRSEDAQSKAALTDWLRAKASFVIEGLKEADKDEFCRCELKLQKWYGDLRGKPFAIEAENSILDISGFSKQYNCAFIWQKDGVKKLNLYLIINYFKGGKLRFKKIKPEAFEANRFYTVINKKSGEIVPMEVNFNFDDPNLIILPLAFGKRQGREFIWNDLLSLETGSLKLANGRVIEKTLYNRRTRQDEPALFVALTFERREVLDSSNIKPMNLIGVDRGENIPAVIALTDPEGCPLSRFKDSLGNPTHILRIGESYKEKQRTIQAKKEVEQRRAGGYSRKYASKAKNLADDMVRNTARDLLYYAVTQDAMLIFENLSRGFGRQGKRTFMAERQYTRMEDWLTAKLAYEGLPSKTYLSKTLAQYTSKTCSNCGFTITSADYDRVLEKLKKTATGWMTTINGKELKVEGQITYYNRYKRQNVVKDLSVELDRLSEESVNNDISSWTKGRSGEALSLLKKRFSHRPVQEKFVCLNCGFETHADEQAALNIARSWLFLRSQEYKKYQTNKTTGNTDKRAFVETWQSFYRKKLKEVWKPAV

SEQ ID NO: 42352 - protein, 979 aa, synthetic construct
  REGION 1..979: note = engineered CasX variant
QEIKRINKIRRRLVKDSNTKKAGKTGPMKTLLVRVMTPDLRERLENLRKKPPNIPQPISNTSRANLNKLLTDYTEMKKAILHVYWEEFQKDPVGLMSRVAQPASKKIDQNKLKPEMDEKGNLTTAGFACSQCGQPLFVYKLEQVSEKGKAYTNYFGRCNVAEHEKLIKLAQLKPEKDSDEAVTYSLGKFGQRALDFYSIHVTKESTHPVKPLAQIAGNRYASGPVGKALSDACMGTIASFLSKYQDIIIEHQKVVKGNQKRLESLRELAGKENLEYPSVTLPPQPHTKEGVDAYNEVIARVRMWVNLNLWQKLKLSRDDAKPLLRLKGFPSFPLVERQANEVDWWDMVCNVKKLINEKKEDGKVFWQNLAGYKRQEALRPYLSSEEDRKKGKKFARYQLGDLLLHLEKKHGERDWGKVYDEAWERIDKKVEGLSKHIKLEEERRSEDAQSKAALTDWLRAKASFVIEGLKEADKDEFCRCELKLQKWYGDLRGKPFAIEAENSILDISGFSKQYNCAFIWQKDGVKKLNLYLIINYFKGGKLRFKKIKPEAFEANRFYTVINKKSGEIVPMEVNFNFDDPNLIILPLAFGKRQGREFIWNDLLSLETGSLKLANGRVIEKTLYNRRTRQDEPALFVALTFERREVLDSSNIKPMNLIGVDRGENIPAVIALTDPEGCPLSRFKDSLGNPTHILRIGESYKEKQRTIQAKKEVEQRRAGGYSRKYASKAKNLADDMVRNTARDLLYYAVTQDAMLIFENLSRGFGRQGKRTFMAERQYTRMEDWLTAKLAYEGLPSKTYLSKTLAQYTSKTCSNCGFTITSADYDRVLEKLKKTATGWMTTINGKELKVEGQITYYNRYKRQNVVKDLSVELDRLSEESVNNDISSWTKGRSGEALSLLKKRFSHRPVQEKFVCLNCGFETHADEQAALNIARSWLFLRSQEYKKYQTNKTTGNTDKRAFVETWQSFYRKKLKEVWKPAV

SEQ ID NO: 42353 - protein, 978 aa, synthetic construct
  REGION 1..978: note = engineered CasX variant
QEIKRINKIRRRLVKDSNTKKAGKTGPMKTLLVRVMTPDLRERLENLRKKPPNIPQPISNTSRANLNKLLTDYTEMKKAILHVYWEEFQKDPVGLMSRVAQPASKKIDQNKLKPEMDEKGNLTTAGFACSQCGQPLFVYKLEQVSEKGKAYTNYFGRCNVAEHEKLILLAQLKPEKDSDEAVTYSLGKFGQRALDFYSIHVTKESTHPVKPLAQIAGNRYASPVGKALSDACMGTIASFLSKYQDIIIEHQKVVKGNQKRLESLRELAGKENLEYPSVTLPPQPHTKEGVDAYNEVIARVRMWVNLNLWQKLKLSRDDAKPLLRLKGFPSFPLVERQANEVDWWDMVCNVKKLINEKKEDGKVFWQNLAGYKRQEALRPYLSSEEDRKKGKKFARYQLGDLLLHLEKKHGERDWGKVYDEAWERIDKKVEGLSKHIKLEEERRSEDAQSKAALTDWLRAKASFVIEGLKEADKDEFCRCELKLQKWYGDLRGKPFAIEAENSILDISGFSKQYNCAFIWQKDGVKKLNLYLIINYFKGGKLRFKKIKPEAFEANRFYTVINKKSGEIVPMEVNFNFDDPNLIILPLAFGKRQGREFIWNDLLSLETGSLKLANGRVIEKTLYNRRTRQDEPALFVALTFERREVLDSSNIKPMNLIGVDRGENIPAVIALTDPEGCPLSRFKDSLGNPTHILRIGESYKEKQRTIQAKKEVEQRRAGGYSRKYASKAKNLADDMVRNTARDLLYYAVTQDAMLIFENLSRGFGRQGKRTFMAERQYTRMEDWLTAKLAYEGLPSKTYLSKTLAQYTSKTCSNCGFTITSADYDRVLEKLKKTATGWMTTINGKELKVEGQITYYNRYKRQNVVKDLSVELDRLSEESVNNDISSWTKGRSGEALSLLKKRFSHRPVQEKFVCLNCGFETHADEQAALNIARSWLFLRSQEYKKYQTNKTTGNTDKRAFVETWQSFYRKKLKEVWKPAV

SEQ ID NO: 42354 - protein, 979 aa, synthetic construct
  REGION 1..979: note = engineered CasX variant
QEIKRINKIRRRLVKDSNTKKAGKTGPMKTLLVRVMTPDLRERLENLRKKPPNIPQPISNTSRANLNKLLTDYTEMKKAILHVYWEEFQKDPVGLMSRVAQPASKKIDQNKLKPEMDEKGNLTTAGFACSQCGQPLFVYKLEQVSEKGKAYTNYFGRCNVAEHEKLILLAQLKPEKDSDEAVTYSLGKFGQRALDFYSIHVTKESTHPVKPLAQIAGNRYASYPVGKALSDACMGTIASFLSKYQDIIIEHQKVVKGNQKRLESLRELAGKENLEYPSVTLPPQPHTKEGVDAYNEVIARVRMWVNLNLWQKLKLSRDDAKPLLRLKGFPSFPLVERQANEVDWWDMVCNVKKLINEKKEDGKVFWQNLAGYKRQEALRPYLSSEEDRKKGKKFARYQLGDLLLHLEKKHGEYDWGKVYDEAWERIDKKVEGLSKHIKLEEERRSEDAQSKAALTDWLRAKASFVIEGLKEADKDEFCRCELKLQKWYGDLRGKPFAIEAENSILDISGFSKQYNCAFIWQKDGVKKLNLYLIINYFKGGKLRFKKIKPEAFEANRFYTVINKKSGEIVPMEVNFNFDDPNLIILPLAFGKRQGREFIWNDLLSLETGSLKLANGRVIEKTLYNRRTRQDEPALFVALTFERREVLDSSNIKPMNLIGVDRGENIPAVIALTDPEGCPLSRFKDSLGNPTHILRIGESYKEKQRTIQAKKEVEQRRAGGYSRKYASKAKNLADDMVRNTARDLLYYAVTQDAMLIFENLSRGFGRQGKRTFMAERQYTRMEDWLTAKLAYEGLPSKTYLSKTLAQYTSKTCSNCGFTITSADYDRVLEKLKKTATGWMTTINGKELKVEGQITYYNRYKRQNVVKDLSVELDRLSEESVNNDISSWTKGRSGEALSLLKKRFSHRPVQEKFVCLNCGFETHADEQAALNIARSWLFLRSQEYKKYQTNKTTGNTDKRAFVETWQSFYRKKLKEVWKPAV

SEQ ID NO: 42355 - protein, 979 aa, synthetic construct
  REGION 1..979: note = engineered CasX variant
QEIKRINKIRRRLVKDSNTKKAGKTGPMKTLLVRVMTPDLRERLENLRKKPPNIPQPISNTSRANLNKLLTDYTEMKKAILHVYWEEFQKDPVGLMSRVAQPASKKIDQNKLKPEMDEKGNLTTAGFACSQCGQPLFVYKLEQVSEKGKAYTNYFGRCNVAEHEKLILLAQLKPEKDSDEAVTYSLGKFGQRALDFYSIHVTKESTHPVKPLAQIAGNRYASHPVGKALSDACMGTIASFLSKYQDIIIEHQKVVKGNQKRLESLRELAGKENLEYPSVTLPPQPHTKEGVDAYNEVIARVRMWVNLNLWQKLKLSRDDAKPLLRLKGFPSFPLVERQANEVDWWDMVCNVKKLINEKKEDGKVFWQNLAGYKRQEALRPYLSSEEDRKKGKKFARYQLGDLLLHLEKKHGEYDWGKVYDEAWERIDKKVEGLSKHIKLEEERRSEDAQSKAALTDWLRAKASFVIEGLKEADKDEFCRCELKLQKWYGDLRGKPFAIEAENSILDISGFSKQYNCAFIWQKDGVKKLNLYLIINYFKGGKLRFKKIKPEAFEANRFYTVINKKSGEIVPMEVNFNFDDPNLIILPLAFGKRQGREFIWNDLLSLETGSLKLANGRVIEKTLYNRRTRQDEPALFVALTFERREVLDSSNIKPMNLIGVDRGENIPAVIALTDPEGCPLSRFKDSLGNPTHILRIGESYKEKQRTIQAKKEVEQRRAGGYSRKYASKAKNLADDMVRNTARDLLYYAVTQDAMLIFENLSRGFGRQGKRTFMAERQYTRMEDWLTAKLAYEGLPSKTYLSKTLAQYTSKTCSNCGFTITSADYDRVLEKLKKTATGWMTTINGKELKVEGQITYYNRYKRQNVVKDLSVELDRLSEESVNNDISSWTKGRSGEALSLLKKRFSHRPVQEKFVCLNCGFETHADEQAALNIARSWLFLRSQEYKKYQTNKTTGNTDKRAFVETWQSFYRKKLKEVWKPAV

SEQ ID NO: 42356 - protein, 979 aa, synthetic construct
  REGION 1..979: note = engineered CasX variant
QEIKRINKIRRRLVKDSNTKKAGKTGPMKTLLVRVMTPDLRERLENLRKKPPNIPQPISNTSRANLNKLLTDYTEMKKAILHVYWEEFQKDPVGLMSRVAQPASKKIDQNKLKPEMDEKGNLTTAGFACSQCGQPLFVYKLEQVSEKGKAYTNYFGRCNVAEHEKLILLAQLKPEKDSDEAVTYSLGKFGQRALDFYSIHVTKESTHPVKPLAQIAGNRYASSPVGKALSDACMGTIASFLSKYQDIIIEHQKVVKGNQKRLESLRELAGKENLEYPSVTLPPQPHTKEGVDAYNEVIARVRMWVNLNLWQKLKLSRDDAKPLLRLKGFPSFPLVERQANEVDWWDMVCNVKKLINEKKEDGKVFWQNLAGYKRQEALRPYLSSEEDRKKGKKFARYQLGDLLLHLEKKHGEYDWGKVYDEAWERIDKKVEGLSKHIKLEEERRSEDAQSKAALTDWLRAKASFVIEGLKEADKDEFCRCELKLQKWYGDLRGKPFAIEAENSILDISGFSKQYNCAFIWQKDGVKKLNLYLIINYFKGGKLRFKKIKPEAFEANRFYTVINKKSGEIVPMEVNFNFDDPNLIILPLAFGKRQGREFIWNDLLSLETGSLKLANGRVIEKTLYNRRTRQDEPALFVALTFERREVLDSSNIKPMNLIGVDRGENIPAVIALTDPEGCPLSRFKDSLGNPTHILRIGESYKEKQRTIQAKKEVEQRRAGGYSRKYASKAKNLADDMVRNTARDLLYYAVTQDAMLIFENLSRGFGRQGKRTFMAERQYTRMEDWLTAKLAYEGLPSKTYLSKTLAQYTSKTCSNCGFTITSADYDRVLEKLKKTATGWMTTINGKELKVEGQITYYNRYKRQNVVKDLSVELDRLSEESVNNDISSWTKGRSGEALSLLKKRFSHRPVQEKFVCLNCGFETHADEQAALNIARSWLFLRSQEYKKYQTNKTTGNTDKRAFVETWQSFYRKKLKEVWKPAV

SEQ ID NO: 42357 - protein, 979 aa, synthetic construct
  REGION 1..979: note = engineered CasX variant
QEIKRINKIRRRLVKDSNTKKAGKTGPMKTLLVRVMTPDLRERLENLRKKPPNIPQPISNTSRANLNKLLTDYTEMKKAILHVYWEEFQKDPVGLMSRVAQPASKKIDQNKLKPEMDEKGNLTTAGFACSQCGQPLFVYKLEQVSEKGKAYTNYFGRCNVAEHEKLILLAQLKPEKDSDEAVTYSLGKFGQRALDFYSIHVTKESTHPVKPLAQIAGNRYASTPVGKALSDACMGTIASFLSKYQDIIIEHQKVVKGNQKRLESLRELAGKENLEYPSVTLPPQPHTKEGVDAYNEVIARVRMWVNLNLWQKLKLSRDDAKPLLRLKGFPSFPLVERQANEVDWWDMVCNVKKLINEKKEDGKVFWQNLAGYKRQEALRPYLSSEEDRKKGKKFARYQLGDLLLHLEKKHGEYDWGKVYDEAWERIDKKVEGLSKHIKLEEERRSEDAQSKAALTDWLRAKASFVIEGLKEADKDEFCRCELKLQKWYGDLRGKPFAIEAENSILDISGFSKQYNCAFIWQKDGVKKLNLYLIINYFKGGKLRFKKIKPEAFEANRFYTVINKKSGEIVPMEVNFNFDDPNLIILPLAFGKRQGREFIWNDLLSLETGSLKLANGRVIEKTLYNRRTRQDEPALFVALTFERREVLDSSNIKPMNLIGVDRGENIPAVIALTDPEGCPLSRFKDSLGNPTHILRIGESYKEKQRTIQAKKEVEQRRAGGYSRKYASKAKNLADDMVRNTARDLLYYAVTQDAMLIFENLSRGFGRQGKRTFMAERQYTRMEDWLTAKLAYEGLPSKTYLSKTLAQYTSKTCSNCGFTITSADYDRVLEKLKKTATGWMTTINGKELKVEGQITYYNRYKRQNVVKDLSVELDRLSEESVNNDISSWTKGRSGEALSLLKKRFSHRPVQEKFVCLNCGFETHADEQAALNIARSWLFLRSQEYKKYQTNKTTGNTDKRAFVETWQSFYRKKLKEVWKPAV

SEQ ID NO: 42358 - protein, 979 aa, synthetic construct
  REGION 1..979: note = engineered CasX variant
QEIKRINKIRRRLVKDSNTKKAGKTGPMKTLLVRVMTPDLRERLENLRKKPPNIPQPISNTSRANLNKLLTDYTEMKKAILHVYWEEFQKDPVGLMSRVAQPASKKIDQNKLKPEMDEKGNLTTAGFACSQCGQPLFVYKLEQVSEKGKAYTNYFGRCNVAEHEKLILLAQLKPEKDSDEAVTYSLGKFGQRALDFYSIHVTKESTHPVKPLAQIAGNRYASAPVGKALSDACMGTIASFLSKYQDIIIEHQKVVKGNQKRLESLRELAGKENLEYPSVTLPPQPHTKEGVDAYNEVIARVRMWVNLNLWQKLKLSRDDAKPLLRLKGFPSFPLVERQANEVDWWDMVCNVKKLINEKKEDGKVFWQNLAGYKRQEALRPYLSSEEDRKKGKKFARYQLGDLLLHLEKKHGEYDWGKVYDEAWERIDKKVEGLSKHIKLEEERRSEDAQSKAALTDWLRAKASFVIEGLKEADKDEFCRCELKLQKWYGDLRGKPFAIEAENSILDISGFSKQYNCAFIWQKDGVKKLNLYLIINYFKGGKLRFKKIKPEAFEANRFYTVINKKSGEIVPMEVNFNFDDPNLIILPLAFGKRQGREFIWNDLLSLETGSLKLANGRVIEKTLYNRRTRQDEPALFVALTFERREVLDSSNIKPMNLIGVDRGENIPAVIALTDPEGCPLSRFKDSLGNPTHILRIGESYKEKQRTIQAKKEVEQRRAGGYSRKYASKAKNLADDMVRNTARDLLYYAVTQDAMLIFENLSRGFGRQGKRTFMAERQYTRMEDWLTAKLAYEGLPSKTYLSKTLAQYTSKTCSNCGFTITSADYDRVLEKLKKTATGWMTTINGKELKVEGQITYYNRYKRQNVVKDLSVELDRLSEESVNNDISSWTKGRSGEALSLLKKRFSHRPVQEKFVCLNCGFETHADEQAALNIARSWLFLRSQEYKKYQTNKTTGNTDKRAFVETWQSFYRKKLKEVWKPAV

SEQ ID NO: 42359 - protein, 979 aa, synthetic construct
  REGION 1..979: note = engineered CasX variant
QEIKRINKIRRRLVKDSNTKKAGKTGPMKTLLVRVMTPDLRERLENLRKKPPNIPQPISNTSRANLNKLLTDYTEMKKAILHVYWEEFQKDPVGLMSRVAQPASKKIDQNKLKPEMDEKGNLTTAGFACSQCGQPLFVYKLEQVSEKGKAYTNYFGRCNVAEHEKLILLAQLKPEKDSDEAVTYSLGKFGQRALDFYSIHVTKESTHPVKPLAQIAGNRYASVPVGKALSDACMGTIASFLSKYQDIIIEHQKVVKGNQKRLESLRELAGKENLEYPSVTLPPQPHTKEGVDAYNEVIARVRMWVNLNLWQKLKLSRDDAKPLLRLKGFPSFPLVERQANEVDWWDMVCNVKKLINEKKEDGKVFWQNLAGYKRQEALRPYLSSEEDRKKGKKFARYQLGDLLLHLEKKHGEYDWGKVYDEAWERIDKKVEGLSKHIKLEEERRSEDAQSKAALTDWLRAKASFVIEGLKEADKDEFCRCELKLQKWYGDLRGKPFAIEAENSILDISGFSKQYNCAFIWQKDGVKKLNLYLIINYFKGGKLRFKKIKPEAFEANRFYTVINKKSGEIVPMEVNFNFDDPNLIILPLAFGKRQGREFIWNDLLSLETGSLKLANGRVIEKTLYNRRTRQDEPALFVALTFERREVLDSSNIKPMNLIGVDRGENIPAVIALTDPEGCPLSRFKDSLGNPTHILRIGESYKEKQRTIQAKKEVEQRRAGGYSRKYASKAKNLADDMVRNTARDLLYYAVTQDAMLIFENLSRGFGRQGKRTFMAERQYTRMEDWLTAKLAYEGLPSKTYLSKTLAQYTSKTCSNCGFTITSADYDRVLEKLKKTATGWMTTINGKELKVEGQITYYNRYKRQNVVKDLSVELDRLSEESVNNDISSWTKGRSGEALSLLKKRFSHRPVQEKFVCLNCGFETHADEQAALNIARSWLFLRSQEYKKYQTNKTTGNTDKRAFVETWQSFYRKKLKEVWKPAV

SEQ ID NO: 42360 - protein, 979 aa, synthetic construct
  REGION 1..979: note = engineered CasX variant
QEIKRINKIRRRLVKDSNTKKAGKTGPMKTLLVRVMTPDLRERLENLRKKPPNIPQPISNTSRANLNKLLTDYTEMKKAILHVYWEEFQKDPVGLMSRVAQPASKKIDQNKLKPEMDEKGNLTTAGFACSQCGQPLFVYKLEQVSEKGKAYTNYFGRCNVAEHEKLIKLAQLKPEKDSDEAVTYSLGKFGQRALDFYSIHVTKESTHPVKPLAQIAGNRYASGPVGKALSDACMGTIASFLSKYQDIIIEHQKVVKGNQKRLESLRELAGKENLEYPSVTLPPQPHTKEGVDAYNEVIARVRMWVNLNLWQKLKLSRDDAKPLLRLKGFPSFPLVERQANEVDWWDMVCNVKKLINEKKEDGKVFWQNLAGYKRQEALRPYLSSEEDRKKGKKFARYQLGDLLLHLEKKHGEYDWGKVYDEAWERIDKKVEGLSKHIKLEEERRSEDAQSKAALTDWLRAKASFVIEGLKEADKDEFCRCELKLQKWYGDLRGKPFAIEAENSILDISGFSKQYNCAFIWQKDGVKKLNLYLIINYFKGGKLRFKKIKPEAFEANRFYTVINKKSGEIVPMEVNFNFDDPNLIILPLAFGKRQGREFIWNDLLSLETGSLKLANGRVIEKTLYNRRTRQDEPALFVALTFERREVLDSSNIKPMNLIGVDRGENIPAVIALTDPEGCPLSRFKDSLGNPTHILRIGESYKEKQRTIQAKKEVEQRRAGGYSRKYASKAKNLADDMVRNTARDLLYYAVTQDAMLIFENLSRGFGRQGKRTFMAERQYTRMEDWLTAKLAYEGLPSKTYLSKTLAQYTSKTCSNCGFTITSADYDRVLEKLKKTATGWMTTINGKELKVEGQITYYNRYKRQNVVKDLSVELDRLSEESVNNDISSWTKGRSGEALSLLKKRFSHRPVQEKFVCLNCGFETHADEQAALNIARSWLFLRSQEYKKYQTNKTTGNTDKRAFVETWQSFYRKKLKEVWKPAV

SEQ ID NO: 42361 - protein, 978 aa, synthetic construct
  REGION 1..978: note = engineered CasX variant
QEIKRINKIRRRLVKDSNTKKAGKTGPMKTLLVRVMTPDLRERLENLRKKPPNIPQPISNTSRANLNKLLTDYTEMKKAILHVYWEEFQKDPVGLMSRVAQPASKKIDQNKLKPEMDEKGNLTTAGFACSQCGQPLFVYKLEQVSEKGKAYTNYFGRCNVAEHEKLILLAQLKPEKDSDEAVTYSLGKFGQRALDFYSIHVTKESTHPVKPLAQIAGNRYASPVGKALSDACMGTIASFLSKYQDIIIEHQKVVKGNQKRLESLRELAGKENLEYPSVTLPPQPHTKEGVDAYNEVIARVRMWVNLNLWQKLKLSRDDAKPLLRLKGFPSFPLVERQANEVDWWDMVCNVKKLINEKKEDGKVFWQNLAGYKRQEALRPYLSSEEDRKKGKKFARYQLGDLLLHLEKKHGEYDWGKVYDEAWERIDKKVEGLSKHIKLEEERRSEDAQSKAALTDWLRAKASFVIEGLKEADKDEFCRCELKLQKWYGDLRGKPFAIEAENSILDISGFSKQYNCAFIWQKDGVKKLNLYLIINYFKGGKLRFKKIKPEAFEANRFYTVINKKSGEIVPMEVNFNFDDPNLIILPLAFGKRQGREFIWNDLLSLETGSLKLANGRVIEKTLYNRRTRQDEPALFVALTFERREVLDSSNIKPMNLIGVDRGENIPAVIALTDPEGCPLSRFKDSLGNPTHILRIGESYKEKQRTIQAKKEVEQRRAGGYSRKYASKAKNLADDMVRNTARDLLYYAVTQDAMLIFENLSRGFGRQGKRTFMAERQYTRMEDWLTAKLAYEGLPSKTYLSKTLAQYTSKTCSNCGFTITSADYDRVLEKLKKTATGWMTTINGKELKVEGQITYYNRYKRQNVVKDLSVELDRLSEESVNNDISSWTKGRSGEALSLLKKRFSHRPVQEKFVCLNCGFETHADEQAALNIARSWLFLRSQEYKKYQTNKTTGNTDKRAFVETWQSFYRKKLKEVWKPAV

SEQ ID NO: 42362 - protein, 978 aa, synthetic construct
  REGION 1..978: note = engineered CasX variant
QEIKRINKIRRRLVKDSNTKKAGKTGPMKTLLVRVMTPDLRERLENLRKKPPNIPQPISNTSRANLNKLLTDYTEMKKAILHVYWEEFQKDPVGLMSRVAQPASKKIDQNKLKPEMDEKGNLTTAGFACSQCGQPLFVYKLEQVSEKGKAYTNYFGRCNVAEHEKLILLAQLKPEKDSDEAVTYSLGKFGQRALDFYSIHVTKESTHPVKPLAQIAGNRYASYPVGKALSDACMGTIASFLSKYQDIIIEHQKVVKGNQKRLESLRELAGKENLEYPSVTLPPQPHTKEGVDAYNEVIARVRMWVNLNLWQKLKLSRDDAKPLLRLKGFPSFPLVERQANEVDWWDMVCNVKKLINEKKEDGKVFWQNLAGYKRQEALRPYLSSEEDRKKGKKFARYQLGDLLLHLEKKHGEDWGDVYDEAWERIDKKVEGLSKHIKLEEERRSEDAQSKAALTDWLRAKASFVIEGLKEADKDEFCRCELKLQKWYGDLRGKPFAIEAENSILDISGFSKQYNCAFIWQKDGVKKLNLYLIINYFKGGKLRFKKIKPEAFEANRFYTVINKKSGEIVPMEVNFNFDDPNLIILPLAFGKRQGREFIWNDLLSLETGSLKLANGRVIEKTLYNRRTRQDEPALFVALTFERREVLDSSNIKPMNLIGVDRGENIPAVIALTDPEGCPLSRFKDSLGNPTHILRIGESYKEKQRTIQAKKEVEQRRAGGYSRKYASKAKNLADDMVRNTARDLLYYAVTQDAMLIFENLSRGFGRQGKRTFMAERQYTRMEDWLTAKLAYEGLPSKTYLSKTLAQYTSKTCSNCGFTITSADYDRVLEKLKKTATGWMTTINGKELKVEGQITYYNRYKRQNVVKDLSVELDRLSEESVNNDISSWTKGRSGEALSLLKKRFSHRPVQEKFVCLNCGFETHADEQAALNIARSWLFLRSQEYKKYQTNKTTGNTDKRAFVETWQSFYRKKLKEVWKPAV

SEQ ID NO: 42363 - protein, 978 aa, synthetic construct
  REGION 1..978: note = engineered CasX variant
QEIKRINKIRRRLVKDSNTKKAGKTGPMKTLLVRVMTPDLRERLENLRKKPPNIPQPISNTSRANLNKLLTDYTEMKKAILHVYWEEFQKDPVGLMSRVAQPASKKIDQNKLKPEMDEKGNLTTAGFACSQCGQPLFVYKLEQVSEKGKAYTNYFGRCNVAEHEKLILLAQLKPEKDSDEAVTYSLGKFGQRALDFYSIHVTKESTHPVKPLAQIAGNRYASHPVGKALSDACMGTIASFLSKYQDIIIEHQKVVKGNQKRLESLRELAGKENLEYPSVTLPPQPHTKEGVDAYNEVIARVRMWVNLNLWQKLKLSRDDAKPLLRLKGFPSFPLVERQANEVDWWDMVCNVKKLINEKKEDGKVFWQNLAGYKRQEALRPYLSSEEDRKKGKKFARYQLGDLLLHLEKKHGEDWGDVYDEAWERIDKKVEGLSKHIKLEEERRSEDAQSKAALTDWLRAKASFVIEGLKEADKDEFCRCELKLQKWYGDLRGKPFAIEAENSILDISGFSKQYNCAFIWQKDGVKKLNLYLIINYFKGGKLRFKKIKPEAFEANRFYTVINKKSGEIVPMEVNFNFDDPNLIILPLAFGKRQGREFIWNDLLSLETGSLKLANGRVIEKTLYNRRTRQDEPALFVALTFERREVLDSSNIKPMNLIGVDRGENIPAVIALTDPEGCPLSRFKDSLGNPTHILRIGESYKEKQRTIQAKKEVEQRRAGGYSRKYASKAKNLADDMVRNTARDLLYYAVTQDAMLIFENLSRGFGRQGKRTFMAERQYTRMEDWLTAKLAYEGLPSKTYLSKTLAQYTSKTCSNCGFTITSADYDRVLEKLKKTATGWMTTINGKELKVEGQITYYNRYKRQNVVKDLSVELDRLSEESVNNDISSWTKGRSGEALSLLKKRFSHRPVQEKFVCLNCGFETHADEQAALNIARSWLFLRSQEYKKYQTNKTTGNTDKRAFVETWQSFYRKKLKEVWKPAV

SEQ ID NO: 42364 - protein, 978 aa, synthetic construct
  REGION 1..978: note = engineered CasX variant
QEIKRINKIRRRLVKDSNTKKAGKTGPMKTLLVRVMTPDLRERLENLRKKPPNIPQPISNTSRANLNKLLTDYTEMKKAILHVYWEEFQKDPVGLMSRVAQPASKKIDQNKLKPEMDEKGNLTTAGFACSQCGQPLFVYKLEQVSEKGKAYTNYFGRCNVAEHEKLILLAQLKPEKDSDEAVTYSLGKFGQRALDFYSIHVTKESTHPVKPLAQIAGNRYASSPVGKALSDACMGTIASFLSKYQDIIIEHQKVVKGNQKRLESLRELAGKENLEYPSVTLPPQPHTKEGVDAYNEVIARVRMWVNLNLWQKLKLSRDDAKPLLRLKGFPSFPLVERQANEVDWWDMVCNVKKLINEKKEDGKVFWQNLAGYKRQEALRPYLSSEEDRKKGKKFARYQLGDLLLHLEKKHGEDWGDVYDEAWERIDKKVEGLSKHIKLEEERRSEDAQSKAALTDWLRAKASFVIEGLKEADKDEFCRCELKLQKWYGDLRGKPFAIEAENSILDISGFSKQYNCAFIWQKDGVKKLNLYLIINYFKGGKLRFKKIKPEAFEANRFYTVINKKSGEIVPMEVNFNFDDPNLIILPLAFGKRQGREFIWNDLLSLETGSLKLANGRVIEKTLYNRRTRQDEPALFVALTFERREVLDSSNIKPMNLIGVDRGENIPAVIALTDPEGCPLSRFKDSLGNPTHILRIGESYKEKQRTIQAKKEVEQRRAGGYSRKYASKAKNLADDMVRNTARDLLYYAVTQDAMLIFENLSRGFGRQGKRTFMAERQYTRMEDWLTAKLAYEGLPSKTYLSKTLAQYTSKTCSNCGFTITSADYDRVLEKLKKTATGWMTTINGKELKVEGQITYYNRYKRQNVVKDLSVELDRLSEESVNNDISSWTKGRSGEALSLLKKRFSHRPVQEKFVCLNCGFETHADEQAALNIARSWLFLRSQEYKKYQTNKTTGNTDKRAFVETWQSFYRKKLKEVWKPAV

SEQ ID NO: 42365 - protein, 978 aa, synthetic construct
  REGION 1..978: note = engineered CasX variant
QEIKRINKIRRRLVKDSNTKKAGKTGPMKTLLVRVMTPDLRERLENLRKKPPNIPQPISNTSRANLNKLLTDYTEMKKAILHVYWEEFQKDPVGLMSRVAQPASKKIDQNKLKPEMDEKGNLTTAGFACSQCGQPLFVYKLEQVSEKGKAYTNYFGRCNVAEHEKLILLAQLKPEKDSDEAVTYSLGKFGQRALDFYSIHVTKESTHPVKPLAQIAGNRYASTPVGKALSDACMGTIASFLSKYQDIIIEHQKVVKGNQKRLESLRELAGKENLEYPSVTLPPQPHTKEGVDAYNEVIARVRMWVNLNLWQKLKLSRDDAKPLLRLKGFPSFPLVERQANEVDWWDMVCNVKKLINEKKEDGKVFWQNLAGYKRQEALRPYLSSEEDRKKGKKFARYQLGDLLLHLEKKHGEDWGDVYDEAWERIDKKVEGLSKHIKLEEERRSEDAQSKAALTDWLRAKASFVIEGLKEADKDEFCRCELKLQKWYGDLRGKPFAIEAENSILDISGFSKQYNCAFIWQKDGVKKLNLYLIINYFKGGKLRFKKIKPEAFEANRFYTVINKKSGEIVPMEVNFNFDDPNLIILPLAFGKRQGREFIWNDLLSLETGSLKLANGRVIEKTLYNRRTRQDEPALFVALTFERREVLDSSNIKPMNLIGVDRGENIPAVIALTDPEGCPLSRFKDSLGNPTHILRIGESYKEKQRTIQAKKEVEQRRAGGYSRKYASKAKNLADDMVRNTARDLLYYAVTQDAMLIFENLSRGFGRQGKRTFMAERQYTRMEDWLTAKLAYEGLPSKTYLSKTLAQYTSKTCSNCGFTITSADYDRVLEKLKKTATGWMTTINGKELKVEGQITYYNRYKRQNVVKDLSVELDRLSEESVNNDISSWTKGRSGEALSLLKKRFSHRPVQEKFVCLNCGFETHADEQAALNIARSWLFLRSQEYKKYQTNKTTGNTDKRAFVETWQSFYRKKLKEVWKPAV

SEQ ID NO: 42366 - protein, 978 aa, synthetic construct
  REGION 1..978: note = engineered CasX variant
QEIKRINKIRRRLVKDSNTKKAGKTGPMKTLLVRVMTPDLRERLENLRKKPPNIPQPISNTSRANLNKLLTDYTEMKKAILHVYWEEFQKDPVGLMSRVAQPASKKIDQNKLKPEMDEKGNLTTAGFACSQCGQPLFVYKLEQVSEKGKAYTNYFGRCNVAEHEKLILLAQLKPEKDSDEAVTYSLGKFGQRALDFYSIHVTKESTHPVKPLAQIAGNRYASAPVGKALSDACMGTIASFLSKYQDIIIEHQKVVKGNQKRLESLRELAGKENLEYPSVTLPPQPHTKEGVDAYNEVIARVRMWVNLNLWQKLKLSRDDAKPLLRLKGFPSFPLVERQANEVDWWDMVCNVKKLINEKKEDGKVFWQNLAGYKRQEALRPYLSSEEDRKKGKKFARYQLGDLLLHLEKKHGEDWGDVYDEAWERIDKKVEGLSKHIKLEEERRSEDAQSKAALTDWLRAKASFVIEGLKEADKDEFCRCELKLQKWYGDLRGKPFAIEAENSILDISGFSKQYNCAFIWQKDGVKKLNLYLIINYFKGGKLRFKKIKPEAFEANRFYTVINKKSGEIVPMEVNFNFDDPNLIILPLAFGKRQGREFIWNDLLSLETGSLKLANGRVIEKTLYNRRTRQDEPALFVALTFERREVLDSSNIKPMNLIGVDRGENIPAVIALTDPEGCPLSRFKDSLGNPTHILRIGESYKEKQRTIQAKKEVEQRRAGGYSRKYASKAKNLADDMVRNTARDLLYYAVTQDAMLIFENLSRGFGRQGKRTFMAERQYTRMEDWLTAKLAYEGLPSKTYLSKTLAQYTSKTCSNCGFTITSADYDRVLEKLKKTATGWMTTINGKELKVEGQITYYNRYKRQNVVKDLSVELDRLSEESVNNDISSWTKGRSGEALSLLKKRFSHRPVQEKFVCLNCGFETHADEQAALNIARSWLFLRSQEYKKYQTNKTTGNTDKRAFVETWQSFYRKKLKEVWKPAV

SEQ ID NO: 42367 - protein, 978 aa, synthetic construct
  REGION 1..978: note = engineered CasX variant
QEIKRINKIRRRLVKDSNTKKAGKTGPMKTLLVRVMTPDLRERLENLRKKPPNIPQPISNTSRANLNKLLTDYTEMKKAILHVYWEEFQKDPVGLMSRVAQPASKKIDQNKLKPEMDEKGNLTTAGFACSQCGQPLFVYKLEQVSEKGKAYTNYFGRCNVAEHEKLILLAQLKPEKDSDEAVTYSLGKFGQRALDFYSIHVTKESTHPVKPLAQIAGNRYASVPVGKALSDACMGTIASFLSKYQDIIIEHQKVVKGNQKRLESLRELAGKENLEYPSVTLPPQPHTKEGVDAYNEVIARVRMWVNLNLWQKLKLSRDDAKPLLRLKGFPSFPLVERQANEVDWWDMVCNVKKLINEKKEDGKVFWQNLAGYKRQEALRPYLSSEEDRKKGKKFARYQLGDLLLHLEKKHGEDWGDVYDEAWERIDKKVEGLSKHIKLEEERRSEDAQSKAALTDWLRAKASFVIEGLKEADKDEFCRCELKLQKWYGDLRGKPFAIEAENSILDISGFSKQYNCAFIWQKDGVKKLNLYLIINYFKGGKLRFKKIKPEAFEANRFYTVINKKSGEIVPMEVNFNFDDPNLIILPLAFGKRQGREFIWNDLLSLETGSLKLANGRVIEKTLYNRRTRQDEPALFVALTFERREVLDSSNIKPMNLIGVDRGENIPAVIALTDPEGCPLSRFKDSLGNPTHILRIGESYKEKQRTIQAKKEVEQRRAGGYSRKYASKAKNLADDMVRNTARDLLYYAVTQDAMLIFENLSRGFGRQGKRTFMAERQYTRMEDWLTAKLAYEGLPSKTYLSKTLAQYTSKTCSNCGFTITSADYDRVLEKLKKTATGWMTTINGKELKVEGQITYYNRYKRQNVVKDLSVELDRLSEESVNNDISSWTKGRSGEALSLLKKRFSHRPVQEKFVCLNCGFETHADEQAALNIARSWLFLRSQEYKKYQTNKTTGNTDKRAFVETWQSFYRKKLKEVWKPAV

SEQ ID NO: 42368 - protein, 978 aa, synthetic construct
  REGION 1..978: note = engineered CasX variant
QEIKRINKIRRRLVKDSNTKKAGKTGPMKTLLVRVMTPDLRERLENLRKKPPNIPQPISNTSRANLNKLLTDYTEMKKAILHVYWEEFQKDPVGLMSRVAQPASKKIDQNKLKPEMDEKGNLTTAGFACSQCGQPLFVYKLEQVSEKGKAYTNYFGRCNVAEHEKLIKLAQLKPEKDSDEAVTYSLGKFGQRALDFYSIHVTKESTHPVKPLAQIAGNRYASGPVGKALSDACMGTIASFLSKYQDIIIEHQKVVKGNQKRLESLRELAGKENLEYPSVTLPPQPHTKEGVDAYNEVIARVRMWVNLNLWQKLKLSRDDAKPLLRLKGFPSFPLVERQANEVDWWDMVCNVKKLINEKKEDGKVFWQNLAGYKRQEALRPYLSSEEDRKKGKKFARYQLGDLLLHLEKKHGEDWGDVYDEAWERIDKKVEGLSKHIKLEEERRSEDAQSKAALTDWLRAKASFVIEGLKEADKDEFCRCELKLQKWYGDLRGKPFAIEAENSILDISGFSKQYNCAFIWQKDGVKKLNLYLIINYFKGGKLRFKKIKPEAFEANRFYTVINKKSGEIVPMEVNFNFDDPNLIILPLAFGKRQGREFIWNDLLSLETGSLKLANGRVIEKTLYNRRTRQDEPALFVALTFERREVLDSSNIKPMNLIGVDRGENIPAVIALTDPEGCPLSRFKDSLGNPTHILRIGESYKEKQRTIQAKKEVEQRRAGGYSRKYASKAKNLADDMVRNTARDLLYYAVTQDAMLIFENLSRGFGRQGKRTFMAERQYTRMEDWLTAKLAYEGLPSKTYLSKTLAQYTSKTCSNCGFTITSADYDRVLEKLKKTATGWMTTINGKELKVEGQITYYNRYKRQNVVKDLSVELDRLSEESVNNDISSWTKGRSGEALSLLKKRFSHRPVQEKFVCLNCGFETHADEQAALNIARSWLFLRSQEYKKYQTNKTTGNTDKRAFVETWQSFYRKKLKEVWKPAV

SEQ ID NO: 42369 - protein, 977 aa, synthetic construct
  REGION 1..977: note = engineered CasX variant
QEIKRINKIRRRLVKDSNTKKAGKTGPMKTLLVRVMTPDLRERLENLRKKPPNIPQPISNTSRANLNKLLTDYTEMKKAILHVYWEEFQKDPVGLMSRVAQPASKKIDQNKLKPEMDEKGNLTTAGFACSQCGQPLFVYKLEQVSEKGKAYTNYFGRCNVAEHEKLILLAQLKPEKDSDEAVTYSLGKFGQRALDFYSIHVTKESTHPVKPLAQIAGNRYASPVGKALSDACMGTIASFLSKYQDIIIEHQKVVKGNQKRLESLRELAGKENLEYPSVTLPPQPHTKEGVDAYNEVIARVRMWVNLNLWQKLKLSRDDAKPLLRLKGFPSFPLVERQANEVDWWDMVCNVKKLINEKKEDGKVFWQNLAGYKRQEALRPYLSSEEDRKKGKKFARYQLGDLLLHLEKKHGEDWGDVYDEAWERIDKKVEGLSKHIKLEEERRSEDAQSKAALTDWLRAKASFVIEGLKEADKDEFCRCELKLQKWYGDLRGKPFAIEAENSILDISGFSKQYNCAFIWQKDGVKKLNLYLIINYFKGGKLRFKKIKPEAFEANRFYTVINKKSGEIVPMEVNFNFDDPNLIILPLAFGKRQGREFIWNDLLSLETGSLKLANGRVIEKTLYNRRTRQDEPALFVALTFERREVLDSSNIKPMNLIGVDRGENIPAVIALTDPEGCPLSRFKDSLGNPTHILRIGESYKEKQRTIQAKKEVEQRRAGGYSRKYASKAKNLADDMVRNTARDLLYYAVTQDAMLIFENLSRGFGRQGKRTFMAERQYTRMEDWLTAKLAYEGLPSKTYLSKTLAQYTSKTCSNCGFTITSADYDRVLEKLKKTATGWMTTINGKELKVEGQITYYNRYKRQNVVKDLSVELDRLSEESVNNDISSWTKGRSGEALSLLKKRFSHRPVQEKFVCLNCGFETHADEQAALNIARSWLFLRSQEYKKYQTNKTTGNTDKRAFVETWQSFYRKKLKEVWKPAV

SEQ ID NO: 42370 - protein, 978 aa, synthetic construct
  REGION 1..978: note = engineered CasX variant
QEIKRINKIRRRLVKDSNTKKAGKTGPMKTLLVRVMTPDLRERLENLRKKPPNIPQPISNTSRANLNKLLTDYTEMKKAILHVYWEEFQKDPVGLMSRVAQPASKKIDQNKLKPEMDEKGNLTTAGFACSQCGQPLFVYKLEQVSEKGKAYTNYFGRCNVAEHEKLILLAQLKPEKDSDEAVTYSLGKFGQRALDFYSIHVTKESTHPVKPLAQIAGNRYASYPVGKALSDACMGTIASFLSKYQDIIIEHQKVVKGNQKRLESLRELAGKENLEYPSVTLPPQPHTKEGVDAYNEVIARVRMWVNLNLWQKLKLSRDDAKPLLRLKGFPSFPLVERQANEVDWWDMVCNVKKLINEKKEDGKVFWQNLAGYKRQEALRPYLSSEEDRKKGKKFARYQLGDLLLHLEKKHGEDWGKVYGEAWERIDKKVEGLSKHIKLEEERRSEDAQSKAALTDWLRAKASFVIEGLKEADKDEFCRCELKLQKWYGDLRGKPFAIEAENSILDISGFSKQYNCAFIWQKDGVKKLNLYLIINYFKGGKLRFKKIKPEAFEANRFYTVINKKSGEIVPMEVNFNFDDPNLIILPLAFGKRQGREFIWNDLLSLETGSLKLANGRVIEKTLYNRRTRQDEPALFVALTFERREVLDSSNIKPMNLIGVDRGENIPAVIALTDPEGCPLSRFKDSLGNPTHILRIGESYKEKQRTIQAKKEVEQRRAGGYSRKYASKAKNLADDMVRNTARDLLYYAVTQDAMLIFENLSRGFGRQGKRTFMAERQYTRMEDWLTAKLAYEGLPSKTYLSKTLAQYTSKTCSNCGFTITSADYDRVLEKLKKTATGWMTTINGKELKVEGQITYYNRYKRQNVVKDLSVELDRLSEESVNNDISSWTKGRSGEALSLLKKRFSHRPVQEKFVCLNCGFETHADEQAALNIARSWLFLRSQEYKKYQTNKTTGNTDKRAFVETWQSFYRKKLKEVWKPAV

SEQ ID NO: 42371 - protein, 978 aa, synthetic construct
  REGION 1..978: note = engineered CasX variant
QEIKRINKIRRRLVKDSNTKKAGKTGPMKTLLVRVMTPDLRERLENLRKKPPNIPQPISNTSRANLNKLLTDYTEMKKAILHVYWEEFQKDPVGLMSRVAQPASKKIDQNKLKPEMDEKGNLTTAGFACSQCGQPLFVYKLEQVSEKGKAYTNYFGRCNVAEHEKLILLAQLKPEKDSDEAVTYSLGKFGQRALDFYSIHVTKESTHPVKPLAQIAGNRYASHPVGKALSDACMGTIASFLSKYQDIIIEHQKVVKGNQKRLESLRELAGKENLEYPSVTLPPQPHTKEGVDAYNEVIARVRMWVNLNLWQKLKLSRDDAKPLLRLKGFPSFPLVERQANEVDWWDMVCNVKKLINEKKEDGKVFWQNLAGYKRQEALRPYLSSEEDRKKGKKFARYQLGDLLLHLEKKHGEDWGKVYGEAWERIDKKVEGLSKHIKLEEERRSEDAQSKAALTDWLRAKASFVIEGLKEADKDEFCRCELKLQKWYGDLRGKPFAIEAENSILDISGFSKQYNCAFIWQKDGVKKLNLYLIINYFKGGKLRFKKIKPEAFEANRFYTVINKKSGEIVPMEVNFNFDDPNLIILPLAFGKRQGREFIWNDLLSLETGSLKLANGRVIEKTLYNRRTRQDEPALFVALTFERREVLDSSNIKPMNLIGVDRGENIPAVIALTDPEGCPLSRFKDSLGNPTHILRIGESYKEKQRTIQAKKEVEQRRAGGYSRKYASKAKNLADDMVRNTARDLLYYAVTQDAMLIFENLSRGFGRQGKRTFMAERQYTRMEDWLTAKLAYEGLPSKTYLSKTLAQYTSKTCSNCGFTITSADYDRVLEKLKKTATGWMTTINGKELKVEGQITYYNRYKRQNVVKDLSVELDRLSEESVNNDISSWTKGRSGEALSLLKKRFSHRPVQEKFVCLNCGFETHADEQAALNIARSWLFLRSQEYKKYQTNKTTGNTDKRAFVETWQSFYRKKLKEVWKPAV

SEQ ID NO: 42372 - protein, 978 aa, synthetic construct
  REGION 1..978: note = engineered CasX variant
QEIKRINKIRRRLVKDSNTKKAGKTGPMKTLLVRVMTPDLRERLENLRKKPPNIPQPISNTSRANLNKLLTDYTEMKKAILHVYWEEFQKDPVGLMSRVAQPASKKIDQNKLKPEMDEKGNLTTAGFACSQCGQPLFVYKLEQVSEKGKAYTNYFGRCNVAEHEKLILLAQLKPEKDSDEAVTYSLGKFGQRALDFYSIHVTKESTHPVKPLAQIAGNRYASSPVGKALSDACMGTIASFLSKYQDIIIEHQKVVKGNQKRLESLRELAGKENLEYPSVTLPPQPHTKEGVDAYNEVIARVRMWVNLNLWQKLKLSRDDAKPLLRLKGFPSFPLVERQANEVDWWDMVCNVKKLINEKKEDGKVFWQNLAGYKRQEALRPYLSSEEDRKKGKKFARYQLGDLLLHLEKKHGEDWGKVYGEAWERIDKKVEGLSKHIKLEEERRSEDAQSKAALTDWLRAKASFVIEGLKEADKDEFCRCELKLQKWYGDLRGKPFAIEAENSILDISGFSKQYNCAFIWQKDGVKKLNLYLIINYFKGGKLRFKKIKPEAFEANRFYTVINKKSGEIVPMEVNFNFDDPNLIILPLAFGKRQGREFIWNDLLSLETGSLKLANGRVIEKTLYNRRTRQDEPALFVALTFERREVLDSSNIKPMNLIGVDRGENIPAVIALTDPEGCPLSRFKDSLGNPTHILRIGESYKEKQRTIQAKKEVEQRRAGGYSRKYASKAKNLADDMVRNTARDLLYYAVTQDAMLIFENLSRGFGRQGKRTFMAERQYTRMEDWLTAKLAYEGLPSKTYLSKTLAQYTSKTCSNCGFTITSADYDRVLEKLKKTATGWMTTINGKELKVEGQITYYNRYKRQNVVKDLSVELDRLSEESVNNDISSWTKGRSGEALSLLKKRFSHRPVQEKFVCLNCGFETHADEQAALNIARSWLFLRSQEYKKYQTNKTTGNTDKRAFVETWQSFYRKKLKEVWKPAV

SEQ ID NO: 42373 - protein, 978 aa, synthetic construct
  REGION 1..978: note = engineered CasX variant
QEIKRINKIRRRLVKDSNTKKAGKTGPMKTLLVRVMTPDLRERLENLRKKPPNIPQPISNTSRANLNKLLTDYTEMKKAILHVYWEEFQKDPVGLMSRVAQPASKKIDQNKLKPEMDEKGNLTTAGFACSQCGQPLFVYKLEQVSEKGKAYTNYFGRCNVAEHEKLILLAQLKPEKDSDEAVTYSLGKFGQRALDFYSIHVTKESTHPVKPLAQIAGNRYASTPVGKALSDACMGTIASFLSKYQDIIIEHQKVVKGNQKRLESLRELAGKENLEYPSVTLPPQPHTKEGVDAYNEVIARVRMWVNLNLWQKLKLSRDDAKPLLRLKGFPSFPLVERQANEVDWWDMVCNVKKLINEKKEDGKVFWQNLAGYKRQEALRPYLSSEEDRKKGKKFARYQLGDLLLHLEKKHGEDWGKVYGEAWERIDKKVEGLSKHIKLEEERRSEDAQSKAALTDWLRAKASFVIEGLKEADKDEFCRCELKLQKWYGDLRGKPFAIEAENSILDISGFSKQYNCAFIWQKDGVKKLNLYLIINYFKGGKLRFKKIKPEAFEANRFYTVINKKSGEIVPMEVNFNFDDPNLIILPLAFGKRQGREFIWNDLLSLETGSLKLANGRVIEKTLYNRRTRQDEPALFVALTFERREVLDSSNIKPMNLIGVDRGENIPAVIALTDPEGCPLSRFKDSLGNPTHILRIGESYKEKQRTIQAKKEVEQRRAGGYSRKYASKAKNLADDMVRNTARDLLYYAVTQDAMLIFENLSRGFGRQGKRTFMAERQYTRMEDWLTAKLAYEGLPSKTYLSKTLAQYTSKTCSNCGFTITSADYDRVLEKLKKTATGWMTTINGKELKVEGQITYYNRYKRQNVVKDLSVELDRLSEESVNNDISSWTKGRSGEALSLLKKRFSHRPVQEKFVCLNCGFETHADEQAALNIARSWLFLRSQEYKKYQTNKTTGNTDKRAFVETWQSFYRKKLKEVWKPAV

SEQ ID NO: 42374 - protein, 978 aa, synthetic construct
  REGION 1..978: note = engineered CasX variant
QEIKRINKIRRRLVKDSNTKKAGKTGPMKTLLVRVMTPDLRERLENLRKKPPNIPQPISNTSRANLNKLLTDYTEMKKAILHVYWEEFQKDPVGLMSRVAQPASKKIDQNKLKPEMDEKGNLTTAGFACSQCGQPLFVYKLEQVSEKGKAYTNYFGRCNVAEHEKLILLAQLKPEKDSDEAVTYSLGKFGQRALDFYSIHVTKESTHPVKPLAQIAGNRYASAPVGKALSDACMGTIASFLSKYQDIIIEHQKVVKGNQKRLESLRELAGKENLEYPSVTLPPQPHTKEGVDAYNEVIARVRMWVNLNLWQKLKLSRDDAKPLLRLKGFPSFPLVERQANEVDWWDMVCNVKKLINEKKEDGKVFWQNLAGYKRQEALRPYLSSEEDRKKGKKFARYQLGDLLLHLEKKHGEDWGKVYGEAWERIDKKVEGLSKHIKLEEERRSEDAQSKAALTDWLRAKASFVIEGLKEADKDEFCRCELKLQKWYGDLRGKPFAIEAENSILDISGFSKQYNCAFIWQKDGVKKLNLYLIINYFKGGKLRFKKIKPEAFEANRFYTVINKKSGEIVPMEVNFNFDDPNLIILPLAFGKRQGREFIWNDLLSLETGSLKLANGRVIEKTLYNRRTRQDEPALFVALTFERREVLDSSNIKPMNLIGVDRGENIPAVIALTDPEGCPLSRFKDSLGNPTHILRIGESYKEKQRTIQAKKEVEQRRAGGYSRKYASKAKNLADDMVRNTARDLLYYAVTQDAMLIFENLSRGFGRQGKRTFMAERQYTRMEDWLTAKLAYEGLPSKTYLSKTLAQYTSKTCSNCGFTITSADYDRVLEKLKKTATGWMTTINGKELKVEGQITYYNRYKRQNVVKDLSVELDRLSEESVNNDISSWTKGRSGEALSLLKKRFSHRPVQEKFVCLNCGFETHADEQAALNIARSWLFLRSQEYKKYQTNKTTGNTDKRAFVETWQSFYRKKLKEVWKPAV

SEQ ID NO: 42375 - protein, 978 aa, synthetic construct
  REGION 1..978: note = engineered CasX variant
QEIKRINKIRRRLVKDSNTKKAGKTGPMKTLLVRVMTPDLRERLENLRKKPPNIPQPISNTSRANLNKLLTDYTEMKKAILHVYWEEFQKDPVGLMSRVAQPASKKIDQNKLKPEMDEKGNLTTAGFACSQCGQPLFVYKLEQVSEKGKAYTNYFGRCNVAEHEKLILLAQLKPEKDSDEAVTYSLGKFGQRALDFYSIHVTKESTHPVKPLAQIAGNRYASVPVGKALSDACMGTIASFLSKYQDIIIEHQKVVKGNQKRLESLRELAGKENLEYPSVTLPPQPHTKEGVDAYNEVIARVRMWVNLNLWQKLKLSRDDAKPLLRLKGFPSFPLVERQANEVDWWDMVCNVKKLINEKKEDGKVFWQNLAGYKRQEALRPYLSSEEDRKKGKKFARYQLGDLLLHLEKKHGEDWGKVYGEAWERIDKKVEGLSKHIKLEEERRSEDAQSKAALTDWLRAKASFVIEGLKEADKDEFCRCELKLQKWYGDLRGKPFAIEAENSILDISGFSKQYNCAFIWQKDGVKKLNLYLIINYFKGGKLRFKKIKPEAFEANRFYTVINKKSGEIVPMEVNFNFDDPNLIILPLAFGKRQGREFIWNDLLSLETGSLKLANGRVIEKTLYNRRTRQDEPALFVALTFERREVLDSSNIKPMNLIGVDRGENIPAVIALTDPEGCPLSRFKDSLGNPTHILRIGESYKEKQRTIQAKKEVEQRRAGGYSRKYASKAKNLADDMVRNTARDLLYYAVTQDAMLIFENLSRGFGRQGKRTFMAERQYTRMEDWLTAKLAYEGLPSKTYLSKTLAQYTSKTCSNCGFTITSADYDRVLEKLKKTATGWMTTINGKELKVEGQITYYNRYKRQNVVKDLSVELDRLSEESVNNDISSWTKGRSGEALSLLKKRFSHRPVQEKFVCLNCGFETHADEQAALNIARSWLFLRSQEYKKYQTNKTTGNTDKRAFVETWQSFYRKKLKEVWKPAV

SEQ ID NO: 42376 - protein, 978 aa, synthetic construct
  REGION 1..978: note = engineered CasX variant
QEIKRINKIRRRLVKDSNTKKAGKTGPMKTLLVRVMTPDLRERLENLRKKPPNIPQPISNTSRANLNKLLTDYTEMKKAILHVYWEEFQKDPVGLMSRVAQPASKKIDQNKLKPEMDEKGNLTTAGFACSQCGQPLFVYKLEQVSEKGKAYTNYFGRCNVAEHEKLIKLAQLKPEKDSDEAVTYSLGKFGQRALDFYSIHVTKESTHPVKPLAQIAGNRYASGPVGKALSDACMGTIASFLSKYQDIIIEHQKVVKGNQKRLESLRELAGKENLEYPSVTLPPQPHTKEGVDAYNEVIARVRMWVNLNLWQKLKLSRDDAKPLLRLKGFPSFPLVERQANEVDWWDMVCNVKKLINEKKEDGKVFWQNLAGYKRQEALRPYLSSEEDRKKGKKFARYQLGDLLLHLEKKHGEDWGKVYGEAWERIDKKVEGLSKHIKLEEERRSEDAQSKAALTDWLRAKASFVIEGLKEADKDEFCRCELKLQKWYGDLRGKPFAIEAENSILDISGFSKQYNCAFIWQKDGVKKLNLYLIINYFKGGKLRFKKIKPEAFEANRFYTVINKKSGEIVPMEVNFNFDDPNLIILPLAFGKRQGREFIWNDLLSLETGSLKLANGRVIEKTLYNRRTRQDEPALFVALTFERREVLDSSNIKPMNLIGVDRGENIPAVIALTDPEGCPLSRFKDSLGNPTHILRIGESYKEKQRTIQAKKEVEQRRAGGYSRKYASKAKNLADDMVRNTARDLLYYAVTQDAMLIFENLSRGFGRQGKRTFMAERQYTRMEDWLTAKLAYEGLPSKTYLSKTLAQYTSKTCSNCGFTITSADYDRVLEKLKKTATGWMTTINGKELKVEGQITYYNRYKRQNVVKDLSVELDRLSEESVNNDISSWTKGRSGEALSLLKKRFSHRPVQEKFVCLNCGFETHADEQAALNIARSWLFLRSQEYKKYQTNKTTGNTDKRAFVETWQSFYRKKLKEVWKPAV

SEQ ID NO: 42377 - protein, 977 aa, synthetic construct
  REGION 1..977: note = engineered CasX variant
QEIKRINKIRRRLVKDSNTKKAGKTGPMKTLLVRVMTPDLRERLENLRKKPPNIPQPISNTSRANLNKLLTDYTEMKKAILHVYWEEFQKDPVGLMSRVAQPASKKIDQNKLKPEMDEKGNLTTAGFACSQCGQPLFVYKLEQVSEKGKAYTNYFGRCNVAEHEKLILLAQLKPEKDSDEAVTYSLGKFGQRALDFYSIHVTKESTHPVKPLAQIAGNRYASPVGKALSDACMGTIASFLSKYQDIIIEHQKVVKGNQKRLESLRELAGKENLEYPSVTLPPQPHTKEGVDAYNEVIARVRMWVNLNLWQKLKLSRDDAKPLLRLKGFPSFPLVERQANEVDWWDMVCNVKKLINEKKEDGKVFWQNLAGYKRQEALRPYLSSEEDRKKGKKFARYQLGDLLLHLEKKHGEDWGKVYGEAWERIDKKVEGLSKHIKLEEERRSEDAQSKAALTDWLRAKASFVIEGLKEADKDEFCRCELKLQKWYGDLRGKPFAIEAENSILDISGFSKQYNCAFIWQKDGVKKLNLYLIINYFKGGKLRFKKIKPEAFEANRFYTVINKKSGEIVPMEVNFNFDDPNLIILPLAFGKRQGREFIWNDLLSLETGSLKLANGRVIEKTLYNRRTRQDEPALFVALTFERREVLDSSNIKPMNLIGVDRGENIPAVIALTDPEGCPLSRFKDSLGNPTHILRIGESYKEKQRTIQAKKEVEQRRAGGYSRKYASKAKNLADDMVRNTARDLLYYAVTQDAMLIFENLSRGFGRQGKRTFMAERQYTRMEDWLTAKLAYEGLPSKTYLSKTLAQYTSKTCSNCGFTITSADYDRVLEKLKKTATGWMTTINGKELKVEGQITYYNRYKRQNVVKDLSVELDRLSEESVNNDISSWTKGRSGEALSLLKKRFSHRPVQEKFVCLNCGFETHADEQAALNIARSWLFLRSQEYKKYQTNKTTGNTDKRAFVETWQSFYRKKLKEVWKPAV

SEQ ID NO: 42378 - protein, 978 aa, synthetic construct
  REGION 1..978: note = engineered CasX variant
QEIKRINKIRRRLVKDSNTKKAGKTGPMKTLLVRVMTPDLRERLENLRKKPPNIPQPISNTSRANLNKLLTDYTEMKKAILHVYWEEFQKDPVGLMSRVAQPASKKIDQNKLKPEMDEKGNLTTAGFACSQCGQPLFVYKLEQVSEKGKAYTNYFGRCNVAEHEKLILLAQLKPEKDSDEAVTYSLGKFGQRALDFYSIHVTKESTHPVKPLAQIAGNRYASYPVGKALSDACMGTIASFLSKYQDIIIEHQKVVKGNQKRLESLRELAGKENLEYPSVTLPPQPHTKEGVDAYNEVIARVRMWVNLNLWQKLKLSRDDAKPLLRLKGFPSFPLVERQANEVDWWDMVCNVKKLINEKKEDGKVFWQNLAGYKRQEALRPYLSSEEDRKKGKKFARYQLGDLLLHLEKKHGEDWGKVYDEAWERIDKKVEGLSKHIKLEEERRSEDAQSKAALTDWLRAKASFVIEGKKEADKDEFCRCELKLQKWYGDLRGKPFAIEAENSILDISGFSKQYNCAFIWQKDGVKKLNLYLIINYFKGGKLRFKKIKPEAFEANRFYTVINKKSGEIVPMEVNFNFDDPNLIILPLAFGKRQGREFIWNDLLSLETGSLKLANGRVIEKTLYNRRTRQDEPALFVALTFERREVLDSSNIKPMNLIGVDRGENIPAVIALTDPEGCPLSRFKDSLGNPTHILRIGESYKEKQRTIQAKKEVEQRRAGGYSRKYASKAKNLADDMVRNTARDLLYYAVTQDAMLIFENLSRGFGRQGKRTFMAERQYTRMEDWLTAKLAYEGLPSKTYLSKTLAQYTSKTCSNCGFTITSADYDRVLEKLKKTATGWMTTINGKELKVEGQITYYNRYKRQNVVKDLSVELDRLSEESVNNDISSWTKGRSGEALSLLKKRFSHRPVQEKFVCLNCGFETHADEQAALNIARSWLFLRSQEYKKYQTNKTTGNTDKRAFVETWQSFYRKKLKEVWKPAV

SEQ ID NO: 42379 - protein, 978 aa, synthetic construct
  REGION 1..978: note = engineered CasX variant
QEIKRINKIRRRLVKDSNTKKAGKTGPMKTLLVRVMTPDLRERLENLRKKPPNIPQPISNTSRANLNKLLTDYTEMKKAILHVYWEEFQKDPVGLMSRVAQPASKKIDQNKLKPEMDEKGNLTTAGFACSQCGQPLFVYKLEQVSEKGKAYTNYFGRCNVAEHEKLILLAQLKPEKDSDEAVTYSLGKFGQRALDFYSIHVTKESTHPVKPLAQIAGNRYASHPVGKALSDACMGTIASFLSKYQDIIIEHQKVVKGNQKRLESLRELAGKENLEYPSVTLPPQPHTKEGVDAYNEVIARVRMWVNLNLWQKLKLSRDDAKPLLRLKGFPSFPLVERQANEVDWWDMVCNVKKLINEKKEDGKVFWQNLAGYKRQEALRPYLSSEEDRKKGKKFARYQLGDLLLHLEKKHGEDWGKVYDEAWERIDKKVEGLSKHIKLEEERRSEDAQSKAALTDWLRAKASFVIEGKKEADKDEFCRCELKLQKWYGDLRGKPFAIEAENSILDISGFSKQYNCAFIWQKDGVKKLNLYLIINYFKGGKLRFKKIKPEAFEANRFYTVINKKSGEIVPMEVNFNFDDPNLIILPLAFGKRQGREFIWNDLLSLETGSLKLANGRVIEKTLYNRRTRQDEPALFVALTFERREVLDSSNIKPMNLIGVDRGENIPAVIALTDPEGCPLSRFKDSLGNPTHILRIGESYKEKQRTIQAKKEVEQRRAGGYSRKYASKAKNLADDMVRNTARDLLYYAVTQDAMLIFENLSRGFGRQGKRTFMAERQYTRMEDWLTAKLAYEGLPSKTYLSKTLAQYTSKTCSNCGFTITSADYDRVLEKLKKTATGWMTTINGKELKVEGQITYYNRYKRQNVVKDLSVELDRLSEESVNNDISSWTKGRSGEALSLLKKRFSHRPVQEKFVCLNCGFETHADEQAALNIARSWLFLRSQEYKKYQTNKTTGNTDKRAFVETWQSFYRKKLKEVWKPAV

SEQ ID NO: 42380 - protein, 978 aa, synthetic construct
  REGION 1..978: note = engineered CasX variant
QEIKRINKIRRRLVKDSNTKKAGKTGPMKTLLVRVMTPDLRERLENLRKKPPNIPQPISNTSRANLNKLLTDYTEMKKAILHVYWEEFQKDPVGLMSRVAQPASKKIDQNKLKPEMDEKGNLTTAGFACSQCGQPLFVYKLEQVSEKGKAYTNYFGRCNVAEHEKLILLAQLKPEKDSDEAVTYSLGKFGQRALDFYSIHVTKESTHPVKPLAQIAGNRYASSPVGKALSDACMGTIASFLSKYQDIIIEHQKVVKGNQKRLESLRELAGKENLEYPSVTLPPQPHTKEGVDAYNEVIARVRMWVNLNLWQKLKLSRDDAKPLLRLKGFPSFPLVERQANEVDWWDMVCNVKKLINEKKEDGKVFWQNLAGYKRQEALRPYLSSEEDRKKGKKFARYQLGDLLLHLEKKHGEDWGKVYDEAWERIDKKVEGLSKHIKLEEERRSEDAQSKAALTDWLRAKASFVIEGKKEADKDEFCRCELKLQKWYGDLRGKPFAIEAENSILDISGFSKQYNCAFIWQKDGVKKLNLYLIINYFKGGKLRFKKIKPEAFEANRFYTVINKKSGEIVPMEVNFNFDDPNLIILPLAFGKRQGREFIWNDLLSLETGSLKLANGRVIEKTLYNRRTRQDEPALFVALTFERREVLDSSNIKPMNLIGVDRGENIPAVIALTDPEGCPLSRFKDSLGNPTHILRIGESYKEKQRTIQAKKEVEQRRAGGYSRKYASKAKNLADDMVRNTARDLLYYAVTQDAMLIFENLSRGFGRQGKRTFMAERQYTRMEDWLTAKLAYEGLPSKTYLSKTLAQYTSKTCSNCGFTITSADYDRVLEKLKKTATGWMTTINGKELKVEGQITYYNRYKRQNVVKDLSVELDRLSEESVNNDISSWTKGRSGEALSLLKKRFSHRPVQEKFVCLNCGFETHADEQAALNIARSWLFLRSQEYKKYQTNKTTGNTDKRAFVETWQSFYRKKLKEVWKPAV

SEQ ID NO: 42381 - protein, 978 aa, synthetic construct
  REGION 1..978: note = engineered CasX variant
QEIKRINKIRRRLVKDSNTKKAGKTGPMKTLLVRVMTPDLRERLENLRKKPPNIPQPISNTSRANLNKLLTDYTEMKKAILHVYWEEFQKDPVGLMSRVAQPASKKIDQNKLKPEMDEKGNLTTAGFACSQCGQPLFVYKLEQVSEKGKAYTNYFGRCNVAEHEKLILLAQLKPEKDSDEAVTYSLGKFGQRALDFYSIHVTKESTHPVKPLAQIAGNRYASTPVGKALSDACMGTIASFLSKYQDIIIEHQKVVKGNQKRLESLRELAGKENLEYPSVTLPPQPHTKEGVDAYNEVIARVRMWVNLNLWQKLKLSRDDAKPLLRLKGFPSFPLVERQANEVDWWDMVCNVKKLINEKKEDGKVFWQNLAGYKRQEALRPYLSSEEDRKKGKKFARYQLGDLLLHLEKKHGEDWGKVYDEAWERIDKKVEGLSKHIKLEEERRSEDAQSKAALTDWLRAKASFVIEGKKEADKDEFCRCELKLQKWYGDLRGKPFAIEAENSILDISGFSKQYNCAFIWQKDGVKKLNLYLIINYFKGGKLRFKKIKPEAFEANRFYTVINKKSGEIVPMEVNFNFDDPNLIILPLAFGKRQGREFIWNDLLSLETGSLKLANGRVIEKTLYNRRTRQDEPALFVALTFERREVLDSSNIKPMNLIGVDRGENIPAVIALTDPEGCPLSRFKDSLGNPTHILRIGESYKEKQRTIQAKKEVEQRRAGGYSRKYASKAKNLADDMVRNTARDLLYYAVTQDAMLIFENLSRGFGRQGKRTFMAERQYTRMEDWLTAKLAYEGLPSKTYLSKTLAQYTSKTCSNCGFTITSADYDRVLEKLKKTATGWMTTINGKELKVEGQITYYNRYKRQNVVKDLSVELDRLSEESVNNDISSWTKGRSGEALSLLKKRFSHRPVQEKFVCLNCGFETHADEQAALNIARSWLFLRSQEYKKYQTNKTTGNTDKRAFVETWQSFYRKKLKEVWKPAV

SEQ ID NO: 42382 - protein, 978 aa, synthetic construct
  REGION 1..978: note = engineered CasX variant
QEIKRINKIRRRLVKDSNTKKAGKTGPMKTLLVRVMTPDLRERLENLRKKPPNIPQPISNTSRANLNKLLTDYTEMKKAILHVYWEEFQKDPVGLMSRVAQPASKKIDQNKLKPEMDEKGNLTTAGFACSQCGQPLFVYKLEQVSEKGKAYTNYFGRCNVAEHEKLILLAQLKPEKDSDEAVTYSLGKFGQRALDFYSIHVTKESTHPVKPLAQIAGNRYASAPVGKALSDACMGTIASFLSKYQDIIIEHQKVVKGNQKRLESLRELAGKENLEYPSVTLPPQPHTKEGVDAYNEVIARVRMWVNLNLWQKLKLSRDDAKPLLRLKGFPSFPLVERQANEVDWWDMVCNVKKLINEKKEDGKVFWQNLAGYKRQEALRPYLSSEEDRKKGKKFARYQLGDLLLHLEKKHGEDWGKVYDEAWERIDKKVEGLSKHIKLEEERRSEDAQSKAALTDWLRAKASFVIEGKKEADKDEFCRCELKLQKWYGDLRGKPFAIEAENSILDISGFSKQYNCAFIWQKDGVKKLNLYLIINYFKGGKLRFKKIKPEAFEANRFYTVINKKSGEIVPMEVNFNFDDPNLIILPLAFGKRQGREFIWNDLLSLETGSLKLANGRVIEKTLYNRRTRQDEPALFVALTFERREVLDSSNIKPMNLIGVDRGENIPAVIALTDPEGCPLSRFKDSLGNPTHILRIGESYKEKQRTIQAKKEVEQRRAGGYSRKYASKAKNLADDMVRNTARDLLYYAVTQDAMLIFENLSRGFGRQGKRTFMAERQYTRMEDWLTAKLAYEGLPSKTYLSKTLAQYTSKTCSNCGFTITSADYDRVLEKLKKTATGWMTTINGKELKVEGQITYYNRYKRQNVVKDLSVELDRLSEESVNNDISSWTKGRSGEALSLLKKRFSHRPVQEKFVCLNCGFETHADEQAALNIARSWLFLRSQEYKKYQTNKTTGNTDKRAFVETWQSFYRKKLKEVWKPAV

SEQ ID NO: 42383 - protein, 978 aa, synthetic construct
  REGION 1..978: note = engineered CasX variant
QEIKRINKIRRRLVKDSNTKKAGKTGPMKTLLVRVMTPDLRERLENLRKKPPNIPQPISNTSRANLNKLLTDYTEMKKAILHVYWEEFQKDPVGLMSRVAQPASKKIDQNKLKPEMDEKGNLTTAGFACSQCGQPLFVYKLEQVSEKGKAYTNYFGRCNVAEHEKLILLAQLKPEKDSDEAVTYSLGKFGQRALDFYSIHVTKESTHPVKPLAQIAGNRYASVPVGKALSDACMGTIASFLSKYQDIIIEHQKVVKGNQKRLESLRELAGKENLEYPSVTLPPQPHTKEGVDAYNEVIARVRMWVNLNLWQKLKLSRDDAKPLLRLKGFPSFPLVERQANEVDWWDMVCNVKKLINEKKEDGKVFWQNLAGYKRQEALRPYLSSEEDRKKGKKFARYQLGDLLLHLEKKHGEDWGKVYDEAWERIDKKVEGLSKHIKLEEERRSEDAQSKAALTDWLRAKASFVIEGKKEADKDEFCRCELKLQKWYGDLRGKPFAIEAENSILDISGFSKQYNCAFIWQKDGVKKLNLYLIINYFKGGKLRFKKIKPEAFEANRFYTVINKKSGEIVPMEVNFNFDDPNLIILPLAFGKRQGREFIWNDLLSLETGSLKLANGRVIEKTLYNRRTRQDEPALFVALTFERREVLDSSNIKPMNLIGVDRGENIPAVIALTDPEGCPLSRFKDSLGNPTHILRIGESYKEKQRTIQAKKEVEQRRAGGYSRKYASKAKNLADDMVRNTARDLLYYAVTQDAMLIFENLSRGFGRQGKRTFMAERQYTRMEDWLTAKLAYEGLPSKTYLSKTLAQYTSKTCSNCGFTITSADYDRVLEKLKKTATGWMTTINGKELKVEGQITYYNRYKRQNVVKDLSVELDRLSEESVNNDISSWTKGRSGEALSLLKKRFSHRPVQEKFVCLNCGFETHADEQAALNIARSWLFLRSQEYKKYQTNKTTGNTDKRAFVETWQSFYRKKLKEVWKPAV

SEQ ID NO: 42384 - protein, 978 aa, synthetic construct
  REGION 1..978: note = engineered CasX variant
QEIKRINKIRRRLVKDSNTKKAGKTGPMKTLLVRVMTPDLRERLENLRKKPPNIPQPISNTSRANLNKLLTDYTEMKKAILHVYWEEFQKDPVGLMSRVAQPASKKIDQNKLKPEMDEKGNLTTAGFACSQCGQPLFVYKLEQVSEKGKAYTNYFGRCNVAEHEKLIKLAQLKPEKDSDEAVTYSLGKFGQRALDFYSIHVTKESTHPVKPLAQIAGNRYASGPVGKALSDACMGTIASFLSKYQDIIIEHQKVVKGNQKRLESLRELAGKENLEYPSVTLPPQPHTKEGVDAYNEVIARVRMWVNLNLWQKLKLSRDDAKPLLRLKGFPSFPLVERQANEVDWWDMVCNVKKLINEKKEDGKVFWQNLAGYKRQEALRPYLSSEEDRKKGKKFARYQLGDLLLHLEKKHGEDWGKVYDEAWERIDKKVEGLSKHIKLEEERRSEDAQSKAALTDWLRAKASFVIEGKKEADKDEFCRCELKLQKWYGDLRGKPFAIEAENSILDISGFSKQYNCAFIWQKDGVKKLNLYLIINYFKGGKLRFKKIKPEAFEANRFYTVINKKSGEIVPMEVNFNFDDPNLIILPLAFGKRQGREFIWNDLLSLETGSLKLANGRVIEKTLYNRRTRQDEPALFVALTFERREVLDSSNIKPMNLIGVDRGENIPAVIALTDPEGCPLSRFKDSLGNPTHILRIGESYKEKQRTIQAKKEVEQRRAGGYSRKYASKAKNLADDMVRNTARDLLYYAVTQDAMLIFENLSRGFGRQGKRTFMAERQYTRMEDWLTAKLAYEGLPSKTYLSKTLAQYTSKTCSNCGFTITSADYDRVLEKLKKTATGWMTTINGKELKVEGQITYYNRYKRQNVVKDLSVELDRLSEESVNNDISSWTKGRSGEALSLLKKRFSHRPVQEKFVCLNCGFETHADEQAALNIARSWLFLRSQEYKKYQTNKTTGNTDKRAFVETWQSFYRKKLKEVWKPAV

SEQ ID NO: 42385 - protein, 977 aa, synthetic construct
  REGION 1..977: note = engineered CasX variant
QEIKRINKIRRRLVKDSNTKKAGKTGPMKTLLVRVMTPDLRERLENLRKKPPNIPQPISNTSRANLNKLLTDYTEMKKAILHVYWEEFQKDPVGLMSRVAQPASKKIDQNKLKPEMDEKGNLTTAGFACSQCGQPLFVYKLEQVSEKGKAYTNYFGRCNVAEHEKLILLAQLKPEKDSDEAVTYSLGKFGQRALDFYSIHVTKESTHPVKPLAQIAGNRYASPVGKALSDACMGTIASFLSKYQDIIIEHQKVVKGNQKRLESLRELAGKENLEYPSVTLPPQPHTKEGVDAYNEVIARVRMWVNLNLWQKLKLSRDDAKPLLRLKGFPSFPLVERQANEVDWWDMVCNVKKLINEKKEDGKVFWQNLAGYKRQEALRPYLSSEEDRKKGKKFARYQLGDLLLHLEKKHGEDWGKVYDEAWERIDKKVEGLSKHIKLEEERRSEDAQSKAALTDWLRAKASFVIEGKKEADKDEFCRCELKLQKWYGDLRGKPFAIEAENSILDISGFSKQYNCAFIWQKDGVKKLNLYLIINYFKGGKLRFKKIKPEAFEANRFYTVINKKSGEIVPMEVNFNFDDPNLIILPLAFGKRQGREFIWNDLLSLETGSLKLANGRVIEKTLYNRRTRQDEPALFVALTFERREVLDSSNIKPMNLIGVDRGENIPAVIALTDPEGCPLSRFKDSLGNPTHILRIGESYKEKQRTIQAKKEVEQRRAGGYSRKYASKAKNLADDMVRNTARDLLYYAVTQDAMLIFENLSRGFGRQGKRTFMAERQYTRMEDWLTAKLAYEGLPSKTYLSKTLAQYTSKTCSNCGFTITSADYDRVLEKLKKTATGWMTTINGKELKVEGQITYYNRYKRQNVVKDLSVELDRLSEESVNNDISSWTKGRSGEALSLLKKRFSHRPVQEKFVCLNCGFETHADEQAALNIARSWLFLRSQEYKKYQTNKTTGNTDKRAFVETWQSFYRKKLKEVWKPAV

SEQ ID NO: 42386 - protein, 978 aa, synthetic construct
  REGION 1..978: note = engineered CasX variant
QEIKRINKIRRRLVKDSNTKKAGKTGPMKTLLVRVMTPDLRERLENLRKKPPNIPQPISNTSRANLNKLLTDYTEMKKAILHVYWEEFQKDPVGLMSRVAQPASKKIDQNKLKPEMDEKGNLTTAGFACSQCGQPLFVYKLEQVSEKGKAYTNYFGRCNVAEHEKLILLAQLKPEKDSDEAVTYSLGKFGQRALDFYSIHVTKESTHPVKPLAQIAGNRYASYPVGKALSDACMGTIASFLSKYQDIIIEHQKVVKGNQKRLESLRELAGKENLEYPSVTLPPQPHTKEGVDAYNEVIARVRMWVNLNLWQKLKLSRDDAKPLLRLKGFPSFPLVERQANEVDWWDMVCNVKKLINEKKEDGKVFWQNLAGYKRQEALRPYLSSEEDRKKGKKFARYQLGDLLLHLEKKHGEDWGKVYDEAWERIDKKVEGLSKHIKLEEERRSEDAQSKAALTDWLRAKASFVIEGSKEADKDEFCRCELKLQKWYGDLRGKPFAIEAENSILDISGFSKQYNCAFIWQKDGVKKLNLYLIINYFKGGKLRFKKIKPEAFEANRFYTVINKKSGEIVPMEVNFNFDDPNLIILPLAFGKRQGREFIWNDLLSLETGSLKLANGRVIEKTLYNRRTRQDEPALFVALTFERREVLDSSNIKPMNLIGVDRGENIPAVIALTDPEGCPLSRFKDSLGNPTHILRIGESYKEKQRTIQAKKEVEQRRAGGYSRKYASKAKNLADDMVRNTARDLLYYAVTQDAMLIFENLSRGFGRQGKRTFMAERQYTRMEDWLTAKLAYEGLPSKTYLSKTLAQYTSKTCSNCGFTITSADYDRVLEKLKKTATGWMTTINGKELKVEGQITYYNRYKRQNVVKDLSVELDRLSEESVNNDISSWTKGRSGEALSLLKKRFSHRPVQEKFVCLNCGFETHADEQAALNIARSWLFLRSQEYKKYQTNKTTGNTDKRAFVETWQSFYRKKLKEVWKPAV

SEQ ID NO: 42387 - protein, 978 aa, synthetic construct
  REGION 1..978: note = engineered CasX variant
QEIKRINKIRRRLVKDSNTKKAGKTGPMKTLLVRVMTPDLRERLENLRKKPPNIPQPISNTSRANLNKLLTDYTEMKKAILHVYWEEFQKDPVGLMSRVAQPASKKIDQNKLKPEMDEKGNLTTAGFACSQCGQPLFVYKLEQVSEKGKAYTNYFGRCNVAEHEKLILLAQLKPEKDSDEAVTYSLGKFGQRALDFYSIHVTKESTHPVKPLAQIAGNRYASHPVGKALSDACMGTIASFLSKYQDIIIEHQKVVKGNQKRLESLRELAGKENLEYPSVTLPPQPHTKEGVDAYNEVIARVRMWVNLNLWQKLKLSRDDAKPLLRLKGFPSFPLVERQANEVDWWDMVCNVKKLINEKKEDGKVFWQNLAGYKRQEALRPYLSSEEDRKKGKKFARYQLGDLLLHLEKKHGEDWGKVYDEAWERIDKKVEGLSKHIKLEEERRSEDAQSKAALTDWLRAKASFVIEGSKEADKDEFCRCELKLQKWYGDLRGKPFAIEAENSILDISGFSKQYNCAFIWQKDGVKKLNLYLIINYFKGGKLRFKKIKPEAFEANRFYTVINKKSGEIVPMEVNFNFDDPNLIILPLAFGKRQGREFIWNDLLSLETGSLKLANGRVIEKTLYNRRTRQDEPALFVALTFERREVLDSSNIKPMNLIGVDRGENIPAVIALTDPEGCPLSRFKDSLGNPTHILRIGESYKEKQRTIQAKKEVEQRRAGGYSRKYASKAKNLADDMVRNTARDLLYYAVTQDAMLIFENLSRGFGRQGKRTFMAERQYTRMEDWLTAKLAYEGLPSKTYLSKTLAQYTSKTCSNCGFTITSADYDRVLEKLKKTATGWMTTINGKELKVEGQITYYNRYKRQNVVKDLSVELDRLSEESVNNDISSWTKGRSGEALSLLKKRFSHRPVQEKFVCLNCGFETHADEQAALNIARSWLFLRSQEYKKYQTNKTTGNTDKRAFVETWQSFYRKKLKEVWKPAV

SEQ ID NO: 42388 - protein, 978 aa, synthetic construct
  REGION 1..978: note = engineered CasX variant
QEIKRINKIRRRLVKDSNTKKAGKTGPMKTLLVRVMTPDLRERLENLRKKPPNIPQPISNTSRANLNKLLTDYTEMKKAILHVYWEEFQKDPVGLMSRVAQPASKKIDQNKLKPEMDEKGNLTTAGFACSQCGQPLFVYKLEQVSEKGKAYTNYFGRCNVAEHEKLILLAQLKPEKDSDEAVTYSLGKFGQRALDFYSIHVTKESTHPVKPLAQIAGNRYASSPVGKALSDACMGTIASFLSKYQDIIIEHQKVVKGNQKRLESLRELAGKENLEYPSVTLPPQPHTKEGVDAYNEVIARVRMWVNLNLWQKLKLSRDDAKPLLRLKGFPSFPLVERQANEVDWWDMVCNVKKLINEKKEDGKVFWQNLAGYKRQEALRPYLSSEEDRKKGKKFARYQLGDLLLHLEKKHGEDWGKVYDEAWERIDKKVEGLSKHIKLEEERRSEDAQSKAALTDWLRAKASFVIEGSKEADKDEFCRCELKLQKWYGDLRGKPFAIEAENSILDISGFSKQYNCAFIWQKDGVKKLNLYLIINYFKGGKLRFKKIKPEAFEANRFYTVINKKSGEIVPMEVNFNFDDPNLIILPLAFGKRQGREFIWNDLLSLETGSLKLANGRVIEKTLYNRRTRQDEPALFVALTFERREVLDSSNIKPMNLIGVDRGENIPAVIALTDPEGCPLSRFKDSLGNPTHILRIGESYKEKQRTIQAKKEVEQRRAGGYSRKYASKAKNLADDMVRNTARDLLYYAVTQDAMLIFENLSRGFGRQGKRTFMAERQYTRMEDWLTAKLAYEGLPSKTYLSKTLAQYTSKTCSNCGFTITSADYDRVLEKLKKTATGWMTTINGKELKVEGQITYYNRYKRQNVVKDLSVELDRLSEESVNNDISSWTKGRSGEALSLLKKRFSHRPVQEKFVCLNCGFETHADEQAALNIARSWLFLRSQEYKKYQTNKTTGNTDKRAFVETWQSFYRKKLKEVWKPAV

SEQ ID NO: 42389 - protein, 978 aa, synthetic construct
  REGION 1..978: note = engineered CasX variant
QEIKRINKIRRRLVKDSNTKKAGKTGPMKTLLVRVMTPDLRERLENLRKKPPNIPQPISNTSRANLNKLLTDYTEMKKAILHVYWEEFQKDPVGLMSRVAQPASKKIDQNKLKPEMDEKGNLTTAGFACSQCGQPLFVYKLEQVSEKGKAYTNYFGRCNVAEHEKLILLAQLKPEKDSDEAVTYSLGKFGQRALDFYSIHVTKESTHPVKPLAQIAGNRYASTPVGKALSDACMGTIASFLSKYQDIIIEHQKVVKGNQKRLESLRELAGKENLEYPSVTLPPQPHTKEGVDAYNEVIARVRMWVNLNLWQKLKLSRDDAKPLLRLKGFPSFPLVERQANEVDWWDMVCNVKKLINEKKEDGKVFWQNLAGYKRQEALRPYLSSEEDRKKGKKFARYQLGDLLLHLEKKHGEDWGKVYDEAWERIDKKVEGLSKHIKLEEERRSEDAQSKAALTDWLRAKASFVIEGSKEADKDEFCRCELKLQKWYGDLRGKPFAIEAENSILDISGFSKQYNCAFIWQKDGVKKLNLYLIINYFKGGKLRFKKIKPEAFEANRFYTVINKKSGEIVPMEVNFNFDDPNLIILPLAFGKRQGREFIWNDLLSLETGSLKLANGRVIEKTLYNRRTRQDEPALFVALTFERREVLDSSNIKPMNLIGVDRGENIPAVIALTDPEGCPLSRFKDSLGNPTHILRIGESYKEKQRTIQAKKEVEQRRAGGYSRKYASKAKNLADDMVRNTARDLLYYAVTQDAMLIFENLSRGFGRQGKRTFMAERQYTRMEDWLTAKLAYEGLPSKTYLSKTLAQYTSKTCSNCGFTITSADYDRVLEKLKKTATGWMTTINGKELKVEGQITYYNRYKRQNVVKDLSVELDRLSEESVNNDISSWTKGRSGEALSLLKKRFSHRPVQEKFVCLNCGFETHADEQAALNIARSWLFLRSQEYKKYQTNKTTGNTDKRAFVETWQSFYRKKLKEVWKPAV

SEQ ID NO: 42390 - protein, 978 aa, synthetic construct
  REGION 1..978: note = engineered CasX variant
QEIKRINKIRRRLVKDSNTKKAGKTGPMKTLLVRVMTPDLRERLENLRKKPPNIPQPISNTSRANLNKLLTDYTEMKKAILHVYWEEFQKDPVGLMSRVAQPASKKIDQNKLKPEMDEKGNLTTAGFACSQCGQPLFVYKLEQVSEKGKAYTNYFGRCNVAEHEKLILLAQLKPEKDSDEAVTYSLGKFGQRALDFYSIHVTKESTHPVKPLAQIAGNRYASAPVGKALSDACMGTIASFLSKYQDIIIEHQKVVKGNQKRLESLRELAGKENLEYPSVTLPPQPHTKEGVDAYNEVIARVRMWVNLNLWQKLKLSRDDAKPLLRLKGFPSFPLVERQANEVDWWDMVCNVKKLINEKKEDGKVFWQNLAGYKRQEALRPYLSSEEDRKKGKKFARYQLGDLLLHLEKKHGEDWGKVYDEAWERIDKKVEGLSKHIKLEEERRSEDAQSKAALTDWLRAKASFVIEGSKEADKDEFCRCELKLQKWYGDLRGKPFAIEAENSILDISGFSKQYNCAFIWQKDGVKKLNLYLIINYFKGGKLRFKKIKPEAFEANRFYTVINKKSGEIVPMEVNFNFDDPNLIILPLAFGKRQGREFIWNDLLSLETGSLKLANGRVIEKTLYNRRTRQDEPALFVALTFERREVLDSSNIKPMNLIGVDRGENIPAVIALTDPEGCPLSRFKDSLGNPTHILRIGESYKEKQRTIQAKKEVEQRRAGGYSRKYASKAKNLADDMVRNTARDLLYYAVTQDAMLIFENLSRGFGRQGKRTFMAERQYTRMEDWLTAKLAYEGLPSKTYLSKTLAQYTSKTCSNCGFTITSADYDRVLEKLKKTATGWMTTINGKELKVEGQITYYNRYKRQNVVKDLSVELDRLSEESVNNDISSWTKGRSGEALSLLKKRFSHRPVQEKFVCLNCGFETHADEQAALNIARSWLFLRSQEYKKYQTNKTTGNTDKRAFVETWQSFYRKKLKEVWKPAV

SEQ ID NO: 42391 - protein, 978 aa, synthetic construct
  REGION 1..978: note = engineered CasX variant
QEIKRINKIRRRLVKDSNTKKAGKTGPMKTLLVRVMTPDLRERLENLRKKPPNIPQPISNTSRANLNKLLTDYTEMKKAILHVYWEEFQKDPVGLMSRVAQPASKKIDQNKLKPEMDEKGNLTTAGFACSQCGQPLFVYKLEQVSEKGKAYTNYFGRCNVAEHEKLILLAQLKPEKDSDEAVTYSLGKFGQRALDFYSIHVTKESTHPVKPLAQIAGNRYASVPVGKALSDACMGTIASFLSKYQDIIIEHQKVVKGNQKRLESLRELAGKENLEYPSVTLPPQPHTKEGVDAYNEVIARVRMWVNLNLWQKLKLSRDDAKPLLRLKGFPSFPLVERQANEVDWWDMVCNVKKLINEKKEDGKVFWQNLAGYKRQEALRPYLSSEEDRKKGKKFARYQLGDLLLHLEKKHGEDWGKVYDEAWERIDKKVEGLSKHIKLEEERRSEDAQSKAALTDWLRAKASFVIEGSKEADKDEFCRCELKLQKWYGDLRGKPFAIEAENSILDISGFSKQYNCAFIWQKDGVKKLNLYLIINYFKGGKLRFKKIKPEAFEANRFYTVINKKSGEIVPMEVNFNFDDPNLIILPLAFGKRQGREFIWNDLLSLETGSLKLANGRVIEKTLYNRRTRQDEPALFVALTFERREVLDSSNIKPMNLIGVDRGENIPAVIALTDPEGCPLSRFKDSLGNPTHILRIGESYKEKQRTIQAKKEVEQRRAGGYSRKYASKAKNLADDMVRNTARDLLYYAVTQDAMLIFENLSRGFGRQGKRTFMAERQYTRMEDWLTAKLAYEGLPSKTYLSKTLAQYTSKTCSNCGFTITSADYDRVLEKLKKTATGWMTTINGKELKVEGQITYYNRYKRQNVVKDLSVELDRLSEESVNNDISSWTKGRSGEALSLLKKRFSHRPVQEKFVCLNCGFETHADEQAALNIARSWLFLRSQEYKKYQTNKTTGNTDKRAFVETWQSFYRKKLKEVWKPAV

SEQ ID NO: 42392 - protein, 978 aa, synthetic construct
  REGION 1..978: note = engineered CasX variant
QEIKRINKIRRRLVKDSNTKKAGKTGPMKTLLVRVMTPDLRERLENLRKKPPNIPQPISNTSRANLNKLLTDYTEMKKAILHVYWEEFQKDPVGLMSRVAQPASKKIDQNKLKPEMDEKGNLTTAGFACSQCGQPLFVYKLEQVSEKGKAYTNYFGRCNVAEHEKLIKLAQLKPEKDSDEAVTYSLGKFGQRALDFYSIHVTKESTHPVKPLAQIAGNRYASGPVGKALSDACMGTIASFLSKYQDIIIEHQKVVKGNQKRLESLRELAGKENLEYPSVTLPPQPHTKEGVDAYNEVIARVRMWVNLNLWQKLKLSRDDAKPLLRLKGFPSFPLVERQANEVDWWDMVCNVKKLINEKKEDGKVFWQNLAGYKRQEALRPYLSSEEDRKKGKKFARYQLGDLLLHLEKKHGEDWGKVYDEAWERIDKKVEGLSKHIKLEEERRSEDAQSKAALTDWLRAKASFVIEGSKEADKDEFCRCELKLQKWYGDLRGKPFAIEAENSILDISGFSKQYNCAFIWQKDGVKKLNLYLIINYFKGGKLRFKKIKPEAFEANRFYTVINKKSGEIVPMEVNFNFDDPNLIILPLAFGKRQGREFIWNDLLSLETGSLKLANGRVIEKTLYNRRTRQDEPALFVALTFERREVLDSSNIKPMNLIGVDRGENIPAVIALTDPEGCPLSRFKDSLGNPTHILRIGESYKEKQRTIQAKKEVEQRRAGGYSRKYASKAKNLADDMVRNTARDLLYYAVTQDAMLIFENLSRGFGRQGKRTFMAERQYTRMEDWLTAKLAYEGLPSKTYLSKTLAQYTSKTCSNCGFTITSADYDRVLEKLKKTATGWMTTINGKELKVEGQITYYNRYKRQNVVKDLSVELDRLSEESVNNDISSWTKGRSGEALSLLKKRFSHRPVQEKFVCLNCGFETHADEQAALNIARSWLFLRSQEYKKYQTNKTTGNTDKRAFVETWQSFYRKKLKEVWKPAV

SEQ ID NO: 42393 - protein, 977 aa, synthetic construct
  REGION 1..977: note = engineered CasX variant
QEIKRINKIRRRLVKDSNTKKAGKTGPMKTLLVRVMTPDLRERLENLRKKPPNIPQPISNTSRANLNKLLTDYTEMKKAILHVYWEEFQKDPVGLMSRVAQPASKKIDQNKLKPEMDEKGNLTTAGFACSQCGQPLFVYKLEQVSEKGKAYTNYFGRCNVAEHEKLILLAQLKPEKDSDEAVTYSLGKFGQRALDFYSIHVTKESTHPVKPLAQIAGNRYASPVGKALSDACMGTIASFLSKYQDIIIEHQKVVKGNQKRLESLRELAGKENLEYPSVTLPPQPHTKEGVDAYNEVIARVRMWVNLNLWQKLKLSRDDAKPLLRLKGFPSFPLVERQANEVDWWDMVCNVKKLINEKKEDGKVFWQNLAGYKRQEALRPYLSSEEDRKKGKKFARYQLGDLLLHLEKKHGEDWGKVYDEAWERIDKKVEGLSKHIKLEEERRSEDAQSKAALTDWLRAKASFVIEGSKEADKDEFCRCELKLQKWYGDLRGKPFAIEAENSILDISGFSKQYNCAFIWQKDGVKKLNLYLIINYFKGGKLRFKKIKPEAFEANRFYTVINKKSGEIVPMEVNFNFDDPNLIILPLAFGKRQGREFIWNDLLSLETGSLKLANGRVIEKTLYNRRTRQDEPALFVALTFERREVLDSSNIKPMNLIGVDRGENIPAVIALTDPEGCPLSRFKDSLGNPTHILRIGESYKEKQRTIQAKKEVEQRRAGGYSRKYASKAKNLADDMVRNTARDLLYYAVTQDAMLIFENLSRGFGRQGKRTFMAERQYTRMEDWLTAKLAYEGLPSKTYLSKTLAQYTSKTCSNCGFTITSADYDRVLEKLKKTATGWMTTINGKELKVEGQITYYNRYKRQNVVKDLSVELDRLSEESVNNDISSWTKGRSGEALSLLKKRFSHRPVQEKFVCLNCGFETHADEQAALNIARSWLFLRSQEYKKYQTNKTTGNTDKRAFVETWQSFYRKKLKEVWKPAV

SEQ ID NO: 42394 - protein, 979 aa, synthetic construct
  REGION 1..979: note = engineered CasX variant
QEIKRINKIRRRLVKDSNTKKAGKTGPMKTLLVRVMTPDLRERLENLRKKPPNIPQPISNTSRANLNKLLTDYTEMKKAILHVYWEEFQKDPVGLMSRVAQPASKKIDQNKLKPEMDEKGNLTTAGFACSQCGQPLFVYKLEQVSEKGKAYTNYFGRCNVAEHEKLILLAQLKPEKDSDEAVTYSLGKFGQRALDFYSIHVTKESTHPVKPLAQIAGNRYASYPVGKALSDACMGTIASFLSKYQDIIIEHQKVVKGNQKRLESLRELAGKENLEYPSVTLPPQPHTKEGVDAYNEVIARVRMWVNLNLWQKLKLSRDDAKPLLRLKGFPSFPLVERQANEVDWWDMVCNVKKLINEKKEDGKVFWQNLAGYKRQEALRPYLSSEEDRKKGKKFARYQLGDLLLHLEKKHGEDWGKVYDEAWERIDKKVEGLSKHIKLEEERRSEDAQSKAALTDWLRAKASFVIEGLKEADDKDEFCRCELKLQKWYGDLRGKPFAIEAENSILDISGFSKQYNCAFIWQKDGVKKLNLYLIINYFKGGKLRFKKIKPEAFEANRFYTVINKKSGEIVPMEVNFNFDDPNLIILPLAFGKRQGREFIWNDLLSLETGSLKLANGRVIEKTLYNRRTRQDEPALFVALTFERREVLDSSNIKPMNLIGVDRGENIPAVIALTDPEGCPLSRFKDSLGNPTHILRIGESYKEKQRTIQAKKEVEQRRAGGYSRKYASKAKNLADDMVRNTARDLLYYAVTQDAMLIFENLSRGFGRQGKRTFMAERQYTRMEDWLTAKLAYEGLPSKTYLSKTLAQYTSKTCSNCGFTITSADYDRVLEKLKKTATGWMTTINGKELKVEGQITYYNRYKRQNVVKDLSVELDRLSEESVNNDISSWTKGRSGEALSLLKKRFSHRPVQEKFVCLNCGFETHADEQAALNIARSWLFLRSQEYKKYQTNKTTGNTDKRAFVETWQSFYRKKLKEVWKPAV

SEQ ID NO: 42395 - protein, 979 aa, synthetic construct
  REGION 1..979: note = engineered CasX variant
QEIKRINKIRRRLVKDSNTKKAGKTGPMKTLLVRVMTPDLRERLENLRKKPPNIPQPISNTSRANLNKLLTDYTEMKKAILHVYWEEFQKDPVGLMSRVAQPASKKIDQNKLKPEMDEKGNLTTAGFACSQCGQPLFVYKLEQVSEKGKAYTNYFGRCNVAEHEKLILLAQLKPEKDSDEAVTYSLGKFGQRALDFYSIHVTKESTHPVKPLAQIAGNRYASHPVGKALSDACMGTIASFLSKYQDIIIEHQKVVKGNQKRLESLRELAGKENLEYPSVTLPPQPHTKEGVDAYNEVIARVRMWVNLNLWQKLKLSRDDAKPLLRLKGFPSFPLVERQANEVDWWDMVCNVKKLINEKKEDGKVFWQNLAGYKRQEALRPYLSSEEDRKKGKKFARYQLGDLLLHLEKKHGEDWGKVYDEAWERIDKKVEGLSKHIKLEEERRSEDAQSKAALTDWLRAKASFVIEGLKEADDKDEFCRCELKLQKWYGDLRGKPFAIEAENSILDISGFSKQYNCAFIWQKDGVKKLNLYLIINYFKGGKLRFKKIKPEAFEANRFYTVINKKSGEIVPMEVNFNFDDPNLIILPLAFGKRQGREFIWNDLLSLETGSLKLANGRVIEKTLYNRRTRQDEPALFVALTFERREVLDSSNIKPMNLIGVDRGENIPAVIALTDPEGCPLSRFKDSLGNPTHILRIGESYKEKQRTIQAKKEVEQRRAGGYSRKYASKAKNLADDMVRNTARDLLYYAVTQDAMLIFENLSRGFGRQGKRTFMAERQYTRMEDWLTAKLAYEGLPSKTYLSKTLAQYTSKTCSNCGFTITSADYDRVLEKLKKTATGWMTTINGKELKVEGQITYYNRYKRQNVVKDLSVELDRLSEESVNNDISSWTKGRSGEALSLLKKRFSHRPVQEKFVCLNCGFETHADEQAALNIARSWLFLRSQEYKKYQTNKTTGNTDKRAFVETWQSFYRKKLKEVWKPAV

SEQ ID NO: 42396 - protein, 979 aa, synthetic construct
  REGION 1..979: note = engineered CasX variant
QEIKRINKIRRRLVKDSNTKKAGKTGPMKTLLVRVMTPDLRERLENLRKKPPNIPQPISNTSRANLNKLLTDYTEMKKAILHVYWEEFQKDPVGLMSRVAQPASKKIDQNKLKPEMDEKGNLTTAGFACSQCGQPLFVYKLEQVSEKGKAYTNYFGRCNVAEHEKLILLAQLKPEKDSDEAVTYSLGKFGQRALDFYSIHVTKESTHPVKPLAQIAGNRYASSPVGKALSDACMGTIASFLSKYQDIIIEHQKVVKGNQKRLESLRELAGKENLEYPSVTLPPQPHTKEGVDAYNEVIARVRMWVNLNLWQKLKLSRDDAKPLLRLKGFPSFPLVERQANEVDWWDMVCNVKKLINEKKEDGKVFWQNLAGYKRQEALRPYLSSEEDRKKGKKFARYQLGDLLLHLEKKHGEDWGKVYDEAWERIDKKVEGLSKHIKLEEERRSEDAQSKAALTDWLRAKASFVIEGLKEADDKDEFCRCELKLQKWYGDLRGKPFAIEAENSILDISGFSKQYNCAFIWQKDGVKKLNLYLIINYFKGGKLRFKKIKPEAFEANRFYTVINKKSGEIVPMEVNFNFDDPNLIILPLAFGKRQGREFIWNDLLSLETGSLKLANGRVIEKTLYNRRTRQDEPALFVALTFERREVLDSSNIKPMNLIGVDRGENIPAVIALTDPEGCPLSRFKDSLGNPTHILRIGESYKEKQRTIQAKKEVEQRRAGGYSRKYASKAKNLADDMVRNTARDLLYYAVTQDAMLIFENLSRGFGRQGKRTFMAERQYTRMEDWLTAKLAYEGLPSKTYLSKTLAQYTSKTCSNCGFTITSADYDRVLEKLKKTATGWMTTINGKELKVEGQITYYNRYKRQNVVKDLSVELDRLSEESVNNDISSWTKGRSGEALSLLKKRFSHRPVQEKFVCLNCGFETHADEQAALNIARSWLFLRSQEYKKYQTNKTTGNTDKRAFVETWQSFYRKKLKEVWKPAV

SEQ ID NO: 42397 - protein, 979 aa, synthetic construct
  REGION 1..979: note = engineered CasX variant
QEIKRINKIRRRLVKDSNTKKAGKTGPMKTLLVRVMTPDLRERLENLRKKPPNIPQPISNTSRANLNKLLTDYTEMKKAILHVYWEEFQKDPVGLMSRVAQPASKKIDQNKLKPEMDEKGNLTTAGFACSQCGQPLFVYKLEQVSEKGKAYTNYFGRCNVAEHEKLILLAQLKPEKDSDEAVTYSLGKFGQRALDFYSIHVTKESTHPVKPLAQIAGNRYASTPVGKALSDACMGTIASFLSKYQDIIIEHQKVVKGNQKRLESLRELAGKENLEYPSVTLPPQPHTKEGVDAYNEVIARVRMWVNLNLWQKLKLSRDDAKPLLRLKGFPSFPLVERQANEVDWWDMVCNVKKLINEKKEDGKVFWQNLAGYKRQEALRPYLSSEEDRKKGKKFARYQLGDLLLHLEKKHGEDWGKVYDEAWERIDKKVEGLSKHIKLEEERRSEDAQSKAALTDWLRAKASFVIEGLKEADDKDEFCRCELKLQKWYGDLRGKPFAIEAENSILDISGFSKQYNCAFIWQKDGVKKLNLYLIINYFKGGKLRFKKIKPEAFEANRFYTVINKKSGEIVPMEVNFNFDDPNLIILPLAFGKRQGREFIWNDLLSLETGSLKLANGRVIEKTLYNRRTRQDEPALFVALTFERREVLDSSNIKPMNLIGVDRGENIPAVIALTDPEGCPLSRFKDSLGNPTHILRIGESYKEKQRTIQAKKEVEQRRAGGYSRKYASKAKNLADDMVRNTARDLLYYAVTQDAMLIFENLSRGFGRQGKRTFMAERQYTRMEDWLTAKLAYEGLPSKTYLSKTLAQYTSKTCSNCGFTITSADYDRVLEKLKKTATGWMTTINGKELKVEGQITYYNRYKRQNVVKDLSVELDRLSEESVNNDISSWTKGRSGEALSLLKKRFSHRPVQEKFVCLNCGFETHADEQAALNIARSWLFLRSQEYKKYQTNKTTGNTDKRAFVETWQSFYRKKLKEVWKPAV

SEQ ID NO: 42398 - protein, 979 aa, synthetic construct
  REGION 1..979: note = engineered CasX variant
QEIKRINKIRRRLVKDSNTKKAGKTGPMKTLLVRVMTPDLRERLENLRKKPPNIPQPISNTSRANLNKLLTDYTEMKKAILHVYWEEFQKDPVGLMSRVAQPASKKIDQNKLKPEMDEKGNLTTAGFACSQCGQPLFVYKLEQVSEKGKAYTNYFGRCNVAEHEKLILLAQLKPEKDSDEAVTYSLGKFGQRALDFYSIHVTKESTHPVKPLAQIAGNRYASAPVGKALSDACMGTIASFLSKYQDIIIEHQKVVKGNQKRLESLRELAGKENLEYPSVTLPPQPHTKEGVDAYNEVIARVRMWVNLNLWQKLKLSRDDAKPLLRLKGFPSFPLVERQANEVDWWDMVCNVKKLINEKKEDGKVFWQNLAGYKRQEALRPYLSSEEDRKKGKKFARYQLGDLLLHLEKKHGEDWGKVYDEAWERIDKKVEGLSKHIKLEEERRSEDAQSKAALTDWLRAKASFVIEGLKEADDKDEFCRCELKLQKWYGDLRGKPFAIEAENSILDISGFSKQYNCAFIWQKDGVKKLNLYLIINYFKGGKLRFKKIKPEAFEANRFYTVINKKSGEIVPMEVNFNFDDPNLIILPLAFGKRQGREFIWNDLLSLETGSLKLANGRVIEKTLYNRRTRQDEPALFVALTFERREVLDSSNIKPMNLIGVDRGENIPAVIALTDPEGCPLSRFKDSLGNPTHILRIGESYKEKQRTIQAKKEVEQRRAGGYSRKYASKAKNLADDMVRNTARDLLYYAVTQDAMLIFENLSRGFGRQGKRTFMAERQYTRMEDWLTAKLAYEGLPSKTYLSKTLAQYTSKTCSNCGFTITSADYDRVLEKLKKTATGWMTTINGKELKVEGQITYYNRYKRQNVVKDLSVELDRLSEESVNNDISSWTKGRSGEALSLLKKRFSHRPVQEKFVCLNCGFETHADEQAALNIARSWLFLRSQEYKKYQTNKTTGNTDKRAFVETWQSFYRKKLKEVWKPAV

SEQ ID NO: 42399 - protein, 979 aa, synthetic construct
  REGION 1..979: note = engineered CasX variant
QEIKRINKIRRRLVKDSNTKKAGKTGPMKTLLVRVMTPDLRERLENLRKKPPNIPQPISNTSRANLNKLLTDYTEMKKAILHVYWEEFQKDPVGLMSRVAQPASKKIDQNKLKPEMDEKGNLTTAGFACSQCGQPLFVYKLEQVSEKGKAYTNYFGRCNVAEHEKLILLAQLKPEKDSDEAVTYSLGKFGQRALDFYSIHVTKESTHPVKPLAQIAGNRYASVPVGKALSDACMGTIASFLSKYQDIIIEHQKVVKGNQKRLESLRELAGKENLEYPSVTLPPQPHTKEGVDAYNEVIARVRMWVNLNLWQKLKLSRDDAKPLLRLKGFPSFPLVERQANEVDWWDMVCNVKKLINEKKEDGKVFWQNLAGYKRQEALRPYLSSEEDRKKGKKFARYQLGDLLLHLEKKHGEDWGKVYDEAWERIDKKVEGLSKHIKLEEERRSEDAQSKAALTDWLRAKASFVIEGLKEADDKDEFCRCELKLQKWYGDLRGKPFAIEAENSILDISGFSKQYNCAFIWQKDGVKKLNLYLIINYFKGGKLRFKKIKPEAFEANRFYTVINKKSGEIVPMEVNFNFDDPNLIILPLAFGKRQGREFIWNDLLSLETGSLKLANGRVIEKTLYNRRTRQDEPALFVALTFERREVLDSSNIKPMNLIGVDRGENIPAVIALTDPEGCPLSRFKDSLGNPTHILRIGESYKEKQRTIQAKKEVEQRRAGGYSRKYASKAKNLADDMVRNTARDLLYYAVTQDAMLIFENLSRGFGRQGKRTFMAERQYTRMEDWLTAKLAYEGLPSKTYLSKTLAQYTSKTCSNCGFTITSADYDRVLEKLKKTATGWMTTINGKELKVEGQITYYNRYKRQNVVKDLSVELDRLSEESVNNDISSWTKGRSGEALSLLKKRFSHRPVQEKFVCLNCGFETHADEQAALNIARSWLFLRSQEYKKYQTNKTTGNTDKRAFVETWQSFYRKKLKEVWKPAV

SEQ ID NO: 42400 - protein, 979 aa, synthetic construct
  REGION 1..979: note = engineered CasX variant
QEIKRINKIRRRLVKDSNTKKAGKTGPMKTLLVRVMTPDLRERLENLRKKPPNIPQPISNTSRANLNKLLTDYTEMKKAILHVYWEEFQKDPVGLMSRVAQPASKKIDQNKLKPEMDEKGNLTTAGFACSQCGQPLFVYKLEQVSEKGKAYTNYFGRCNVAEHEKLIKLAQLKPEKDSDEAVTYSLGKFGQRALDFYSIHVTKESTHPVKPLAQIAGNRYASGPVGKALSDACMGTIASFLSKYQDIIIEHQKVVKGNQKRLESLRELAGKENLEYPSVTLPPQPHTKEGVDAYNEVIARVRMWVNLNLWQKLKLSRDDAKPLLRLKGFPSFPLVERQANEVDWWDMVCNVKKLINEKKEDGKVFWQNLAGYKRQEALRPYLSSEEDRKKGKKFARYQLGDLLLHLEKKHGEDWGKVYDEAWERIDKKVEGLSKHIKLEEERRSEDAQSKAALTDWLRAKASFVIEGLKEADDKDEFCRCELKLQKWYGDLRGKPFAIEAENSILDISGFSKQYNCAFIWQKDGVKKLNLYLIINYFKGGKLRFKKIKPEAFEANRFYTVINKKSGEIVPMEVNFNFDDPNLIILPLAFGKRQGREFIWNDLLSLETGSLKLANGRVIEKTLYNRRTRQDEPALFVALTFERREVLDSSNIKPMNLIGVDRGENIPAVIALTDPEGCPLSRFKDSLGNPTHILRIGESYKEKQRTIQAKKEVEQRRAGGYSRKYASKAKNLADDMVRNTARDLLYYAVTQDAMLIFENLSRGFGRQGKRTFMAERQYTRMEDWLTAKLAYEGLPSKTYLSKTLAQYTSKTCSNCGFTITSADYDRVLEKLKKTATGWMTTINGKELKVEGQITYYNRYKRQNVVKDLSVELDRLSEESVNNDISSWTKGRSGEALSLLKKRFSHRPVQEKFVCLNCGFETHADEQAALNIARSWLFLRSQEYKKYQTNKTTGNTDKRAFVETWQSFYRKKLKEVWKPAV

SEQ ID NO: 42401 - protein, 978 aa, synthetic construct
  REGION 1..978: note = engineered CasX variant
QEIKRINKIRRRLVKDSNTKKAGKTGPMKTLLVRVMTPDLRERLENLRKKPPNIPQPISNTSRANLNKLLTDYTEMKKAILHVYWEEFQKDPVGLMSRVAQPASKKIDQNKLKPEMDEKGNLTTAGFACSQCGQPLFVYKLEQVSEKGKAYTNYFGRCNVAEHEKLILLAQLKPEKDSDEAVTYSLGKFGQRALDFYSIHVTKESTHPVKPLAQIAGNRYASPVGKALSDACMGTIASFLSKYQDIIIEHQKVVKGNQKRLESLRELAGKENLEYPSVTLPPQPHTKEGVDAYNEVIARVRMWVNLNLWQKLKLSRDDAKPLLRLKGFPSFPLVERQANEVDWWDMVCNVKKLINEKKEDGKVFWQNLAGYKRQEALRPYLSSEEDRKKGKKFARYQLGDLLLHLEKKHGEDWGKVYDEAWERIDKKVEGLSKHIKLEEERRSEDAQSKAALTDWLRAKASFVIEGLKEADDKDEFCRCELKLQKWYGDLRGKPFAIEAENSILDISGFSKQYNCAFIWQKDGVKKLNLYLIINYFKGGKLRFKKIKPEAFEANRFYTVINKKSGEIVPMEVNFNFDDPNLIILPLAFGKRQGREFIWNDLLSLETGSLKLANGRVIEKTLYNRRTRQDEPALFVALTFERREVLDSSNIKPMNLIGVDRGENIPAVIALTDPEGCPLSRFKDSLGNPTHILRIGESYKEKQRTIQAKKEVEQRRAGGYSRKYASKAKNLADDMVRNTARDLLYYAVTQDAMLIFENLSRGFGRQGKRTFMAERQYTRMEDWLTAKLAYEGLPSKTYLSKTLAQYTSKTCSNCGFTITSADYDRVLEKLKKTATGWMTTINGKELKVEGQITYYNRYKRQNVVKDLSVELDRLSEESVNNDISSWTKGRSGEALSLLKKRFSHRPVQEKFVCLNCGFETHADEQAALNIARSWLFLRSQEYKKYQTNKTTGNTDKRAFVETWQSFYRKKLKEVWKPAV

SEQ ID NO: 42402 - protein, 979 aa, synthetic construct
  REGION 1..979: note = engineered CasX variant
QEIKRINKIRRRLVKDSNTKKAGKTGPMKTLLVRVMTPDLRERLENLRKKPPNIPQPISNTSRANLNKLLTDYTEMKKAILHVYWEEFQKDPVGLMSRVAQPASKKIDQNKLKPEMDEKGNLTTAGFACSQCGQPLFVYKLEQVSEKGKAYTNYFGRCNVAEHEKLILLAQLKPEKDSDEAVTYSLGKFGQRALDFYSIHVTKESTHPVKPLAQIAGNRYASYPVGKALSDACMGTIASFLSKYQDIIIEHQKVVKGNQKRLESLRELAGKENLEYPSVTLPPQPHTKEGVDAYNEVIARVRMWVNLNLWQKLKLSRDDAKPLLRLKGFPSFPLVERQANEVDWWDMVCNVKKLINEKKEDGKVFWQNLAGYKRQEALRPYLSSEEDRKKGKKFARYQLGDLLLHLEKKHGEDWGKVYDEAWERIDKKVEGLSKHIKLEEERRSEDAQSKAALTDWLRAKASFVIEGLKEADKDEFCRCELKLQKWYGDLRGKPFAIEAENSILDISGFSKQYNCAFIWQKDGVKKLNLYLIINYFKGGKLRFKKIKPEAFEANRFYTVINKKSGEIVPMEVNFNFDDPNLIILPLAFGKRQGREFIWNDLLSLETGSLKLANGRVIEKTLYNRRTRQDEPALFVALTFERREVLDSSNIKPMNLIGVDRGENIPAVIALTDPEGCPLSRFKDSLGNPTHILRIGESYKEKQRTIQAKKEVEQRRAGGYSRKYASKAKNLADDMVRNTARDLLYYAVTQDAMLIFENLSRGFGRQGKRTFMAERQYTRMEDWLTAKLAYEGLPSKTYLSKTLAQYTSKTCSNCGFTITSADYDRVLEKLKKTATGWMTTINGKELKVEGQITYYNRYKRQNVVKDLSVELDRLSEESVNNDISSWTKGRSGNEALSLLKKRFSHRPVQEKFVCLNCGFETHADEQAALNIARSWLFLRSQEYKKYQTNKTTGNTDKRAFVETWQSFYRKKLKEVWKPAV

SEQ ID NO: 42403 - protein, 979 aa, synthetic construct
  REGION 1..979: note = engineered CasX variant
QEIKRINKIRRRLVKDSNTKKAGKTGPMKTLLVRVMTPDLRERLENLRKKPPNIPQPISNTSRANLNKLLTDYTEMKKAILHVYWEEFQKDPVGLMSRVAQPASKKIDQNKLKPEMDEKGNLTTAGFACSQCGQPLFVYKLEQVSEKGKAYTNYFGRCNVAEHEKLILLAQLKPEKDSDEAVTYSLGKFGQRALDFYSIHVTKESTHPVKPLAQIAGNRYASHPVGKALSDACMGTIASFLSKYQDIIIEHQKVVKGNQKRLESLRELAGKENLEYPSVTLPPQPHTKEGVDAYNEVIARVRMWVNLNLWQKLKLSRDDAKPLLRLKGFPSFPLVERQANEVDWWDMVCNVKKLINEKKEDGKVFWQNLAGYKRQEALRPYLSSEEDRKKGKKFARYQLGDLLLHLEKKHGEDWGKVYDEAWERIDKKVEGLSKHIKLEEERRSEDAQSKAALTDWLRAKASFVIEGLKEADKDEFCRCELKLQKWYGDLRGKPFAIEAENSILDISGFSKQYNCAFIWQKDGVKKLNLYLIINYFKGGKLRFKKIKPEAFEANRFYTVINKKSGEIVPMEVNFNFDDPNLIILPLAFGKRQGREFIWNDLLSLETGSLKLANGRVIEKTLYNRRTRQDEPALFVALTFERREVLDSSNIKPMNLIGVDRGENIPAVIALTDPEGCPLSRFKDSLGNPTHILRIGESYKEKQRTIQAKKEVEQRRAGGYSRKYASKAKNLADDMVRNTARDLLYYAVTQDAMLIFENLSRGFGRQGKRTFMAERQYTRMEDWLTAKLAYEGLPSKTYLSKTLAQYTSKTCSNCGFTITSADYDRVLEKLKKTATGWMTTINGKELKVEGQITYYNRYKRQNVVKDLSVELDRLSEESVNNDISSWTKGRSGNEALSLLKKRFSHRPVQEKFVCLNCGFETHADEQAALNIARSWLFLRSQEYKKYQTNKTTGNTDKRAFVETWQSFYRKKLKEVWKPAV

SEQ ID NO: 42404 - protein, 979 aa, synthetic construct
  REGION 1..979: note = engineered CasX variant
QEIKRINKIRRRLVKDSNTKKAGKTGPMKTLLVRVMTPDLRERLENLRKKPPNIPQPISNTSRANLNKLLTDYTEMKKAILHVYWEEFQKDPVGLMSRVAQPASKKIDQNKLKPEMDEKGNLTTAGFACSQCGQPLFVYKLEQVSEKGKAYTNYFGRCNVAEHEKLILLAQLKPEKDSDEAVTYSLGKFGQRALDFYSIHVTKESTHPVKPLAQIAGNRYASSPVGKALSDACMGTIASFLSKYQDIIIEHQKVVKGNQKRLESLRELAGKENLEYPSVTLPPQPHTKEGVDAYNEVIARVRMWVNLNLWQKLKLSRDDAKPLLRLKGFPSFPLVERQANEVDWWDMVCNVKKLINEKKEDGKVFWQNLAGYKRQEALRPYLSSEEDRKKGKKFARYQLGDLLLHLEKKHGEDWGKVYDEAWERIDKKVEGLSKHIKLEEERRSEDAQSKAALTDWLRAKASFVIEGLKEADKDEFCRCELKLQKWYGDLRGKPFAIEAENSILDISGFSKQYNCAFIWQKDGVKKLNLYLIINYFKGGKLRFKKIKPEAFEANRFYTVINKKSGEIVPMEVNFNFDDPNLIILPLAFGKRQGREFIWNDLLSLETGSLKLANGRVIEKTLYNRRTRQDEPALFVALTFERREVLDSSNIKPMNLIGVDRGENIPAVIALTDPEGCPLSRFKDSLGNPTHILRIGESYKEKQRTIQAKKEVEQRRAGGYSRKYASKAKNLADDMVRNTARDLLYYAVTQDAMLIFENLSRGFGRQGKRTFMAERQYTRMEDWLTAKLAYEGLPSKTYLSKTLAQYTSKTCSNCGFTITSADYDRVLEKLKKTATGWMTTINGKELKVEGQITYYNRYKRQNVVKDLSVELDRLSEESVNNDISSWTKGRSGNEALSLLKKRFSHRPVQEKFVCLNCGFETHADEQAALNIARSWLFLRSQEYKKYQTNKTTGNTDKRAFVETWQSFYRKKLKEVWKPAV

SEQ ID NO: 42405 - protein, 979 aa, synthetic construct
  REGION 1..979: note = engineered CasX variant
QEIKRINKIRRRLVKDSNTKKAGKTGPMKTLLVRVMTPDLRERLENLRKKPPNIPQPISNTSRANLNKLLTDYTEMKKAILHVYWEEFQKDPVGLMSRVAQPASKKIDQNKLKPEMDEKGNLTTAGFACSQCGQPLFVYKLEQVSEKGKAYTNYFGRCNVAEHEKLILLAQLKPEKDSDEAVTYSLGKFGQRALDFYSIHVTKESTHPVKPLAQIAGNRYASTPVGKALSDACMGTIASFLSKYQDIIIEHQKVVKGNQKRLESLRELAGKENLEYPSVTLPPQPHTKEGVDAYNEVIARVRMWVNLNLWQKLKLSRDDAKPLLRLKGFPSFPLVERQANEVDWWDMVCNVKKLINEKKEDGKVFWQNLAGYKRQEALRPYLSSEEDRKKGKKFARYQLGDLLLHLEKKHGEDWGKVYDEAWERIDKKVEGLSKHIKLEEERRSEDAQSKAALTDWLRAKASFVIEGLKEADKDEFCRCELKLQKWYGDLRGKPFAIEAENSILDISGFSKQYNCAFIWQKDGVKKLNLYLIINYFKGGKLRFKKIKPEAFEANRFYTVINKKSGEIVPMEVNFNFDDPNLIILPLAFGKRQGREFIWNDLLSLETGSLKLANGRVIEKTLYNRRTRQDEPALFVALTFERREVLDSSNIKPMNLIGVDRGENIPAVIALTDPEGCPLSRFKDSLGNPTHILRIGESYKEKQRTIQAKKEVEQRRAGGYSRKYASKAKNLADDMVRNTARDLLYYAVTQDAMLIFENLSRGFGRQGKRTFMAERQYTRMEDWLTAKLAYEGLPSKTYLSKTLAQYTSKTCSNCGFTITSADYDRVLEKLKKTATGWMTTINGKELKVEGQITYYNRYKRQNVVKDLSVELDRLSEESVNNDISSWTKGRSGNEALSLLKKRFSHRPVQEKFVCLNCGFETHADEQAALNIARSWLFLRSQEYKKYQTNKTTGNTDKRAFVETWQSFYRKKLKEVWKPAV

SEQ ID NO: 42406 - protein, 979 aa, synthetic construct
  REGION 1..979: note = engineered CasX variant
QEIKRINKIRRRLVKDSNTKKAGKTGPMKTLLVRVMTPDLRERLENLRKKPPNIPQPISNTSRANLNKLLTDYTEMKKAILHVYWEEFQKDPVGLMSRVAQPASKKIDQNKLKPEMDEKGNLTTAGFACSQCGQPLFVYKLEQVSEKGKAYTNYFGRCNVAEHEKLILLAQLKPEKDSDEAVTYSLGKFGQRALDFYSIHVTKESTHPVKPLAQIAGNRYASAPVGKALSDACMGTIASFLSKYQDIIIEHQKVVKGNQKRLESLRELAGKENLEYPSVTLPPQPHTKEGVDAYNEVIARVRMWVNLNLWQKLKLSRDDAKPLLRLKGFPSFPLVERQANEVDWWDMVCNVKKLINEKKEDGKVFWQNLAGYKRQEALRPYLSSEEDRKKGKKFARYQLGDLLLHLEKKHGEDWGKVYDEAWERIDKKVEGLSKHIKLEEERRSEDAQSKAALTDWLRAKASFVIEGLKEADKDEFCRCELKLQKWYGDLRGKPFAIEAENSILDISGFSKQYNCAFIWQKDGVKKLNLYLIINYFKGGKLRFKKIKPEAFEANRFYTVINKKSGEIVPMEVNFNFDDPNLIILPLAFGKRQGREFIWNDLLSLETGSLKLANGRVIEKTLYNRRTRQDEPALFVALTFERREVLDSSNIKPMNLIGVDRGENIPAVIALTDPEGCPLSRFKDSLGNPTHILRIGESYKEKQRTIQAKKEVEQRRAGGYSRKYASKAKNLADDMVRNTARDLLYYAVTQDAMLIFENLSRGFGRQGKRTFMAERQYTRMEDWLTAKLAYEGLPSKTYLSKTLAQYTSKTCSNCGFTITSADYDRVLEKLKKTATGWMTTINGKELKVEGQITYYNRYKRQNVVKDLSVELDRLSEESVNNDISSWTKGRSGNEALSLLKKRFSHRPVQEKFVCLNCGFETHADEQAALNIARSWLFLRSQEYKKYQTNKTTGNTDKRAFVETWQSFYRKKLKEVWKPAV

SEQ ID NO: 42407 - protein, 979 aa, synthetic construct
  REGION 1..979: note = engineered CasX variant
QEIKRINKIRRRLVKDSNTKKAGKTGPMKTLLVRVMTPDLRERLENLRKKPPNIPQPISNTSRANLNKLLTDYTEMKKAILHVYWEEFQKDPVGLMSRVAQPASKKIDQNKLKPEMDEKGNLTTAGFACSQCGQPLFVYKLEQVSEKGKAYTNYFGRCNVAEHEKLILLAQLKPEKDSDEAVTYSLGKFGQRALDFYSIHVTKESTHPVKPLAQIAGNRYASVPVGKALSDACMGTIASFLSKYQDIIIEHQKVVKGNQKRLESLRELAGKENLEYPSVTLPPQPHTKEGVDAYNEVIARVRMWVNLNLWQKLKLSRDDAKPLLRLKGFPSFPLVERQANEVDWWDMVCNVKKLINEKKEDGKVFWQNLAGYKRQEALRPYLSSEEDRKKGKKFARYQLGDLLLHLEKKHGEDWGKVYDEAWERIDKKVEGLSKHIKLEEERRSEDAQSKAALTDWLRAKASFVIEGLKEADKDEFCRCELKLQKWYGDLRGKPFAIEAENSILDISGFSKQYNCAFIWQKDGVKKLNLYLIINYFKGGKLRFKKIKPEAFEANRFYTVINKKSGEIVPMEVNFNFDDPNLIILPLAFGKRQGREFIWNDLLSLETGSLKLANGRVIEKTLYNRRTRQDEPALFVALTFERREVLDSSNIKPMNLIGVDRGENIPAVIALTDPEGCPLSRFKDSLGNPTHILRIGESYKEKQRTIQAKKEVEQRRAGGYSRKYASKAKNLADDMVRNTARDLLYYAVTQDAMLIFENLSRGFGRQGKRTFMAERQYTRMEDWLTAKLAYEGLPSKTYLSKTLAQYTSKTCSNCGFTITSADYDRVLEKLKKTATGWMTTINGKELKVEGQITYYNRYKRQNVVKDLSVELDRLSEESVNNDISSWTKGRSGNEALSLLKKRFSHRPVQEKFVCLNCGFETHADEQAALNIARSWLFLRSQEYKKYQTNKTTGNTDKRAFVETWQSFYRKKLKEVWKPAV

SEQ ID NO: 42408 - protein, 979 aa, synthetic construct
  REGION 1..979: note = engineered CasX variant
QEIKRINKIRRRLVKDSNTKKAGKTGPMKTLLVRVMTPDLRERLENLRKKPPNIPQPISNTSRANLNKLLTDYTEMKKAILHVYWEEFQKDPVGLMSRVAQPASKKIDQNKLKPEMDEKGNLTTAGFACSQCGQPLFVYKLEQVSEKGKAYTNYFGRCNVAEHEKLIKLAQLKPEKDSDEAVTYSLGKFGQRALDFYSIHVTKESTHPVKPLAQIAGNRYASGPVGKALSDACMGTIASFLSKYQDIIIEHQKVVKGNQKRLESLRELAGKENLEYPSVTLPPQPHTKEGVDAYNEVIARVRMWVNLNLWQKLKLSRDDAKPLLRLKGFPSFPLVERQANEVDWWDMVCNVKKLINEKKEDGKVFWQNLAGYKRQEALRPYLSSEEDRKKGKKFARYQLGDLLLHLEKKHGEDWGKVYDEAWERIDKKVEGLSKHIKLEEERRSEDAQSKAALTDWLRAKASFVIEGLKEADKDEFCRCELKLQKWYGDLRGKPFAIEAENSILDISGFSKQYNCAFIWQKDGVKKLNLYLIINYFKGGKLRFKKIKPEAFEANRFYTVINKKSGEIVPMEVNFNFDDPNLIILPLAFGKRQGREFIWNDLLSLETGSLKLANGRVIEKTLYNRRTRQDEPALFVALTFERREVLDSSNIKPMNLIGVDRGENIPAVIALTDPEGCPLSRFKDSLGNPTHILRIGESYKEKQRTIQAKKEVEQRRAGGYSRKYASKAKNLADDMVRNTARDLLYYAVTQDAMLIFENLSRGFGRQGKRTFMAERQYTRMEDWLTAKLAYEGLPSKTYLSKTLAQYTSKTCSNCGFTITSADYDRVLEKLKKTATGWMTTINGKELKVEGQITYYNRYKRQNVVKDLSVELDRLSEESVNNDISSWTKGRSGNEALSLLKKRFSHRPVQEKFVCLNCGFETHADEQAALNIARSWLFLRSQEYKKYQTNKTTGNTDKRAFVETWQSFYRKKLKEVWKPAV

SEQ ID NO: 42409 - protein, 978 aa, synthetic construct
  REGION 1..978: note = engineered CasX variant
QEIKRINKIRRRLVKDSNTKKAGKTGPMKTLLVRVMTPDLRERLENLRKKPPNIPQPISNTSRANLNKLLTDYTEMKKAILHVYWEEFQKDPVGLMSRVAQPASKKIDQNKLKPEMDEKGNLTTAGFACSQCGQPLFVYKLEQVSEKGKAYTNYFGRCNVAEHEKLILLAQLKPEKDSDEAVTYSLGKFGQRALDFYSIHVTKESTHPVKPLAQIAGNRYASPVGKALSDACMGTIASFLSKYQDIIIEHQKVVKGNQKRLESLRELAGKENLEYPSVTLPPQPHTKEGVDAYNEVIARVRMWVNLNLWQKLKLSRDDAKPLLRLKGFPSFPLVERQANEVDWWDMVCNVKKLINEKKEDGKVFWQNLAGYKRQEALRPYLSSEEDRKKGKKFARYQLGDLLLHLEKKHGEDWGKVYDEAWERIDKKVEGLSKHIKLEEERRSEDAQSKAALTDWLRAKASFVIEGLKEADKDEFCRCELKLQKWYGDLRGKPFAIEAENSILDISGFSKQYNCAFIWQKDGVKKLNLYLIINYFKGGKLRFKKIKPEAFEANRFYTVINKKSGEIVPMEVNFNFDDPNLIILPLAFGKRQGREFIWNDLLSLETGSLKLANGRVIEKTLYNRRTRQDEPALFVALTFERREVLDSSNIKPMNLIGVDRGENIPAVIALTDPEGCPLSRFKDSLGNPTHILRIGESYKEKQRTIQAKKEVEQRRAGGYSRKYASKAKNLADDMVRNTARDLLYYAVTQDAMLIFENLSRGFGRQGKRTFMAERQYTRMEDWLTAKLAYEGLPSKTYLSKTLAQYTSKTCSNCGFTITSADYDRVLEKLKKTATGWMTTINGKELKVEGQITYYNRYKRQNVVKDLSVELDRLSEESVNNDISSWTKGRSGNEALSLLKKRFSHRPVQEKFVCLNCGFETHADEQAALNIARSWLFLRSQEYKKYQTNKTTGNTDKRAFVETWQSFYRKKLKEVWKPAV

SEQ ID NO: 42410 - protein, 978 aa, synthetic construct
  REGION 1..978: note = engineered CasX variant
QEIKRINKIRRRLVKDSNTKKAGKTGPMKTLLVRVMTPDLRERLENLRKKPPNIPQPISNTSRANLNKLLTDYTEMKKAILHVYWEEFQKDPVGLMSRVAQPASKKIDQNKLKPEMDEKGNLTTAGFACSQCGQPLFVYKLEQVSEKGKAYTNYFGRCNVAEHEKLILLAQLKPEKDSDEAVTYSLGKFGQRALDFYSIHVTKESTHPVKPLAQIAGNRYASYPVGKALSDACMGTIASFLSKYQDIIIEHQKVVKGNQKRLESLRELAGKENLEYPSVTLPPQPHTKEGVDAYNEVIARVRMWVNLNLWQKLKLSRDDAKPLLRLKGFPSFPLVERQANEVDWWDMVCNVKKLINEKKEDGKVFWQNLAGYKRQEALRPYLSSEEDRQKGKKFARYQLGDLLLHLEKKHGEDWGKVYDEAWERIDKKVEGLSKHIKLEEERRSEDAQSKAALTDWLRAKASFVIEGLKEADKDEFCRCELKLQKWYGDLRGKPFAIEAENSILDISGFSKQYNCAFIWQKDGVKKLNLYLIINYFKGGKLRFKKIKPEAFEANRFYTVINKKSGEIVPMEVNFNFDDPNLIILPLAFGKRQGREFIWNDLLSLETGSLKLANGRVIEKTLYNRRTRQDEPALFVALTFERREVLDSSNIKPMNLIGVDRGENIPAVIALTDPEGCPLSRFKDSLGNPTHILRIGESYKEKQRTIQAKKEVEQRRAGGYSRKYASKAKNLADDMVRNTARDLLYYAVTQDAMLIFENLSRGFGRQGKRTFMAERQYTRMEDWLTAKLAYEGLPSKTYLSKTLAQYTSKTCSNCGFTITSADYDRVLEKLKKTATGWMTTINGKELKVEGQITYYNRYKRQNVVKDLSVELDRLSEESVNNDISSWTKGRSGEALSLLKKRFSHRPVQEKFVCLNCGFETHADEQAALNIARSWLFLRSQEYKKYQTNKTTGNTDKRAFVETWQSFYRKKLKEVWKPAV

SEQ ID NO: 42411 - protein, 978 aa, synthetic construct
  REGION 1..978: note = engineered CasX variant
QEIKRINKIRRRLVKDSNTKKAGKTGPMKTLLVRVMTPDLRERLENLRKKPPNIPQPISNTSRANLNKLLTDYTEMKKAILHVYWEEFQKDPVGLMSRVAQPASKKIDQNKLKPEMDEKGNLTTAGFACSQCGQPLFVYKLEQVSEKGKAYTNYFGRCNVAEHEKLILLAQLKPEKDSDEAVTYSLGKFGQRALDFYSIHVTKESTHPVKPLAQIAGNRYASHPVGKALSDACMGTIASFLSKYQDIIIEHQKVVKGNQKRLESLRELAGKENLEYPSVTLPPQPHTKEGVDAYNEVIARVRMWVNLNLWQKLKLSRDDAKPLLRLKGFPSFPLVERQANEVDWWDMVCNVKKLINEKKEDGKVFWQNLAGYKRQEALRPYLSSEEDRQKGKKFARYQLGDLLLHLEKKHGEDWGKVYDEAWERIDKKVEGLSKHIKLEEERRSEDAQSKAALTDWLRAKASFVIEGLKEADKDEFCRCELKLQKWYGDLRGKPFAIEAENSILDISGFSKQYNCAFIWQKDGVKKLNLYLIINYFKGGKLRFKKIKPEAFEANRFYTVINKKSGEIVPMEVNFNFDDPNLIILPLAFGKRQGREFIWNDLLSLETGSLKLANGRVIEKTLYNRRTRQDEPALFVALTFERREVLDSSNIKPMNLIGVDRGENIPAVIALTDPEGCPLSRFKDSLGNPTHILRIGESYKEKQRTIQAKKEVEQRRAGGYSRKYASKAKNLADDMVRNTARDLLYYAVTQDAMLIFENLSRGFGRQGKRTFMAERQYTRMEDWLTAKLAYEGLPSKTYLSKTLAQYTSKTCSNCGFTITSADYDRVLEKLKKTATGWMTTINGKELKVEGQITYYNRYKRQNVVKDLSVELDRLSEESVNNDISSWTKGRSGEALSLLKKRFSHRPVQEKFVCLNCGFETHADEQAALNIARSWLFLRSQEYKKYQTNKTTGNTDKRAFVETWQSFYRKKLKEVWKPAV

SEQ ID NO: 42412 - protein, 978 aa, synthetic construct
  REGION 1..978: note = engineered CasX variant
QEIKRINKIRRRLVKDSNTKKAGKTGPMKTLLVRVMTPDLRERLENLRKKPPNIPQPISNTSRANLNKLLTDYTEMKKAILHVYWEEFQKDPVGLMSRVAQPASKKIDQNKLKPEMDEKGNLTTAGFACSQCGQPLFVYKLEQVSEKGKAYTNYFGRCNVAEHEKLILLAQLKPEKDSDEAVTYSLGKFGQRALDFYSIHVTKESTHPVKPLAQIAGNRYASSPVGKALSDACMGTIASFLSKYQDIIIEHQKVVKGNQKRLESLRELAGKENLEYPSVTLPPQPHTKEGVDAYNEVIARVRMWVNLNLWQKLKLSRDDAKPLLRLKGFPSFPLVERQANEVDWWDMVCNVKKLINEKKEDGKVFWQNLAGYKRQEALRPYLSSEEDRQKGKKFARYQLGDLLLHLEKKHGEDWGKVYDEAWERIDKKVEGLSKHIKLEEERRSEDAQSKAALTDWLRAKASFVIEGLKEADKDEFCRCELKLQKWYGDLRGKPFAIEAENSILDISGFSKQYNCAFIWQKDGVKKLNLYLIINYFKGGKLRFKKIKPEAFEANRFYTVINKKSGEIVPMEVNFNFDDPNLIILPLAFGKRQGREFIWNDLLSLETGSLKLANGRVIEKTLYNRRTRQDEPALFVALTFERREVLDSSNIKPMNLIGVDRGENIPAVIALTDPEGCPLSRFKDSLGNPTHILRIGESYKEKQRTIQAKKEVEQRRAGGYSRKYASKAKNLADDMVRNTARDLLYYAVTQDAMLIFENLSRGFGRQGKRTFMAERQYTRMEDWLTAKLAYEGLPSKTYLSKTLAQYTSKTCSNCGFTITSADYDRVLEKLKKTATGWMTTINGKELKVEGQITYYNRYKRQNVVKDLSVELDRLSEESVNNDISSWTKGRSGEALSLLKKRFSHRPVQEKFVCLNCGFETHADEQAALNIARSWLFLRSQEYKKYQTNKTTGNTDKRAFVETWQSFYRKKLKEVWKPAV

SEQ ID NO: 42413 - protein, 978 aa, synthetic construct
  REGION 1..978: note = engineered CasX variant
QEIKRINKIRRRLVKDSNTKKAGKTGPMKTLLVRVMTPDLRERLENLRKKPPNIPQPISNTSRANLNKLLTDYTEMKKAILHVYWEEFQKDPVGLMSRVAQPASKKIDQNKLKPEMDEKGNLTTAGFACSQCGQPLFVYKLEQVSEKGKAYTNYFGRCNVAEHEKLILLAQLKPEKDSDEAVTYSLGKFGQRALDFYSIHVTKESTHPVKPLAQIAGNRYASTPVGKALSDACMGTIASFLSKYQDIIIEHQKVVKGNQKRLESLRELAGKENLEYPSVTLPPQPHTKEGVDAYNEVIARVRMWVNLNLWQKLKLSRDDAKPLLRLKGFPSFPLVERQANEVDWWDMVCNVKKLINEKKEDGKVFWQNLAGYKRQEALRPYLSSEEDRQKGKKFARYQLGDLLLHLEKKHGEDWGKVYDEAWERIDKKVEGLSKHIKLEEERRSEDAQSKAALTDWLRAKASFVIEGLKEADKDEFCRCELKLQKWYGDLRGKPFAIEAENSILDISGFSKQYNCAFIWQKDGVKKLNLYLIINYFKGGKLRFKKIKPEAFEANRFYTVINKKSGEIVPMEVNFNFDDPNLIILPLAFGKRQGREFIWNDLLSLETGSLKLANGRVIEKTLYNRRTRQDEPALFVALTFERREVLDSSNIKPMNLIGVDRGENIPAVIALTDPEGCPLSRFKDSLGNPTHILRIGESYKEKQRTIQAKKEVEQRRAGGYSRKYASKAKNLADDMVRNTARDLLYYAVTQDAMLIFENLSRGFGRQGKRTFMAERQYTRMEDWLTAKLAYEGLPSKTYLSKTLAQYTSKTCSNCGFTITSADYDRVLEKLKKTATGWMTTINGKELKVEGQITYYNRYKRQNVVKDLSVELDRLSEESVNNDISSWTKGRSGEALSLLKKRFSHRPVQEKFVCLNCGFETHADEQAALNIARSWLFLRSQEYKKYQTNKTTGNTDKRAFVETWQSFYRKKLKEVWKPAV

SEQ ID NO: 42414 - protein, 978 aa, synthetic construct
  REGION 1..978: note = engineered CasX variant
QEIKRINKIRRRLVKDSNTKKAGKTGPMKTLLVRVMTPDLRERLENLRKKPPNIPQPISNTSRANLNKLLTDYTEMKKAILHVYWEEFQKDPVGLMSRVAQPASKKIDQNKLKPEMDEKGNLTTAGFACSQCGQPLFVYKLEQVSEKGKAYTNYFGRCNVAEHEKLILLAQLKPEKDSDEAVTYSLGKFGQRALDFYSIHVTKESTHPVKPLAQIAGNRYASAPVGKALSDACMGTIASFLSKYQDIIIEHQKVVKGNQKRLESLRELAGKENLEYPSVTLPPQPHTKEGVDAYNEVIARVRMWVNLNLWQKLKLSRDDAKPLLRLKGFPSFPLVERQANEVDWWDMVCNVKKLINEKKEDGKVFWQNLAGYKRQEALRPYLSSEEDRQKGKKFARYQLGDLLLHLEKKHGEDWGKVYDEAWERIDKKVEGLSKHIKLEEERRSEDAQSKAALTDWLRAKASFVIEGLKEADKDEFCRCELKLQKWYGDLRGKPFAIEAENSILDISGFSKQYNCAFIWQKDGVKKLNLYLIINYFKGGKLRFKKIKPEAFEANRFYTVINKKSGEIVPMEVNFNFDDPNLIILPLAFGKRQGREFIWNDLLSLETGSLKLANGRVIEKTLYNRRTRQDEPALFVALTFERREVLDSSNIKPMNLIGVDRGENIPAVIALTDPEGCPLSRFKDSLGNPTHILRIGESYKEKQRTIQAKKEVEQRRAGGYSRKYASKAKNLADDMVRNTARDLLYYAVTQDAMLIFENLSRGFGRQGKRTFMAERQYTRMEDWLTAKLAYEGLPSKTYLSKTLAQYTSKTCSNCGFTITSADYDRVLEKLKKTATGWMTTINGKELKVEGQITYYNRYKRQNVVKDLSVELDRLSEESVNNDISSWTKGRSGEALSLLKKRFSHRPVQEKFVCLNCGFETHADEQAALNIARSWLFLRSQEYKKYQTNKTTGNTDKRAFVETWQSFYRKKLKEVWKPAV

SEQ ID NO: 42415 - protein, 978 aa, synthetic construct
  REGION 1..978: note = engineered CasX variant
QEIKRINKIRRRLVKDSNTKKAGKTGPMKTLLVRVMTPDLRERLENLRKKPPNIPQPISNTSRANLNKLLTDYTEMKKAILHVYWEEFQKDPVGLMSRVAQPASKKIDQNKLKPEMDEKGNLTTAGFACSQCGQPLFVYKLEQVSEKGKAYTNYFGRCNVAEHEKLILLAQLKPEKDSDEAVTYSLGKFGQRALDFYSIHVTKESTHPVKPLAQIAGNRYASVPVGKALSDACMGTIASFLSKYQDIIIEHQKVVKGNQKRLESLRELAGKENLEYPSVTLPPQPHTKEGVDAYNEVIARVRMWVNLNLWQKLKLSRDDAKPLLRLKGFPSFPLVERQANEVDWWDMVCNVKKLINEKKEDGKVFWQNLAGYKRQEALRPYLSSEEDRQKGKKFARYQLGDLLLHLEKKHGEDWGKVYDEAWERIDKKVEGLSKHIKLEEERRSEDAQSKAALTDWLRAKASFVIEGLKEADKDEFCRCELKLQKWYGDLRGKPFAIEAENSILDISGFSKQYNCAFIWQKDGVKKLNLYLIINYFKGGKLRFKKIKPEAFEANRFYTVINKKSGEIVPMEVNFNFDDPNLIILPLAFGKRQGREFIWNDLLSLETGSLKLANGRVIEKTLYNRRTRQDEPALFVALTFERREVLDSSNIKPMNLIGVDRGENIPAVIALTDPEGCPLSRFKDSLGNPTHILRIGESYKEKQRTIQAKKEVEQRRAGGYSRKYASKAKNLADDMVRNTARDLLYYAVTQDAMLIFENLSRGFGRQGKRTFMAERQYTRMEDWLTAKLAYEGLPSKTYLSKTLAQYTSKTCSNCGFTITSADYDRVLEKLKKTATGWMTTINGKELKVEGQITYYNRYKRQNVVKDLSVELDRLSEESVNNDISSWTKGRSGEALSLLKKRFSHRPVQEKFVCLNCGFETHADEQAALNIARSWLFLRSQEYKKYQTNKTTGNTDKRAFVETWQSFYRKKLKEVWKPAV

SEQ ID NO: 42416 - protein, 978 aa, synthetic construct
  REGION 1..978: note = engineered CasX variant
QEIKRINKIRRRLVKDSNTKKAGKTGPMKTLLVRVMTPDLRERLENLRKKPPNIPQPISNTSRANLNKLLTDYTEMKKAILHVYWEEFQKDPVGLMSRVAQPASKKIDQNKLKPEMDEKGNLTTAGFACSQCGQPLFVYKLEQVSEKGKAYTNYFGRCNVAEHEKLIKLAQLKPEKDSDEAVTYSLGKFGQRALDFYSIHVTKESTHPVKPLAQIAGNRYASGPVGKALSDACMGTIASFLSKYQDIIIEHQKVVKGNQKRLESLRELAGKENLEYPSVTLPPQPHTKEGVDAYNEVIARVRMWVNLNLWQKLKLSRDDAKPLLRLKGFPSFPLVERQANEVDWWDMVCNVKKLINEKKEDGKVFWQNLAGYKRQEALRPYLSSEEDRQKGKKFARYQLGDLLLHLEKKHGEDWGKVYDEAWERIDKKVEGLSKHIKLEEERRSEDAQSKAALTDWLRAKASFVIEGLKEADKDEFCRCELKLQKWYGDLRGKPFAIEAENSILDISGFSKQYNCAFIWQKDGVKKLNLYLIINYFKGGKLRFKKIKPEAFEANRFYTVINKKSGEIVPMEVNFNFDDPNLIILPLAFGKRQGREFIWNDLLSLETGSLKLANGRVIEKTLYNRRTRQDEPALFVALTFERREVLDSSNIKPMNLIGVDRGENIPAVIALTDPEGCPLSRFKDSLGNPTHILRIGESYKEKQRTIQAKKEVEQRRAGGYSRKYASKAKNLADDMVRNTARDLLYYAVTQDAMLIFENLSRGFGRQGKRTFMAERQYTRMEDWLTAKLAYEGLPSKTYLSKTLAQYTSKTCSNCGFTITSADYDRVLEKLKKTATGWMTTINGKELKVEGQITYYNRYKRQNVVKDLSVELDRLSEESVNNDISSWTKGRSGEALSLLKKRFSHRPVQEKFVCLNCGFETHADEQAALNIARSWLFLRSQEYKKYQTNKTTGNTDKRAFVETWQSFYRKKLKEVWKPAV

SEQ ID NO: 42417 - protein, 977 aa, synthetic construct
  REGION 1..977: note = engineered CasX variant
QEIKRINKIRRRLVKDSNTKKAGKTGPMKTLLVRVMTPDLRERLENLRKKPPNIPQPISNTSRANLNKLLTDYTEMKKAILHVYWEEFQKDPVGLMSRVAQPASKKIDQNKLKPEMDEKGNLTTAGFACSQCGQPLFVYKLEQVSEKGKAYTNYFGRCNVAEHEKLILLAQLKPEKDSDEAVTYSLGKFGQRALDFYSIHVTKESTHPVKPLAQIAGNRYASPVGKALSDACMGTIASFLSKYQDIIIEHQKVVKGNQKRLESLRELAGKENLEYPSVTLPPQPHTKEGVDAYNEVIARVRMWVNLNLWQKLKLSRDDAKPLLRLKGFPSFPLVERQANEVDWWDMVCNVKKLINEKKEDGKVFWQNLAGYKRQEALRPYLSSEEDRQKGKKFARYQLGDLLLHLEKKHGEDWGKVYDEAWERIDKKVEGLSKHIKLEEERRSEDAQSKAALTDWLRAKASFVIEGLKEADKDEFCRCELKLQKWYGDLRGKPFAIEAENSILDISGFSKQYNCAFIWQKDGVKKLNLYLIINYFKGGKLRFKKIKPEAFEANRFYTVINKKSGEIVPMEVNFNFDDPNLIILPLAFGKRQGREFIWNDLLSLETGSLKLANGRVIEKTLYNRRTRQDEPALFVALTFERREVLDSSNIKPMNLIGVDRGENIPAVIALTDPEGCPLSRFKDSLGNPTHILRIGESYKEKQRTIQAKKEVEQRRAGGYSRKYASKAKNLADDMVRNTARDLLYYAVTQDAMLIFENLSRGFGRQGKRTFMAERQYTRMEDWLTAKLAYEGLPSKTYLSKTLAQYTSKTCSNCGFTITSADYDRVLEKLKKTATGWMTTINGKELKVEGQITYYNRYKRQNVVKDLSVELDRLSEESVNNDISSWTKGRSGEALSLLKKRFSHRPVQEKFVCLNCGFETHADEQAALNIARSWLFLRSQEYKKYQTNKTTGNTDKRAFVETWQSFYRKKLKEVWKPAV

SEQ ID NO: 42418 - protein, 978 aa, synthetic construct
  REGION 1..978: note = engineered CasX variant
QEIKRINKIRRRLVKDSNTKKAGKTGPMKTLLVRVMTPDLRERLENLRKKPPNIPQPISNTSRANLNKLLTDYTEMKKAILHVYWEEFQKDPVGLMSRVAQPASKKIDQNKLKPEMDEKGNLTTAGFACSQCGQPLFVYKLEQVSEKGKAYTNYFGRCNVAEHEKLILLAQLKPEKDSDEAVTYSLGKFGQRALDFYSIHVTKESTHPVKPLAQIAGNRYASYPVGKALSDACMGTIASFLSKYQDIIIEHQKVVKGNQKRLESLRELAGKENLEYPSVTLPPQPHTKEGVDAYNEVIARVRMWVNLNLWQKLKLSRDDAKPLLRLKGFPSFPLVERQANEVDWWDMVCNVKKLINEKKEDGKVFWQNLAGYKRQEALRPYLSSEEDRKKGKKFARYQLGDLLLHLEKKHGEDWGKVYDEAWERIDKKVEGLSKHIKLEEERRSEDAQSKAALTDWLRAKASFVIEGLKEADKDEFCRCELKLQKWYGDLRGKPFAIEAENSILDISGFSKQYNCAFIWQKDGVKKLNLYLIINYFKGGKLRFKKIKPEAFEANRFYTVINKKSGEIVPMEVNFNFDDPNLIILPLAFGKRQGREFIWNDLLSLETGSLKLANGRVIEKTLYNRRTRQDEPALFVALTFERREVLDSSNIKPMNLIGVDRGENIPAVIALTDPEGCPLSRFKDSLGNPTHILRIGESYKEKQRTIQAKKEVEQRRAGGYSRKYASKAKNLADDMVRNTARDLLYYAVTQDAMLIFENLSRGFGRQGKRTFMAERQYTRMEDWLTAKLAYEGLPSQTYLSKTLAQYTSKTCSNCGFTITSADYDRVLEKLKKTATGWMTTINGKELKVEGQITYYNRYKRQNVVKDLSVELDRLSEESVNNDISSWTKGRSGEALSLLKKRFSHRPVQEKFVCLNCGFETHADEQAALNIARSWLFLRSQEYKKYQTNKTTGNTDKRAFVETWQSFYRKKLKEVWKPAV

SEQ ID NO: 42419 - protein, 978 aa, synthetic construct
  REGION 1..978: note = engineered CasX variant
QEIKRINKIRRRLVKDSNTKKAGKTGPMKTLLVRVMTPDLRERLENLRKKPPNIPQPISNTSRANLNKLLTDYTEMKKAILHVYWEEFQKDPVGLMSRVAQPASKKIDQNKLKPEMDEKGNLTTAGFACSQCGQPLFVYKLEQVSEKGKAYTNYFGRCNVAEHEKLILLAQLKPEKDSDEAVTYSLGKFGQRALDFYSIHVTKESTHPVKPLAQIAGNRYASHPVGKALSDACMGTIASFLSKYQDIIIEHQKVVKGNQKRLESLRELAGKENLEYPSVTLPPQPHTKEGVDAYNEVIARVRMWVNLNLWQKLKLSRDDAKPLLRLKGFPSFPLVERQANEVDWWDMVCNVKKLINEKKEDGKVFWQNLAGYKRQEALRPYLSSEEDRKKGKKFARYQLGDLLLHLEKKHGEDWGKVYDEAWERIDKKVEGLSKHIKLEEERRSEDAQSKAALTDWLRAKASFVIEGLKEADKDEFCRCELKLQKWYGDLRGKPFAIEAENSILDISGFSKQYNCAFIWQKDGVKKLNLYLIINYFKGGKLRFKKIKPEAFEANRFYTVINKKSGEIVPMEVNFNFDDPNLIILPLAFGKRQGREFIWNDLLSLETGSLKLANGRVIEKTLYNRRTRQDEPALFVALTFERREVLDSSNIKPMNLIGVDRGENIPAVIALTDPEGCPLSRFKDSLGNPTHILRIGESYKEKQRTIQAKKEVEQRRAGGYSRKYASKAKNLADDMVRNTARDLLYYAVTQDAMLIFENLSRGFGRQGKRTFMAERQYTRMEDWLTAKLAYEGLPSQTYLSKTLAQYTSKTCSNCGFTITSADYDRVLEKLKKTATGWMTTINGKELKVEGQITYYNRYKRQNVVKDLSVELDRLSEESVNNDISSWTKGRSGEALSLLKKRFSHRPVQEKFVCLNCGFETHADEQAALNIARSWLFLRSQEYKKYQTNKTTGNTDKRAFVETWQSFYRKKLKEVWKPAV

SEQ ID NO: 42420 - protein, 978 aa, synthetic construct
  REGION 1..978: note = engineered CasX variant
QEIKRINKIRRRLVKDSNTKKAGKTGPMKTLLVRVMTPDLRERLENLRKKPPNIPQPISNTSRANLNKLLTDYTEMKKAILHVYWEEFQKDPVGLMSRVAQPASKKIDQNKLKPEMDEKGNLTTAGFACSQCGQPLFVYKLEQVSEKGKAYTNYFGRCNVAEHEKLILLAQLKPEKDSDEAVTYSLGKFGQRALDFYSIHVTKESTHPVKPLAQIAGNRYASSPVGKALSDACMGTIASFLSKYQDIIIEHQKVVKGNQKRLESLRELAGKENLEYPSVTLPPQPHTKEGVDAYNEVIARVRMWVNLNLWQKLKLSRDDAKPLLRLKGFPSFPLVERQANEVDWWDMVCNVKKLINEKKEDGKVFWQNLAGYKRQEALRPYLSSEEDRKKGKKFARYQLGDLLLHLEKKHGEDWGKVYDEAWERIDKKVEGLSKHIKLEEERRSEDAQSKAALTDWLRAKASFVIEGLKEADKDEFCRCELKLQKWYGDLRGKPFAIEAENSILDISGFSKQYNCAFIWQKDGVKKLNLYLIINYFKGGKLRFKKIKPEAFEANRFYTVINKKSGEIVPMEVNFNFDDPNLIILPLAFGKRQGREFIWNDLLSLETGSLKLANGRVIEKTLYNRRTRQDEPALFVALTFERREVLDSSNIKPMNLIGVDRGENIPAVIALTDPEGCPLSRFKDSLGNPTHILRIGESYKEKQRTIQAKKEVEQRRAGGYSRKYASKAKNLADDMVRNTARDLLYYAVTQDAMLIFENLSRGFGRQGKRTFMAERQYTRMEDWLTAKLAYEGLPSQTYLSKTLAQYTSKTCSNCGFTITSADYDRVLEKLKKTATGWMTTINGKELKVEGQITYYNRYKRQNVVKDLSVELDRLSEESVNNDISSWTKGRSGEALSLLKKRFSHRPVQEKFVCLNCGFETHADEQAALNIARSWLFLRSQEYKKYQTNKTTGNTDKRAFVETWQSFYRKKLKEVWKPAV

SEQ ID NO: 42421 - protein, 978 aa, synthetic construct
  REGION 1..978: note = engineered CasX variant
QEIKRINKIRRRLVKDSNTKKAGKTGPMKTLLVRVMTPDLRERLENLRKKPPNIPQPISNTSRANLNKLLTDYTEMKKAILHVYWEEFQKDPVGLMSRVAQPASKKIDQNKLKPEMDEKGNLTTAGFACSQCGQPLFVYKLEQVSEKGKAYTNYFGRCNVAEHEKLILLAQLKPEKDSDEAVTYSLGKFGQRALDFYSIHVTKESTHPVKPLAQIAGNRYASTPVGKALSDACMGTIASFLSKYQDIIIEHQKVVKGNQKRLESLRELAGKENLEYPSVTLPPQPHTKEGVDAYNEVIARVRMWVNLNLWQKLKLSRDDAKPLLRLKGFPSFPLVERQANEVDWWDMVCNVKKLINEKKEDGKVFWQNLAGYKRQEALRPYLSSEEDRKKGKKFARYQLGDLLLHLEKKHGEDWGKVYDEAWERIDKKVEGLSKHIKLEEERRSEDAQSKAALTDWLRAKASFVIEGLKEADKDEFCRCELKLQKWYGDLRGKPFAIEAENSILDISGFSKQYNCAFIWQKDGVKKLNLYLIINYFKGGKLRFKKIKPEAFEANRFYTVINKKSGEIVPMEVNFNFDDPNLIILPLAFGKRQGREFIWNDLLSLETGSLKLANGRVIEKTLYNRRTRQDEPALFVALTFERREVLDSSNIKPMNLIGVDRGENIPAVIALTDPEGCPLSRFKDSLGNPTHILRIGESYKEKQRTIQAKKEVEQRRAGGYSRKYASKAKNLADDMVRNTARDLLYYAVTQDAMLIFENLSRGFGRQGKRTFMAERQYTRMEDWLTAKLAYEGLPSQTYLSKTLAQYTSKTCSNCGFTITSADYDRVLEKLKKTATGWMTTINGKELKVEGQITYYNRYKRQNVVKDLSVELDRLSEESVNNDISSWTKGRSGEALSLLKKRFSHRPVQEKFVCLNCGFETHADEQAALNIARSWLFLRSQEYKKYQTNKTTGNTDKRAFVETWQSFYRKKLKEVWKPAV

SEQ ID NO: 42422 - protein, 978 aa, synthetic construct
  REGION 1..978: note = engineered CasX variant
QEIKRINKIRRRLVKDSNTKKAGKTGPMKTLLVRVMTPDLRERLENLRKKPPNIPQPISNTSRANLNKLLTDYTEMKKAILHVYWEEFQKDPVGLMSRVAQPASKKIDQNKLKPEMDEKGNLTTAGFACSQCGQPLFVYKLEQVSEKGKAYTNYFGRCNVAEHEKLILLAQLKPEKDSDEAVTYSLGKFGQRALDFYSIHVTKESTHPVKPLAQIAGNRYASAPVGKALSDACMGTIASFLSKYQDIIIEHQKVVKGNQKRLESLRELAGKENLEYPSVTLPPQPHTKEGVDAYNEVIARVRMWVNLNLWQKLKLSRDDAKPLLRLKGFPSFPLVERQANEVDWWDMVCNVKKLINEKKEDGKVFWQNLAGYKRQEALRPYLSSEEDRKKGKKFARYQLGDLLLHLEKKHGEDWGKVYDEAWERIDKKVEGLSKHIKLEEERRSEDAQSKAALTDWLRAKASFVIEGLKEADKDEFCRCELKLQKWYGDLRGKPFAIEAENSILDISGFSKQYNCAFIWQKDGVKKLNLYLIINYFKGGKLRFKKIKPEAFEANRFYTVINKKSGEIVPMEVNFNFDDPNLIILPLAFGKRQGREFIWNDLLSLETGSLKLANGRVIEKTLYNRRTRQDEPALFVALTFERREVLDSSNIKPMNLIGVDRGENIPAVIALTDPEGCPLSRFKDSLGNPTHILRIGESYKEKQRTIQAKKEVEQRRAGGYSRKYASKAKNLADDMVRNTARDLLYYAVTQDAMLIFENLSRGFGRQGKRTFMAERQYTRMEDWLTAKLAYEGLPSQTYLSKTLAQYTSKTCSNCGFTITSADYDRVLEKLKKTATGWMTTINGKELKVEGQITYYNRYKRQNVVKDLSVELDRLSEESVNNDISSWTKGRSGEALSLLKKRFSHRPVQEKFVCLNCGFETHADEQAALNIARSWLFLRSQEYKKYQTNKTTGNTDKRAFVETWQSFYRKKLKEVWKPAV

SEQ ID NO: 42423 - protein, 978 aa, synthetic construct
  REGION 1..978: note = engineered CasX variant
QEIKRINKIRRRLVKDSNTKKAGKTGPMKTLLVRVMTPDLRERLENLRKKPPNIPQPISNTSRANLNKLLTDYTEMKKAILHVYWEEFQKDPVGLMSRVAQPASKKIDQNKLKPEMDEKGNLTTAGFACSQCGQPLFVYKLEQVSEKGKAYTNYFGRCNVAEHEKLILLAQLKPEKDSDEAVTYSLGKFGQRALDFYSIHVTKESTHPVKPLAQIAGNRYASVPVGKALSDACMGTIASFLSKYQDIIIEHQKVVKGNQKRLESLRELAGKENLEYPSVTLPPQPHTKEGVDAYNEVIARVRMWVNLNLWQKLKLSRDDAKPLLRLKGFPSFPLVERQANEVDWWDMVCNVKKLINEKKEDGKVFWQNLAGYKRQEALRPYLSSEEDRKKGKKFARYQLGDLLLHLEKKHGEDWGKVYDEAWERIDKKVEGLSKHIKLEEERRSEDAQSKAALTDWLRAKASFVIEGLKEADKDEFCRCELKLQKWYGDLRGKPFAIEAENSILDISGFSKQYNCAFIWQKDGVKKLNLYLIINYFKGGKLRFKKIKPEAFEANRFYTVINKKSGEIVPMEVNFNFDDPNLIILPLAFGKRQGREFIWNDLLSLETGSLKLANGRVIEKTLYNRRTRQDEPALFVALTFERREVLDSSNIKPMNLIGVDRGENIPAVIALTDPEGCPLSRFKDSLGNPTHILRIGESYKEKQRTIQAKKEVEQRRAGGYSRKYASKAKNLADDMVRNTARDLLYYAVTQDAMLIFENLSRGFGRQGKRTFMAERQYTRMEDWLTAKLAYEGLPSQTYLSKTLAQYTSKTCSNCGFTITSADYDRVLEKLKKTATGWMTTINGKELKVEGQITYYNRYKRQNVVKDLSVELDRLSEESVNNDISSWTKGRSGEALSLLKKRFSHRPVQEKFVCLNCGFETHADEQAALNIARSWLFLRSQEYKKYQTNKTTGNTDKRAFVETWQSFYRKKLKEVWKPAV

SEQ ID NO: 42424 - protein, 978 aa, synthetic construct
  REGION 1..978: note = engineered CasX variant
QEIKRINKIRRRLVKDSNTKKAGKTGPMKTLLVRVMTPDLRERLENLRKKPPNIPQPISNTSRANLNKLLTDYTEMKKAILHVYWEEFQKDPVGLMSRVAQPASKKIDQNKLKPEMDEKGNLTTAGFACSQCGQPLFVYKLEQVSEKGKAYTNYFGRCNVAEHEKLIKLAQLKPEKDSDEAVTYSLGKFGQRALDFYSIHVTKESTHPVKPLAQIAGNRYASGPVGKALSDACMGTIASFLSKYQDIIIEHQKVVKGNQKRLESLRELAGKENLEYPSVTLPPQPHTKEGVDAYNEVIARVRMWVNLNLWQKLKLSRDDAKPLLRLKGFPSFPLVERQANEVDWWDMVCNVKKLINEKKEDGKVFWQNLAGYKRQEALRPYLSSEEDRKKGKKFARYQLGDLLLHLEKKHGEDWGKVYDEAWERIDKKVEGLSKHIKLEEERRSEDAQSKAALTDWLRAKASFVIEGLKEADKDEFCRCELKLQKWYGDLRGKPFAIEAENSILDISGFSKQYNCAFIWQKDGVKKLNLYLIINYFKGGKLRFKKIKPEAFEANRFYTVINKKSGEIVPMEVNFNFDDPNLIILPLAFGKRQGREFIWNDLLSLETGSLKLANGRVIEKTLYNRRTRQDEPALFVALTFERREVLDSSNIKPMNLIGVDRGENIPAVIALTDPEGCPLSRFKDSLGNPTHILRIGESYKEKQRTIQAKKEVEQRRAGGYSRKYASKAKNLADDMVRNTARDLLYYAVTQDAMLIFENLSRGFGRQGKRTFMAERQYTRMEDWLTAKLAYEGLPSQTYLSKTLAQYTSKTCSNCGFTITSADYDRVLEKLKKTATGWMTTINGKELKVEGQITYYNRYKRQNVVKDLSVELDRLSEESVNNDISSWTKGRSGEALSLLKKRFSHRPVQEKFVCLNCGFETHADEQAALNIARSWLFLRSQEYKKYQTNKTTGNTDKRAFVETWQSFYRKKLKEVWKPAV

SEQ ID NO: 42425 - protein, 977 aa, synthetic construct
  REGION 1..977: note = engineered CasX variant
QEIKRINKIRRRLVKDSNTKKAGKTGPMKTLLVRVMTPDLRERLENLRKKPPNIPQPISNTSRANLNKLLTDYTEMKKAILHVYWEEFQKDPVGLMSRVAQPASKKIDQNKLKPEMDEKGNLTTAGFACSQCGQPLFVYKLEQVSEKGKAYTNYFGRCNVAEHEKLILLAQLKPEKDSDEAVTYSLGKFGQRALDFYSIHVTKESTHPVKPLAQIAGNRYASPVGKALSDACMGTIASFLSKYQDIIIEHQKVVKGNQKRLESLRELAGKENLEYPSVTLPPQPHTKEGVDAYNEVIARVRMWVNLNLWQKLKLSRDDAKPLLRLKGFPSFPLVERQANEVDWWDMVCNVKKLINEKKEDGKVFWQNLAGYKRQEALRPYLSSEEDRKKGKKFARYQLGDLLLHLEKKHGEDWGKVYDEAWERIDKKVEGLSKHIKLEEERRSEDAQSKAALTDWLRAKASFVIEGLKEADKDEFCRCELKLQKWYGDLRGKPFAIEAENSILDISGFSKQYNCAFIWQKDGVKKLNLYLIINYFKGGKLRFKKIKPEAFEANRFYTVINKKSGEIVPMEVNFNFDDPNLIILPLAFGKRQGREFIWNDLLSLETGSLKLANGRVIEKTLYNRRTRQDEPALFVALTFERREVLDSSNIKPMNLIGVDRGENIPAVIALTDPEGCPLSRFKDSLGNPTHILRIGESYKEKQRTIQAKKEVEQRRAGGYSRKYASKAKNLADDMVRNTARDLLYYAVTQDAMLIFENLSRGFGRQGKRTFMAERQYTRMEDWLTAKLAYEGLPSQTYLSKTLAQYTSKTCSNCGFTITSADYDRVLEKLKKTATGWMTTINGKELKVEGQITYYNRYKRQNVVKDLSVELDRLSEESVNNDISSWTKGRSGEALSLLKKRFSHRPVQEKFVCLNCGFETHADEQAALNIARSWLFLRSQEYKKYQTNKTTGNTDKRAFVETWQSFYRKKLKEVWKPAV

SEQ ID NO: 42426 - protein, 978 aa, synthetic construct
  REGION 1..978: note = engineered CasX variant
QEIKRINKIRRRLVKDSNTKKAGKTGPMKTLLVRVMTPDLRERLENLRKKPPNIPQPISNTSRANLNKLLTDYTEMKKAILHVYWEEFQKDPVGLMSRVAQPASKKIDQNKLKPEMDEKGNLTTAGFACSQCGQPLFVYKLEQVSEKGKAYTNYFGRCNVAEHEKLILLAQLKPEKDSDEAVTYSLGKFGQRALDFYSIHVTKESTHPVKPLAQIAGNRYASYPVGKALSDACMGTIASFLSKYQDIIIEHQKVVKGNQKRLESLRELAGKENLEYPSVTLPPQPHTKEGVDAYNEVIARVRMWVNLNLWQKLKLSRDDAKPLLRLKGFPSFPLVERQANEVDWWDMVCNVKKLINEKKEDGKVFWQNLAGYKRQEALRPYLSSEEDRKKGKKFARYQLGDLLLHLEKKHGEDWGKVYDEAWERIDKKVEGLSKHIKLEEERRSEDAQSKAALTDWLRAKASFVIEGLKEADKDEFCRCELKLQKWYGDLRGKPFAIEAENSILDISGFSKQYNCAFIWQKDGVKKLNLYLIINYFKGGKLRFKKIKPEAFEANRFYTVINKKSGEIVPMEVNFNFDDPNLIILPLAFGKRQGREFIWNDLLSLETGSLKLANGRVIEKTLYNRRTRQDEPALFVALTFERREVLDSSNIKPMNLIGVDRGENIPAVIALTDPEGCPLSRFKDSLGNPTHILRIGESYKEKQRTIQAKKEVEQRRAGGYSRKYASKAKNLADDMVRNTARDLLYYAVTQDAMLIFENLSRGFGRQGKRTFMAERQYTRMEDWLTAKLAYNGLPSKTYLSKTLAQYTSKTCSNCGFTITSADYDRVLEKLKKTATGWMTTINGKELKVEGQITYYNRYKRQNVVKDLSVELDRLSEESVNNDISSWTKGRSGEALSLLKKRFSHRPVQEKFVCLNCGFETHADEQAALNIARSWLFLRSQEYKKYQTNKTTGNTDKRAFVETWQSFYRKKLKEVWKPAV

SEQ ID NO: 42427 - protein, 978 aa, synthetic construct
  REGION 1..978: note = engineered CasX variant
QEIKRINKIRRRLVKDSNTKKAGKTGPMKTLLVRVMTPDLRERLENLRKKPPNIPQPISNTSRANLNKLLTDYTEMKKAILHVYWEEFQKDPVGLMSRVAQPASKKIDQNKLKPEMDEKGNLTTAGFACSQCGQPLFVYKLEQVSEKGKAYTNYFGRCNVAEHEKLILLAQLKPEKDSDEAVTYSLGKFGQRALDFYSIHVTKESTHPVKPLAQIAGNRYASHPVGKALSDACMGTIASFLSKYQDIIIEHQKVVKGNQKRLESLRELAGKENLEYPSVTLPPQPHTKEGVDAYNEVIARVRMWVNLNLWQKLKLSRDDAKPLLRLKGFPSFPLVERQANEVDWWDMVCNVKKLINEKKEDGKVFWQNLAGYKRQEALRPYLSSEEDRKKGKKFARYQLGDLLLHLEKKHGEDWGKVYDEAWERIDKKVEGLSKHIKLEEERRSEDAQSKAALTDWLRAKASFVIEGLKEADKDEFCRCELKLQKWYGDLRGKPFAIEAENSILDISGFSKQYNCAFIWQKDGVKKLNLYLIINYFKGGKLRFKKIKPEAFEANRFYTVINKKSGEIVPMEVNFNFDDPNLIILPLAFGKRQGREFIWNDLLSLETGSLKLANGRVIEKTLYNRRTRQDEPALFVALTFERREVLDSSNIKPMNLIGVDRGENIPAVIALTDPEGCPLSRFKDSLGNPTHILRIGESYKEKQRTIQAKKEVEQRRAGGYSRKYASKAKNLADDMVRNTARDLLYYAVTQDAMLIFENLSRGFGRQGKRTFMAERQYTRMEDWLTAKLAYNGLPSKTYLSKTLAQYTSKTCSNCGFTITSADYDRVLEKLKKTATGWMTTINGKELKVEGQITYYNRYKRQNVVKDLSVELDRLSEESVNNDISSWTKGRSGEALSLLKKRFSHRPVQEKFVCLNCGFETHADEQAALNIARSWLFLRSQEYKKYQTNKTTGNTDKRAFVETWQSFYRKKLKEVWKPAV

SEQ ID NO: 42428 - protein, 978 aa, synthetic construct
  REGION 1..978: note = engineered CasX variant
QEIKRINKIRRRLVKDSNTKKAGKTGPMKTLLVRVMTPDLRERLENLRKKPPNIPQPISNTSRANLNKLLTDYTEMKKAILHVYWEEFQKDPVGLMSRVAQPASKKIDQNKLKPEMDEKGNLTTAGFACSQCGQPLFVYKLEQVSEKGKAYTNYFGRCNVAEHEKLILLAQLKPEKDSDEAVTYSLGKFGQRALDFYSIHVTKESTHPVKPLAQIAGNRYASSPVGKALSDACMGTIASFLSKYQDIIIEHQKVVKGNQKRLESLRELAGKENLEYPSVTLPPQPHTKEGVDAYNEVIARVRMWVNLNLWQKLKLSRDDAKPLLRLKGFPSFPLVERQANEVDWWDMVCNVKKLINEKKEDGKVFWQNLAGYKRQEALRPYLSSEEDRKKGKKFARYQLGDLLLHLEKKHGEDWGKVYDEAWERIDKKVEGLSKHIKLEEERRSEDAQSKAALTDWLRAKASFVIEGLKEADKDEFCRCELKLQKWYGDLRGKPFAIEAENSILDISGFSKQYNCAFIWQKDGVKKLNLYLIINYFKGGKLRFKKIKPEAFEANRFYTVINKKSGEIVPMEVNFNFDDPNLIILPLAFGKRQGREFIWNDLLSLETGSLKLANGRVIEKTLYNRRTRQDEPALFVALTFERREVLDSSNIKPMNLIGVDRGENIPAVIALTDPEGCPLSRFKDSLGNPTHILRIGESYKEKQRTIQAKKEVEQRRAGGYSRKYASKAKNLADDMVRNTARDLLYYAVTQDAMLIFENLSRGFGRQGKRTFMAERQYTRMEDWLTAKLAYNGLPSKTYLSKTLAQYTSKTCSNCGFTITSADYDRVLEKLKKTATGWMTTINGKELKVEGQITYYNRYKRQNVVKDLSVELDRLSEESVNNDISSWTKGRSGEALSLLKKRFSHRPVQEKFVCLNCGFETHADEQAALNIARSWLFLRSQEYKKYQTNKTTGNTDKRAFVETWQSFYRKKLKEVWKPAV

SEQ ID NO: 42429 - protein, 978 aa, synthetic construct
  REGION 1..978: note = engineered CasX variant
QEIKRINKIRRRLVKDSNTKKAGKTGPMKTLLVRVMTPDLRERLENLRKKPPNIPQPISNTSRANLNKLLTDYTEMKKAILHVYWEEFQKDPVGLMSRVAQPASKKIDQNKLKPEMDEKGNLTTAGFACSQCGQPLFVYKLEQVSEKGKAYTNYFGRCNVAEHEKLILLAQLKPEKDSDEAVTYSLGKFGQRALDFYSIHVTKESTHPVKPLAQIAGNRYASTPVGKALSDACMGTIASFLSKYQDIIIEHQKVVKGNQKRLESLRELAGKENLEYPSVTLPPQPHTKEGVDAYNEVIARVRMWVNLNLWQKLKLSRDDAKPLLRLKGFPSFPLVERQANEVDWWDMVCNVKKLINEKKEDGKVFWQNLAGYKRQEALRPYLSSEEDRKKGKKFARYQLGDLLLHLEKKHGEDWGKVYDEAWERIDKKVEGLSKHIKLEEERRSEDAQSKAALTDWLRAKASFVIEGLKEADKDEFCRCELKLQKWYGDLRGKPFAIEAENSILDISGFSKQYNCAFIWQKDGVKKLNLYLIINYFKGGKLRFKKIKPEAFEANRFYTVINKKSGEIVPMEVNFNFDDPNLIILPLAFGKRQGREFIWNDLLSLETGSLKLANGRVIEKTLYNRRTRQDEPALFVALTFERREVLDSSNIKPMNLIGVDRGENIPAVIALTDPEGCPLSRFKDSLGNPTHILRIGESYKEKQRTIQAKKEVEQRRAGGYSRKYASKAKNLADDMVRNTARDLLYYAVTQDAMLIFENLSRGFGRQGKRTFMAERQYTRMEDWLTAKLAYNGLPSKTYLSKTLAQYTSKTCSNCGFTITSADYDRVLEKLKKTATGWMTTINGKELKVEGQITYYNRYKRQNVVKDLSVELDRLSEESVNNDISSWTKGRSGEALSLLKKRFSHRPVQEKFVCLNCGFETHADEQAALNIARSWLFLRSQEYKKYQTNKTTGNTDKRAFVETWQSFYRKKLKEVWKPAV

SEQ ID NO: 42430 - protein, 978 aa, synthetic construct
  REGION 1..978: note = engineered CasX variant
QEIKRINKIRRRLVKDSNTKKAGKTGPMKTLLVRVMTPDLRERLENLRKKPPNIPQPISNTSRANLNKLLTDYTEMKKAILHVYWEEFQKDPVGLMSRVAQPASKKIDQNKLKPEMDEKGNLTTAGFACSQCGQPLFVYKLEQVSEKGKAYTNYFGRCNVAEHEKLILLAQLKPEKDSDEAVTYSLGKFGQRALDFYSIHVTKESTHPVKPLAQIAGNRYASAPVGKALSDACMGTIASFLSKYQDIIIEHQKVVKGNQKRLESLRELAGKENLEYPSVTLPPQPHTKEGVDAYNEVIARVRMWVNLNLWQKLKLSRDDAKPLLRLKGFPSFPLVERQANEVDWWDMVCNVKKLINEKKEDGKVFWQNLAGYKRQEALRPYLSSEEDRKKGKKFARYQLGDLLLHLEKKHGEDWGKVYDEAWERIDKKVEGLSKHIKLEEERRSEDAQSKAALTDWLRAKASFVIEGLKEADKDEFCRCELKLQKWYGDLRGKPFAIEAENSILDISGFSKQYNCAFIWQKDGVKKLNLYLIINYFKGGKLRFKKIKPEAFEANRFYTVINKKSGEIVPMEVNFNFDDPNLIILPLAFGKRQGREFIWNDLLSLETGSLKLANGRVIEKTLYNRRTRQDEPALFVALTFERREVLDSSNIKPMNLIGVDRGENIPAVIALTDPEGCPLSRFKDSLGNPTHILRIGESYKEKQRTIQAKKEVEQRRAGGYSRKYASKAKNLADDMVRNTARDLLYYAVTQDAMLIFENLSRGFGRQGKRTFMAERQYTRMEDWLTAKLAYNGLPSKTYLSKTLAQYTSKTCSNCGFTITSADYDRVLEKLKKTATGWMTTINGKELKVEGQITYYNRYKRQNVVKDLSVELDRLSEESVNNDISSWTKGRSGEALSLLKKRFSHRPVQEKFVCLNCGFETHADEQAALNIARSWLFLRSQEYKKYQTNKTTGNTDKRAFVETWQSFYRKKLKEVWKPAV

SEQ ID NO: 42431 - protein, 978 aa, synthetic construct
  REGION 1..978: note = engineered CasX variant
QEIKRINKIRRRLVKDSNTKKAGKTGPMKTLLVRVMTPDLRERLENLRKKPPNIPQPISNTSRANLNKLLTDYTEMKKAILHVYWEEFQKDPVGLMSRVAQPASKKIDQNKLKPEMDEKGNLTTAGFACSQCGQPLFVYKLEQVSEKGKAYTNYFGRCNVAEHEKLILLAQLKPEKDSDEAVTYSLGKFGQRALDFYSIHVTKESTHPVKPLAQIAGNRYASVPVGKALSDACMGTIASFLSKYQDIIIEHQKVVKGNQKRLESLRELAGKENLEYPSVTLPPQPHTKEGVDAYNEVIARVRMWVNLNLWQKLKLSRDDAKPLLRLKGFPSFPLVERQANEVDWWDMVCNVKKLINEKKEDGKVFWQNLAGYKRQEALRPYLSSEEDRKKGKKFARYQLGDLLLHLEKKHGEDWGKVYDEAWERIDKKVEGLSKHIKLEEERRSEDAQSKAALTDWLRAKASFVIEGLKEADKDEFCRCELKLQKWYGDLRGKPFAIEAENSILDISGFSKQYNCAFIWQKDGVKKLNLYLIINYFKGGKLRFKKIKPEAFEANRFYTVINKKSGEIVPMEVNFNFDDPNLIILPLAFGKRQGREFIWNDLLSLETGSLKLANGRVIEKTLYNRRTRQDEPALFVALTFERREVLDSSNIKPMNLIGVDRGENIPAVIALTDPEGCPLSRFKDSLGNPTHILRIGESYKEKQRTIQAKKEVEQRRAGGYSRKYASKAKNLADDMVRNTARDLLYYAVTQDAMLIFENLSRGFGRQGKRTFMAERQYTRMEDWLTAKLAYNGLPSKTYLSKTLAQYTSKTCSNCGFTITSADYDRVLEKLKKTATGWMTTINGKELKVEGQITYYNRYKRQNVVKDLSVELDRLSEESVNNDISSWTKGRSGEALSLLKKRFSHRPVQEKFVCLNCGFETHADEQAALNIARSWLFLRSQEYKKYQTNKTTGNTDKRAFVETWQSFYRKKLKEVWKPAV

SEQ ID NO: 42432 - protein, 978 aa, synthetic construct
  REGION 1..978: note = engineered CasX variant
QEIKRINKIRRRLVKDSNTKKAGKTGPMKTLLVRVMTPDLRERLENLRKKPPNIPQPISNTSRANLNKLLTDYTEMKKAILHVYWEEFQKDPVGLMSRVAQPASKKIDQNKLKPEMDEKGNLTTAGFACSQCGQPLFVYKLEQVSEKGKAYTNYFGRCNVAEHEKLIKLAQLKPEKDSDEAVTYSLGKFGQRALDFYSIHVTKESTHPVKPLAQIAGNRYASGPVGKALSDACMGTIASFLSKYQDIIIEHQKVVKGNQKRLESLRELAGKENLEYPSVTLPPQPHTKEGVDAYNEVIARVRMWVNLNLWQKLKLSRDDAKPLLRLKGFPSFPLVERQANEVDWWDMVCNVKKLINEKKEDGKVFWQNLAGYKRQEALRPYLSSEEDRKKGKKFARYQLGDLLLHLEKKHGEDWGKVYDEAWERIDKKVEGLSKHIKLEEERRSEDAQSKAALTDWLRAKASFVIEGLKEADKDEFCRCELKLQKWYGDLRGKPFAIEAENSILDISGFSKQYNCAFIWQKDGVKKLNLYLIINYFKGGKLRFKKIKPEAFEANRFYTVINKKSGEIVPMEVNFNFDDPNLIILPLAFGKRQGREFIWNDLLSLETGSLKLANGRVIEKTLYNRRTRQDEPALFVALTFERREVLDSSNIKPMNLIGVDRGENIPAVIALTDPEGCPLSRFKDSLGNPTHILRIGESYKEKQRTIQAKKEVEQRRAGGYSRKYASKAKNLADDMVRNTARDLLYYAVTQDAMLIFENLSRGFGRQGKRTFMAERQYTRMEDWLTAKLAYNGLPSKTYLSKTLAQYTSKTCSNCGFTITSADYDRVLEKLKKTATGWMTTINGKELKVEGQITYYNRYKRQNVVKDLSVELDRLSEESVNNDISSWTKGRSGEALSLLKKRFSHRPVQEKFVCLNCGFETHADEQAALNIARSWLFLRSQEYKKYQTNKTTGNTDKRAFVETWQSFYRKKLKEVWKPAV

SEQ ID NO: 42433 - protein, 977 aa, synthetic construct
  REGION 1..977: note = engineered CasX variant
QEIKRINKIRRRLVKDSNTKKAGKTGPMKTLLVRVMTPDLRERLENLRKKPPNIPQPISNTSRANLNKLLTDYTEMKKAILHVYWEEFQKDPVGLMSRVAQPASKKIDQNKLKPEMDEKGNLTTAGFACSQCGQPLFVYKLEQVSEKGKAYTNYFGRCNVAEHEKLILLAQLKPEKDSDEAVTYSLGKFGQRALDFYSIHVTKESTHPVKPLAQIAGNRYASPVGKALSDACMGTIASFLSKYQDIIIEHQKVVKGNQKRLESLRELAGKENLEYPSVTLPPQPHTKEGVDAYNEVIARVRMWVNLNLWQKLKLSRDDAKPLLRLKGFPSFPLVERQANEVDWWDMVCNVKKLINEKKEDGKVFWQNLAGYKRQEALRPYLSSEEDRKKGKKFARYQLGDLLLHLEKKHGEDWGKVYDEAWERIDKKVEGLSKHIKLEEERRSEDAQSKAALTDWLRAKASFVIEGLKEADKDEFCRCELKLQKWYGDLRGKPFAIEAENSILDISGFSKQYNCAFIWQKDGVKKLNLYLIINYFKGGKLRFKKIKPEAFEANRFYTVINKKSGEIVPMEVNFNFDDPNLIILPLAFGKRQGREFIWNDLLSLETGSLKLANGRVIEKTLYNRRTRQDEPALFVALTFERREVLDSSNIKPMNLIGVDRGENIPAVIALTDPEGCPLSRFKDSLGNPTHILRIGESYKEKQRTIQAKKEVEQRRAGGYSRKYASKAKNLADDMVRNTARDLLYYAVTQDAMLIFENLSRGFGRQGKRTFMAERQYTRMEDWLTAKLAYNGLPSKTYLSKTLAQYTSKTCSNCGFTITSADYDRVLEKLKKTATGWMTTINGKELKVEGQITYYNRYKRQNVVKDLSVELDRLSEESVNNDISSWTKGRSGEALSLLKKRFSHRPVQEKFVCLNCGFETHADEQAALNIARSWLFLRSQEYKKYQTNKTTGNTDKRAFVETWQSFYRKKLKEVWKPAV

SEQ ID NO: 42434 - protein, 978 aa, synthetic construct
  REGION 1..978: note = engineered CasX variant
QEIKRINKIRRRLVKDSNTKKAGKTGPMKTLLVRVMTPDLRERLENLRKKPPNIPQPISNTSRANLNKLLTDYTEMKKAILHVYWEEFQKDPVGLMSRVAQPASKKIDQNKLKPEMDEKGNLTTAGFACSQCGQPLFVYKLEQVSEKGKAYTNYFGRCNVAEHEKLIQLAQLKPEKDSDEAVTYSLGKFGQRALDFYSIHVTKESTHPVKPLAQIAGNRYASYPVGKALSDACMGTIASFLSKYQDIIIEHQKVVKGNQKRLESLRELAGKENLEYPSVTLPPQPHTKEGVDAYNEVIARVRMWVNLNLWQKLKLSRDDAKPLLRLKGFPSFPLVERQANEVDWWDMVCNVKKLINEKKEDGKVFWQNLAGYKRQEALRPYLSSEEDRKKGKKFARYQLGDLLLHLEKKHGEDWGKVYDEAWERIDKKVEGLSKHIKLEEERRSEDAQSKAALTDWLRAKASFVIEGLKEADKDEFCRCELKLQKWYGDLRGKPFAIEAENSILDISGFSKQYNCAFIWQKDGVKKLNLYLIINYFKGGKLRFKKIKPEAFEANRFYTVINKKSGEIVPMEVNFNFDDPNLIILPLAFGKRQGREFIWNDLLSLETGSLKLANGRVIEKTLYNRRTRQDEPALFVALTFERREVLDSSNIKPMNLIGVDRGENIPAVIALTDPEGCPLSRFKDSLGNPTHILRIGESYKEKQRTIQAKKEVEQRRAGGYSRKYASKAKNLADDMVRNTARDLLYYAVTQDAMLIFENLSRGFGRQGKRTFMAERQYTRMEDWLTAKLAYEGLPSKTYLSKTLAQYTSKTCSNCGFTITSADYDRVLEKLKKTATGWMTTINGKELKVEGQITYYNRYKRQNVVKDLSVELDRLSEESVNNDISSWTKGRSGEALSLLKKRFSHRPVQEKFVCLNCGFETHADEQAALNIARSWLFLRSQEYKKYQTNKTTGNTDKRAFVETWQSFYRKKLKEVWKPAV

SEQ ID NO: 42435 - protein, 978 aa, synthetic construct
  REGION 1..978: note = engineered CasX variant
QEIKRINKIRRRLVKDSNTKKAGKTGPMKTLLVRVMTPDLRERLENLRKKPPNIPQPISNTSRANLNKLLTDYTEMKKAILHVYWEEFQKDPVGLMSRVAQPASKKIDQNKLKPEMDEKGNLTTAGFACSQCGQPLFVYKLEQVSEKGKAYTNYFGRCNVAEHEKLIQLAQLKPEKDSDEAVTYSLGKFGQRALDFYSIHVTKESTHPVKPLAQIAGNRYASHPVGKALSDACMGTIASFLSKYQDIIIEHQKVVKGNQKRLESLRELAGKENLEYPSVTLPPQPHTKEGVDAYNEVIARVRMWVNLNLWQKLKLSRDDAKPLLRLKGFPSFPLVERQANEVDWWDMVCNVKKLINEKKEDGKVFWQNLAGYKRQEALRPYLSSEEDRKKGKKFARYQLGDLLLHLEKKHGEDWGKVYDEAWERIDKKVEGLSKHIKLEEERRSEDAQSKAALTDWLRAKASFVIEGLKEADKDEFCRCELKLQKWYGDLRGKPFAIEAENSILDISGFSKQYNCAFIWQKDGVKKLNLYLIINYFKGGKLRFKKIKPEAFEANRFYTVINKKSGEIVPMEVNFNFDDPNLIILPLAFGKRQGREFIWNDLLSLETGSLKLANGRVIEKTLYNRRTRQDEPALFVALTFERREVLDSSNIKPMNLIGVDRGENIPAVIALTDPEGCPLSRFKDSLGNPTHILRIGESYKEKQRTIQAKKEVEQRRAGGYSRKYASKAKNLADDMVRNTARDLLYYAVTQDAMLIFENLSRGFGRQGKRTFMAERQYTRMEDWLTAKLAYEGLPSKTYLSKTLAQYTSKTCSNCGFTITSADYDRVLEKLKKTATGWMTTINGKELKVEGQITYYNRYKRQNVVKDLSVELDRLSEESVNNDISSWTKGRSGEALSLLKKRFSHRPVQEKFVCLNCGFETHADEQAALNIARSWLFLRSQEYKKYQTNKTTGNTDKRAFVETWQSFYRKKLKEVWKPAV

SEQ ID NO: 42436 - protein, 978 aa, synthetic construct
  REGION 1..978: note = engineered CasX variant
QEIKRINKIRRRLVKDSNTKKAGKTGPMKTLLVRVMTPDLRERLENLRKKPPNIPQPISNTSRANLNKLLTDYTEMKKAILHVYWEEFQKDPVGLMSRVAQPASKKIDQNKLKPEMDEKGNLTTAGFACSQCGQPLFVYKLEQVSEKGKAYTNYFGRCNVAEHEKLIQLAQLKPEKDSDEAVTYSLGKFGQRALDFYSIHVTKESTHPVKPLAQIAGNRYASSPVGKALSDACMGTIASFLSKYQDIIIEHQKVVKGNQKRLESLRELAGKENLEYPSVTLPPQPHTKEGVDAYNEVIARVRMWVNLNLWQKLKLSRDDAKPLLRLKGFPSFPLVERQANEVDWWDMVCNVKKLINEKKEDGKVFWQNLAGYKRQEALRPYLSSEEDRKKGKKFARYQLGDLLLHLEKKHGEDWGKVYDEAWERIDKKVEGLSKHIKLEEERRSEDAQSKAALTDWLRAKASFVIEGLKEADKDEFCRCELKLQKWYGDLRGKPFAIEAENSILDISGFSKQYNCAFIWQKDGVKKLNLYLIINYFKGGKLRFKKIKPEAFEANRFYTVINKKSGEIVPMEVNFNFDDPNLIILPLAFGKRQGREFIWNDLLSLETGSLKLANGRVIEKTLYNRRTRQDEPALFVALTFERREVLDSSNIKPMNLIGVDRGENIPAVIALTDPEGCPLSRFKDSLGNPTHILRIGESYKEKQRTIQAKKEVEQRRAGGYSRKYASKAKNLADDMVRNTARDLLYYAVTQDAMLIFENLSRGFGRQGKRTFMAERQYTRMEDWLTAKLAYEGLPSKTYLSKTLAQYTSKTCSNCGFTITSADYDRVLEKLKKTATGWMTTINGKELKVEGQITYYNRYKRQNVVKDLSVELDRLSEESVNNDISSWTKGRSGEALSLLKKRFSHRPVQEKFVCLNCGFETHADEQAALNIARSWLFLRSQEYKKYQTNKTTGNTDKRAFVETWQSFYRKKLKEVWKPAV

SEQ ID NO: 42437 - protein, 978 aa, synthetic construct
  REGION 1..978: note = engineered CasX variant
QEIKRINKIRRRLVKDSNTKKAGKTGPMKTLLVRVMTPDLRERLENLRKKPPNIPQPISNTSRANLNKLLTDYTEMKKAILHVYWEEFQKDPVGLMSRVAQPASKKIDQNKLKPEMDEKGNLTTAGFACSQCGQPLFVYKLEQVSEKGKAYTNYFGRCNVAEHEKLIQLAQLKPEKDSDEAVTYSLGKFGQRALDFYSIHVTKESTHPVKPLAQIAGNRYASTPVGKALSDACMGTIASFLSKYQDIIIEHQKVVKGNQKRLESLRELAGKENLEYPSVTLPPQPHTKEGVDAYNEVIARVRMWVNLNLWQKLKLSRDDAKPLLRLKGFPSFPLVERQANEVDWWDMVCNVKKLINEKKEDGKVFWQNLAGYKRQEALRPYLSSEEDRKKGKKFARYQLGDLLLHLEKKHGEDWGKVYDEAWERIDKKVEGLSKHIKLEEERRSEDAQSKAALTDWLRAKASFVIEGLKEADKDEFCRCELKLQKWYGDLRGKPFAIEAENSILDISGFSKQYNCAFIWQKDGVKKLNLYLIINYFKGGKLRFKKIKPEAFEANRFYTVINKKSGEIVPMEVNFNFDDPNLIILPLAFGKRQGREFIWNDLLSLETGSLKLANGRVIEKTLYNRRTRQDEPALFVALTFERREVLDSSNIKPMNLIGVDRGENIPAVIALTDPEGCPLSRFKDSLGNPTHILRIGESYKEKQRTIQAKKEVEQRRAGGYSRKYASKAKNLADDMVRNTARDLLYYAVTQDAMLIFENLSRGFGRQGKRTFMAERQYTRMEDWLTAKLAYEGLPSKTYLSKTLAQYTSKTCSNCGFTITSADYDRVLEKLKKTATGWMTTINGKELKVEGQITYYNRYKRQNVVKDLSVELDRLSEESVNNDISSWTKGRSGEALSLLKKRFSHRPVQEKFVCLNCGFETHADEQAALNIARSWLFLRSQEYKKYQTNKTTGNTDKRAFVETWQSFYRKKLKEVWKPAV

SEQ ID NO: 42438 - protein, 978 aa, synthetic construct
  REGION 1..978: note = engineered CasX variant
QEIKRINKIRRRLVKDSNTKKAGKTGPMKTLLVRVMTPDLRERLENLRKKPPNIPQPISNTSRANLNKLLTDYTEMKKAILHVYWEEFQKDPVGLMSRVAQPASKKIDQNKLKPEMDEKGNLTTAGFACSQCGQPLFVYKLEQVSEKGKAYTNYFGRCNVAEHEKLIQLAQLKPEKDSDEAVTYSLGKFGQRALDFYSIHVTKESTHPVKPLAQIAGNRYASAPVGKALSDACMGTIASFLSKYQDIIIEHQKVVKGNQKRLESLRELAGKENLEYPSVTLPPQPHTKEGVDAYNEVIARVRMWVNLNLWQKLKLSRDDAKPLLRLKGFPSFPLVERQANEVDWWDMVCNVKKLINEKKEDGKVFWQNLAGYKRQEALRPYLSSEEDRKKGKKFARYQLGDLLLHLEKKHGEDWGKVYDEAWERIDKKVEGLSKHIKLEEERRSEDAQSKAALTDWLRAKASFVIEGLKEADKDEFCRCELKLQKWYGDLRGKPFAIEAENSILDISGFSKQYNCAFIWQKDGVKKLNLYLIINYFKGGKLRFKKIKPEAFEANRFYTVINKKSGEIVPMEVNFNFDDPNLIILPLAFGKRQGREFIWNDLLSLETGSLKLANGRVIEKTLYNRRTRQDEPALFVALTFERREVLDSSNIKPMNLIGVDRGENIPAVIALTDPEGCPLSRFKDSLGNPTHILRIGESYKEKQRTIQAKKEVEQRRAGGYSRKYASKAKNLADDMVRNTARDLLYYAVTQDAMLIFENLSRGFGRQGKRTFMAERQYTRMEDWLTAKLAYEGLPSKTYLSKTLAQYTSKTCSNCGFTITSADYDRVLEKLKKTATGWMTTINGKELKVEGQITYYNRYKRQNVVKDLSVELDRLSEESVNNDISSWTKGRSGEALSLLKKRFSHRPVQEKFVCLNCGFETHADEQAALNIARSWLFLRSQEYKKYQTNKTTGNTDKRAFVETWQSFYRKKLKEVWKPAV

SEQ ID NO: 42439 - protein, 978 aa, synthetic construct
  REGION 1..978: note = engineered CasX variant
QEIKRINKIRRRLVKDSNTKKAGKTGPMKTLLVRVMTPDLRERLENLRKKPPNIPQPISNTSRANLNKLLTDYTEMKKAILHVYWEEFQKDPVGLMSRVAQPASKKIDQNKLKPEMDEKGNLTTAGFACSQCGQPLFVYKLEQVSEKGKAYTNYFGRCNVAEHEKLIQLAQLKPEKDSDEAVTYSLGKFGQRALDFYSIHVTKESTHPVKPLAQIAGNRYASVPVGKALSDACMGTIASFLSKYQDIIIEHQKVVKGNQKRLESLRELAGKENLEYPSVTLPPQPHTKEGVDAYNEVIARVRMWVNLNLWQKLKLSRDDAKPLLRLKGFPSFPLVERQANEVDWWDMVCNVKKLINEKKEDGKVFWQNLAGYKRQEALRPYLSSEEDRKKGKKFARYQLGDLLLHLEKKHGEDWGKVYDEAWERIDKKVEGLSKHIKLEEERRSEDAQSKAALTDWLRAKASFVIEGLKEADKDEFCRCELKLQKWYGDLRGKPFAIEAENSILDISGFSKQYNCAFIWQKDGVKKLNLYLIINYFKGGKLRFKKIKPEAFEANRFYTVINKKSGEIVPMEVNFNFDDPNLIILPLAFGKRQGREFIWNDLLSLETGSLKLANGRVIEKTLYNRRTRQDEPALFVALTFERREVLDSSNIKPMNLIGVDRGENIPAVIALTDPEGCPLSRFKDSLGNPTHILRIGESYKEKQRTIQAKKEVEQRRAGGYSRKYASKAKNLADDMVRNTARDLLYYAVTQDAMLIFENLSRGFGRQGKRTFMAERQYTRMEDWLTAKLAYEGLPSKTYLSKTLAQYTSKTCSNCGFTITSADYDRVLEKLKKTATGWMTTINGKELKVEGQITYYNRYKRQNVVKDLSVELDRLSEESVNNDISSWTKGRSGEALSLLKKRFSHRPVQEKFVCLNCGFETHADEQAALNIARSWLFLRSQEYKKYQTNKTTGNTDKRAFVETWQSFYRKKLKEVWKPAV

SEQ ID NO: 42440 - protein, 979 aa, synthetic construct
  REGION 1..979: note = engineered CasX variant
QEIKRINKIRRRLVKDSNTKKAGKTGPMKTLLVRVMTPDLRERLENLRKKPPNIPQPISNTSRANLNKLLTDYTEMKKAILHVYWEEFQKDPVGLMSRVAQPASKKIDQNKLKPEMDEKGNLTTAGFACSQCGQPLFVYKLEQVSEKGKAYTNYFGRCNVAEHEKLIQKLAQLKPEKDSDEAVTYSLGKFGQRALDFYSIHVTKESTHPVKPLAQIAGNRYASGPVGKALSDACMGTIASFLSKYQDIIIEHQKVVKGNQKRLESLRELAGKENLEYPSVTLPPQPHTKEGVDAYNEVIARVRMWVNLNLWQKLKLSRDDAKPLLRLKGFPSFPLVERQANEVDWWDMVCNVKKLINEKKEDGKVFWQNLAGYKRQEALRPYLSSEEDRKKGKKFARYQLGDLLLHLEKKHGEDWGKVYDEAWERIDKKVEGLSKHIKLEEERRSEDAQSKAALTDWLRAKASFVIEGLKEADKDEFCRCELKLQKWYGDLRGKPFAIEAENSILDISGFSKQYNCAFIWQKDGVKKLNLYLIINYFKGGKLRFKKIKPEAFEANRFYTVINKKSGEIVPMEVNFNFDDPNLIILPLAFGKRQGREFIWNDLLSLETGSLKLANGRVIEKTLYNRRTRQDEPALFVALTFERREVLDSSNIKPMNLIGVDRGENIPAVIALTDPEGCPLSRFKDSLGNPTHILRIGESYKEKQRTIQAKKEVEQRRAGGYSRKYASKAKNLADDMVRNTARDLLYYAVTQDAMLIFENLSRGFGRQGKRTFMAERQYTRMEDWLTAKLAYEGLPSKTYLSKTLAQYTSKTCSNCGFTITSADYDRVLEKLKKTATGWMTTINGKELKVEGQITYYNRYKRQNVVKDLSVELDRLSEESVNNDISSWTKGRSGEALSLLKKRFSHRPVQEKFVCLNCGFETHADEQAALNIARSWLFLRSQEYKKYQTNKTTGNTDKRAFVETWQSFYRKKLKEVWKPAV

SEQ ID NO: 42441 - protein, 977 aa, synthetic construct
  REGION 1..977: note = engineered CasX variant
QEIKRINKIRRRLVKDSNTKKAGKTGPMKTLLVRVMTPDLRERLENLRKKPPNIPQPISNTSRANLNKLLTDYTEMKKAILHVYWEEFQKDPVGLMSRVAQPASKKIDQNKLKPEMDEKGNLTTAGFACSQCGQPLFVYKLEQVSEKGKAYTNYFGRCNVAEHEKLIQLAQLKPEKDSDEAVTYSLGKFGQRALDFYSIHVTKESTHPVKPLAQIAGNRYASPVGKALSDACMGTIASFLSKYQDIIIEHQKVVKGNQKRLESLRELAGKENLEYPSVTLPPQPHTKEGVDAYNEVIARVRMWVNLNLWQKLKLSRDDAKPLLRLKGFPSFPLVERQANEVDWWDMVCNVKKLINEKKEDGKVFWQNLAGYKRQEALRPYLSSEEDRKKGKKFARYQLGDLLLHLEKKHGEDWGKVYDEAWERIDKKVEGLSKHIKLEEERRSEDAQSKAALTDWLRAKASFVIEGLKEADKDEFCRCELKLQKWYGDLRGKPFAIEAENSILDISGFSKQYNCAFIWQKDGVKKLNLYLIINYFKGGKLRFKKIKPEAFEANRFYTVINKKSGEIVPMEVNFNFDDPNLIILPLAFGKRQGREFIWNDLLSLETGSLKLANGRVIEKTLYNRRTRQDEPALFVALTFERREVLDSSNIKPMNLIGVDRGENIPAVIALTDPEGCPLSRFKDSLGNPTHILRIGESYKEKQRTIQAKKEVEQRRAGGYSRKYASKAKNLADDMVRNTARDLLYYAVTQDAMLIFENLSRGFGRQGKRTFMAERQYTRMEDWLTAKLAYEGLPSKTYLSKTLAQYTSKTCSNCGFTITSADYDRVLEKLKKTATGWMTTINGKELKVEGQITYYNRYKRQNVVKDLSVELDRLSEESVNNDISSWTKGRSGEALSLLKKRFSHRPVQEKFVCLNCGFETHADEQAALNIARSWLFLRSQEYKKYQTNKTTGNTDKRAFVETWQSFYRKKLKEVWKPAV

SEQ ID NO: 42442 - protein, 978 aa, synthetic construct
  REGION 1..978: note = engineered CasX variant
QEIKRINKIRRRLVKDSNTKKAGKTGPMKTLLVRVMTPDLRERLENLRKKPPNIPQPISNTSRANLNKLLTDYTEMKKAILHVYWEEFQKDPVGLMSRVAQPASKKIDQNKLKPEMDEKGNLTTAGFACSQCGQPLFVYKLEQVSEKGKAYTNYFGRCNVAEHEKLILLAQLKPEKDSDEAVTYSLGKFGQRALDFYSIHVTKESTHPVKPLAQIAGNRYASYPVGKALSDACMGTIASFLSKYQDIIIEHQKVVKGNQKRLESLRELAGKENLEYPSVTLPPQPHTKEGVDAYNEVIARVRMWVNLNLWQKLKLSRDDAKPLLRLKGFPSFPLVERQANEVDWWDMVCNVKKLINEKKEDGKVFWQNLAIYKRQEALRPYLSSEEDRKKGKKFARYQLGDLLLHLEKKHGEDWGKVYDEAWERIDKKVEGLSKHIKLEEERRSEDAQSKAALTDWLRAKASFVIEGLKEADKDEFCRCELKLQKWYGDLRGKPFAIEAENSILDISGFSKQYNCAFIWQKDGVKKLNLYLIINYFKGGKLRFKKIKPEAFEANRFYTVINKKSGEIVPMEVNFNFDDPNLIILPLAFGKRQGREFIWNDLLSLETGSLKLANGRVIEKTLYNRRTRQDEPALFVALTFERREVLDSSNIKPMNLIGVDRGENIPAVIALTDPEGCPLSRFKDSLGNPTHILRIGESYKEKQRTIQAKKEVEQRRAGGYSRKYASKAKNLADDMVRNTARDLLYYAVTQDAMLIFENLSRGFGRQGKRTFMAERQYTRMEDWLTAKLAYEGLPSKTYLSKTLAQYTSKTCSNCGFTITSADYDRVLEKLKKTATGWMTTINGKELKVEGQITYYNRYKRQNVVKDLSVELDRLSEESVNNDISSWTKGRSGEALSLLKKRFSHRPVQEKFVCLNCGFETHADEQAALNIARSWLFLRSQEYKKYQTNKTTGNTDKRAFVETWQSFYRKKLKEVWKPAV

SEQ ID NO: 42443 - protein, 978 aa, synthetic construct
  REGION 1..978: note = engineered CasX variant
QEIKRINKIRRRLVKDSNTKKAGKTGPMKTLLVRVMTPDLRERLENLRKKPPNIPQPISNTSRANLNKLLTDYTEMKKAILHVYWEEFQKDPVGLMSRVAQPASKKIDQNKLKPEMDEKGNLTTAGFACSQCGQPLFVYKLEQVSEKGKAYTNYFGRCNVAEHEKLILLAQLKPEKDSDEAVTYSLGKFGQRALDFYSIHVTKESTHPVKPLAQIAGNRYASHPVGKALSDACMGTIASFLSKYQDIIIEHQKVVKGNQKRLESLRELAGKENLEYPSVTLPPQPHTKEGVDAYNEVIARVRMWVNLNLWQKLKLSRDDAKPLLRLKGFPSFPLVERQANEVDWWDMVCNVKKLINEKKEDGKVFWQNLAIYKRQEALRPYLSSEEDRKKGKKFARYQLGDLLLHLEKKHGEDWGKVYDEAWERIDKKVEGLSKHIKLEEERRSEDAQSKAALTDWLRAKASFVIEGLKEADKDEFCRCELKLQKWYGDLRGKPFAIEAENSILDISGFSKQYNCAFIWQKDGVKKLNLYLIINYFKGGKLRFKKIKPEAFEANRFYTVINKKSGEIVPMEVNFNFDDPNLIILPLAFGKRQGREFIWNDLLSLETGSLKLANGRVIEKTLYNRRTRQDEPALFVALTFERREVLDSSNIKPMNLIGVDRGENIPAVIALTDPEGCPLSRFKDSLGNPTHILRIGESYKEKQRTIQAKKEVEQRRAGGYSRKYASKAKNLADDMVRNTARDLLYYAVTQDAMLIFENLSRGFGRQGKRTFMAERQYTRMEDWLTAKLAYEGLPSKTYLSKTLAQYTSKTCSNCGFTITSADYDRVLEKLKKTATGWMTTINGKELKVEGQITYYNRYKRQNVVKDLSVELDRLSEESVNNDISSWTKGRSGEALSLLKKRFSHRPVQEKFVCLNCGFETHADEQAALNIARSWLFLRSQEYKKYQTNKTTGNTDKRAFVETWQSFYRKKLKEVWKPAV

SEQ ID NO: 42444 - protein, 978 aa, synthetic construct
  REGION 1..978: note = engineered CasX variant
QEIKRINKIRRRLVKDSNTKKAGKTGPMKTLLVRVMTPDLRERLENLRKKPPNIPQPISNTSRANLNKLLTDYTEMKKAILHVYWEEFQKDPVGLMSRVAQPASKKIDQNKLKPEMDEKGNLTTAGFACSQCGQPLFVYKLEQVSEKGKAYTNYFGRCNVAEHEKLILLAQLKPEKDSDEAVTYSLGKFGQRALDFYSIHVTKESTHPVKPLAQIAGNRYASSPVGKALSDACMGTIASFLSKYQDIIIEHQKVVKGNQKRLESLRELAGKENLEYPSVTLPPQPHTKEGVDAYNEVIARVRMWVNLNLWQKLKLSRDDAKPLLRLKGFPSFPLVERQANEVDWWDMVCNVKKLINEKKEDGKVFWQNLAIYKRQEALRPYLSSEEDRKKGKKFARYQLGDLLLHLEKKHGEDWGKVYDEAWERIDKKVEGLSKHIKLEEERRSEDAQSKAALTDWLRAKASFVIEGLKEADKDEFCRCELKLQKWYGDLRGKPFAIEAENSILDISGFSKQYNCAFIWQKDGVKKLNLYLIINYFKGGKLRFKKIKPEAFEANRFYTVINKKSGEIVPMEVNFNFDDPNLIILPLAFGKRQGREFIWNDLLSLETGSLKLANGRVIEKTLYNRRTRQDEPALFVALTFERREVLDSSNIKPMNLIGVDRGENIPAVIALTDPEGCPLSRFKDSLGNPTHILRIGESYKEKQRTIQAKKEVEQRRAGGYSRKYASKAKNLADDMVRNTARDLLYYAVTQDAMLIFENLSRGFGRQGKRTFMAERQYTRMEDWLTAKLAYEGLPSKTYLSKTLAQYTSKTCSNCGFTITSADYDRVLEKLKKTATGWMTTINGKELKVEGQITYYNRYKRQNVVKDLSVELDRLSEESVNNDISSWTKGRSGEALSLLKKRFSHRPVQEKFVCLNCGFETHADEQAALNIARSWLFLRSQEYKKYQTNKTTGNTDKRAFVETWQSFYRKKLKEVWKPAV

SEQ ID NO: 42445 - protein, 978 aa, synthetic construct
  REGION 1..978: note = engineered CasX variant
QEIKRINKIRRRLVKDSNTKKAGKTGPMKTLLVRVMTPDLRERLENLRKKPPNIPQPISNTSRANLNKLLTDYTEMKKAILHVYWEEFQKDPVGLMSRVAQPASKKIDQNKLKPEMDEKGNLTTAGFACSQCGQPLFVYKLEQVSEKGKAYTNYFGRCNVAEHEKLILLAQLKPEKDSDEAVTYSLGKFGQRALDFYSIHVTKESTHPVKPLAQIAGNRYASTPVGKALSDACMGTIASFLSKYQDIIIEHQKVVKGNQKRLESLRELAGKENLEYPSVTLPPQPHTKEGVDAYNEVIARVRMWVNLNLWQKLKLSRDDAKPLLRLKGFPSFPLVERQANEVDWWDMVCNVKKLINEKKEDGKVFWQNLAIYKRQEALRPYLSSEEDRKKGKKFARYQLGDLLLHLEKKHGEDWGKVYDEAWERIDKKVEGLSKHIKLEEERRSEDAQSKAALTDWLRAKASFVIEGLKEADKDEFCRCELKLQKWYGDLRGKPFAIEAENSILDISGFSKQYNCAFIWQKDGVKKLNLYLIINYFKGGKLRFKKIKPEAFEANRFYTVINKKSGEIVPMEVNFNFDDPNLIILPLAFGKRQGREFIWNDLLSLETGSLKLANGRVIEKTLYNRRTRQDEPALFVALTFERREVLDSSNIKPMNLIGVDRGENIPAVIALTDPEGCPLSRFKDSLGNPTHILRIGESYKEKQRTIQAKKEVEQRRAGGYSRKYASKAKNLADDMVRNTARDLLYYAVTQDAMLIFENLSRGFGRQGKRTFMAERQYTRMEDWLTAKLAYEGLPSKTYLSKTLAQYTSKTCSNCGFTITSADYDRVLEKLKKTATGWMTTINGKELKVEGQITYYNRYKRQNVVKDLSVELDRLSEESVNNDISSWTKGRSGEALSLLKKRFSHRPVQEKFVCLNCGFETHADEQAALNIARSWLFLRSQEYKKYQTNKTTGNTDKRAFVETWQSFYRKKLKEVWKPAV

SEQ ID NO: 42446 - protein, 978 aa, synthetic construct
  REGION 1..978: note = engineered CasX variant
QEIKRINKIRRRLVKDSNTKKAGKTGPMKTLLVRVMTPDLRERLENLRKKPPNIPQPISNTSRANLNKLLTDYTEMKKAILHVYWEEFQKDPVGLMSRVAQPASKKIDQNKLKPEMDEKGNLTTAGFACSQCGQPLFVYKLEQVSEKGKAYTNYFGRCNVAEHEKLILLAQLKPEKDSDEAVTYSLGKFGQRALDFYSIHVTKESTHPVKPLAQIAGNRYASAPVGKALSDACMGTIASFLSKYQDIIIEHQKVVKGNQKRLESLRELAGKENLEYPSVTLPPQPHTKEGVDAYNEVIARVRMWVNLNLWQKLKLSRDDAKPLLRLKGFPSFPLVERQANEVDWWDMVCNVKKLINEKKEDGKVFWQNLAIYKRQEALRPYLSSEEDRKKGKKFARYQLGDLLLHLEKKHGEDWGKVYDEAWERIDKKVEGLSKHIKLEEERRSEDAQSKAALTDWLRAKASFVIEGLKEADKDEFCRCELKLQKWYGDLRGKPFAIEAENSILDISGFSKQYNCAFIWQKDGVKKLNLYLIINYFKGGKLRFKKIKPEAFEANRFYTVINKKSGEIVPMEVNFNFDDPNLIILPLAFGKRQGREFIWNDLLSLETGSLKLANGRVIEKTLYNRRTRQDEPALFVALTFERREVLDSSNIKPMNLIGVDRGENIPAVIALTDPEGCPLSRFKDSLGNPTHILRIGESYKEKQRTIQAKKEVEQRRAGGYSRKYASKAKNLADDMVRNTARDLLYYAVTQDAMLIFENLSRGFGRQGKRTFMAERQYTRMEDWLTAKLAYEGLPSKTYLSKTLAQYTSKTCSNCGFTITSADYDRVLEKLKKTATGWMTTINGKELKVEGQITYYNRYKRQNVVKDLSVELDRLSEESVNNDISSWTKGRSGEALSLLKKRFSHRPVQEKFVCLNCGFETHADEQAALNIARSWLFLRSQEYKKYQTNKTTGNTDKRAFVETWQSFYRKKLKEVWKPAV

SEQ ID NO: 42447 - protein, 978 aa, synthetic construct
  REGION 1..978: note = engineered CasX variant
QEIKRINKIRRRLVKDSNTKKAGKTGPMKTLLVRVMTPDLRERLENLRKKPPNIPQPISNTSRANLNKLLTDYTEMKKAILHVYWEEFQKDPVGLMSRVAQPASKKIDQNKLKPEMDEKGNLTTAGFACSQCGQPLFVYKLEQVSEKGKAYTNYFGRCNVAEHEKLILLAQLKPEKDSDEAVTYSLGKFGQRALDFYSIHVTKESTHPVKPLAQIAGNRYASVPVGKALSDACMGTIASFLSKYQDIIIEHQKVVKGNQKRLESLRELAGKENLEYPSVTLPPQPHTKEGVDAYNEVIARVRMWVNLNLWQKLKLSRDDAKPLLRLKGFPSFPLVERQANEVDWWDMVCNVKKLINEKKEDGKVFWQNLAIYKRQEALRPYLSSEEDRKKGKKFARYQLGDLLLHLEKKHGEDWGKVYDEAWERIDKKVEGLSKHIKLEEERRSEDAQSKAALTDWLRAKASFVIEGLKEADKDEFCRCELKLQKWYGDLRGKPFAIEAENSILDISGFSKQYNCAFIWQKDGVKKLNLYLIINYFKGGKLRFKKIKPEAFEANRFYTVINKKSGEIVPMEVNFNFDDPNLIILPLAFGKRQGREFIWNDLLSLETGSLKLANGRVIEKTLYNRRTRQDEPALFVALTFERREVLDSSNIKPMNLIGVDRGENIPAVIALTDPEGCPLSRFKDSLGNPTHILRIGESYKEKQRTIQAKKEVEQRRAGGYSRKYASKAKNLADDMVRNTARDLLYYAVTQDAMLIFENLSRGFGRQGKRTFMAERQYTRMEDWLTAKLAYEGLPSKTYLSKTLAQYTSKTCSNCGFTITSADYDRVLEKLKKTATGWMTTINGKELKVEGQITYYNRYKRQNVVKDLSVELDRLSEESVNNDISSWTKGRSGEALSLLKKRFSHRPVQEKFVCLNCGFETHADEQAALNIARSWLFLRSQEYKKYQTNKTTGNTDKRAFVETWQSFYRKKLKEVWKPAV

SEQ ID NO: 42448 - protein, 978 aa, synthetic construct
  REGION 1..978: note = engineered CasX variant
QEIKRINKIRRRLVKDSNTKKAGKTGPMKTLLVRVMTPDLRERLENLRKKPPNIPQPISNTSRANLNKLLTDYTEMKKAILHVYWEEFQKDPVGLMSRVAQPASKKIDQNKLKPEMDEKGNLTTAGFACSQCGQPLFVYKLEQVSEKGKAYTNYFGRCNVAEHEKLIKLAQLKPEKDSDEAVTYSLGKFGQRALDFYSIHVTKESTHPVKPLAQIAGNRYASGPVGKALSDACMGTIASFLSKYQDIIIEHQKVVKGNQKRLESLRELAGKENLEYPSVTLPPQPHTKEGVDAYNEVIARVRMWVNLNLWQKLKLSRDDAKPLLRLKGFPSFPLVERQANEVDWWDMVCNVKKLINEKKEDGKVFWQNLAIYKRQEALRPYLSSEEDRKKGKKFARYQLGDLLLHLEKKHGEDWGKVYDEAWERIDKKVEGLSKHIKLEEERRSEDAQSKAALTDWLRAKASFVIEGLKEADKDEFCRCELKLQKWYGDLRGKPFAIEAENSILDISGFSKQYNCAFIWQKDGVKKLNLYLIINYFKGGKLRFKKIKPEAFEANRFYTVINKKSGEIVPMEVNFNFDDPNLIILPLAFGKRQGREFIWNDLLSLETGSLKLANGRVIEKTLYNRRTRQDEPALFVALTFERREVLDSSNIKPMNLIGVDRGENIPAVIALTDPEGCPLSRFKDSLGNPTHILRIGESYKEKQRTIQAKKEVEQRRAGGYSRKYASKAKNLADDMVRNTARDLLYYAVTQDAMLIFENLSRGFGRQGKRTFMAERQYTRMEDWLTAKLAYEGLPSKTYLSKTLAQYTSKTCSNCGFTITSADYDRVLEKLKKTATGWMTTINGKELKVEGQITYYNRYKRQNVVKDLSVELDRLSEESVNNDISSWTKGRSGEALSLLKKRFSHRPVQEKFVCLNCGFETHADEQAALNIARSWLFLRSQEYKKYQTNKTTGNTDKRAFVETWQSFYRKKLKEVWKPAV

SEQ ID NO: 42449 - protein, 977 aa, synthetic construct
  REGION 1..977: note = engineered CasX variant
QEIKRINKIRRRLVKDSNTKKAGKTGPMKTLLVRVMTPDLRERLENLRKKPPNIPQPISNTSRANLNKLLTDYTEMKKAILHVYWEEFQKDPVGLMSRVAQPASKKIDQNKLKPEMDEKGNLTTAGFACSQCGQPLFVYKLEQVSEKGKAYTNYFGRCNVAEHEKLILLAQLKPEKDSDEAVTYSLGKFGQRALDFYSIHVTKESTHPVKPLAQIAGNRYASPVGKALSDACMGTIASFLSKYQDIIIEHQKVVKGNQKRLESLRELAGKENLEYPSVTLPPQPHTKEGVDAYNEVIARVRMWVNLNLWQKLKLSRDDAKPLLRLKGFPSFPLVERQANEVDWWDMVCNVKKLINEKKEDGKVFWQNLAIYKRQEALRPYLSSEEDRKKGKKFARYQLGDLLLHLEKKHGEDWGKVYDEAWERIDKKVEGLSKHIKLEEERRSEDAQSKAALTDWLRAKASFVIEGLKEADKDEFCRCELKLQKWYGDLRGKPFAIEAENSILDISGFSKQYNCAFIWQKDGVKKLNLYLIINYFKGGKLRFKKIKPEAFEANRFYTVINKKSGEIVPMEVNFNFDDPNLIILPLAFGKRQGREFIWNDLLSLETGSLKLANGRVIEKTLYNRRTRQDEPALFVALTFERREVLDSSNIKPMNLIGVDRGENIPAVIALTDPEGCPLSRFKDSLGNPTHILRIGESYKEKQRTIQAKKEVEQRRAGGYSRKYASKAKNLADDMVRNTARDLLYYAVTQDAMLIFENLSRGFGRQGKRTFMAERQYTRMEDWLTAKLAYEGLPSKTYLSKTLAQYTSKTCSNCGFTITSADYDRVLEKLKKTATGWMTTINGKELKVEGQITYYNRYKRQNVVKDLSVELDRLSEESVNNDISSWTKGRSGEALSLLKKRFSHRPVQEKFVCLNCGFETHADEQAALNIARSWLFLRSQEYKKYQTNKTTGNTDKRAFVETWQSFYRKKLKEVWKPAV

SEQ ID NO: 42450 - protein, 978 aa, synthetic construct
  REGION 1..978: note = engineered CasX variant
QEIKRINKIRRRLVKDSNTKKAGKTGPMKTLLVRVMTPDLRERLENLRKKPPNIPQPISNTSRANLNKLLTDYTEMKKAILHVYWEEFQKDPVGLMSRVAQPASKKIDQNKLKPEMDEKGNLTTAGFACSQCGQPLFVYKLEQVSEKGKAYTNYFGRCNVAEHEKLILLAQLKPEKDSDEAVTYSLGKFGQRALDFYSIHVTKESTHPVKPLAQIAGNRYASYPVGKALSDACMGTIASFLSKYQDIIIEHQKVVKGNQKRLESLRELAGKENLEYPSVTLPPQPHTKEGVDAYNEVIARVRMWVNLNLWQKLKLSRDDAKPLLRLKGFPSFPLVERQANEVDWWDMVCNVKKLINEKKEDGKVFWQNLAGYKRQEALRPYLSSEEDREKGKKFARYQLGDLLLHLEKKHGEDWGKVYDEAWERIDKKVEGLSKHIKLEEERRSEDAQSKAALTDWLRAKASFVIEGLKEADKDEFCRCELKLQKWYGDLRGKPFAIEAENSILDISGFSKQYNCAFIWQKDGVKKLNLYLIINYFKGGKLRFKKIKPEAFEANRFYTVINKKSGEIVPMEVNFNFDDPNLIILPLAFGKRQGREFIWNDLLSLETGSLKLANGRVIEKTLYNRRTRQDEPALFVALTFERREVLDSSNIKPMNLIGVDRGENIPAVIALTDPEGCPLSRFKDSLGNPTHILRIGESYKEKQRTIQAKKEVEQRRAGGYSRKYASKAKNLADDMVRNTARDLLYYAVTQDAMLIFENLSRGFGRQGKRTFMAERQYTRMEDWLTAKLAYEGLPSKTYLSKTLAQYTSKTCSNCGFTITSADYDRVLEKLKKTATGWMTTINGKELKVEGQITYYNRYKRQNVVKDLSVELDRLSEESVNNDISSWTKGRSGEALSLLKKRFSHRPVQEKFVCLNCGFETHADEQAALNIARSWLFLRSQEYKKYQTNKTTGNTDKRAFVETWQSFYRKKLKEVWKPAV

SEQ ID NO: 42451 - protein, 978 aa, synthetic construct
  REGION 1..978: note = engineered CasX variant
QEIKRINKIRRRLVKDSNTKKAGKTGPMKTLLVRVMTPDLRERLENLRKKPPNIPQPISNTSRANLNKLLTDYTEMKKAILHVYWEEFQKDPVGLMSRVAQPASKKIDQNKLKPEMDEKGNLTTAGFACSQCGQPLFVYKLEQVSEKGKAYTNYFGRCNVAEHEKLILLAQLKPEKDSDEAVTYSLGKFGQRALDFYSIHVTKESTHPVKPLAQIAGNRYASHPVGKALSDACMGTIASFLSKYQDIIIEHQKVVKGNQKRLESLRELAGKENLEYPSVTLPPQPHTKEGVDAYNEVIARVRMWVNLNLWQKLKLSRDDAKPLLRLKGFPSFPLVERQANEVDWWDMVCNVKKLINEKKEDGKVFWQNLAGYKRQEALRPYLSSEEDREKGKKFARYQLGDLLLHLEKKHGEDWGKVYDEAWERIDKKVEGLSKHIKLEEERRSEDAQSKAALTDWLRAKASFVIEGLKEADKDEFCRCELKLQKWYGDLRGKPFAIEAENSILDISGFSKQYNCAFIWQKDGVKKLNLYLIINYFKGGKLRFKKIKPEAFEANRFYTVINKKSGEIVPMEVNFNFDDPNLIILPLAFGKRQGREFIWNDLLSLETGSLKLANGRVIEKTLYNRRTRQDEPALFVALTFERREVLDSSNIKPMNLIGVDRGENIPAVIALTDPEGCPLSRFKDSLGNPTHILRIGESYKEKQRTIQAKKEVEQRRAGGYSRKYASKAKNLADDMVRNTARDLLYYAVTQDAMLIFENLSRGFGRQGKRTFMAERQYTRMEDWLTAKLAYEGLPSKTYLSKTLAQYTSKTCSNCGFTITSADYDRVLEKLKKTATGWMTTINGKELKVEGQITYYNRYKRQNVVKDLSVELDRLSEESVNNDISSWTKGRSGEALSLLKKRFSHRPVQEKFVCLNCGFETHADEQAALNIARSWLFLRSQEYKKYQTNKTTGNTDKRAFVETWQSFYRKKLKEVWKPAV

SEQ ID NO: 42452 - protein, 978 aa, synthetic construct
  REGION 1..978: note = engineered CasX variant
QEIKRINKIRRRLVKDSNTKKAGKTGPMKTLLVRVMTPDLRERLENLRKKPPNIPQPISNTSRANLNKLLTDYTEMKKAILHVYWEEFQKDPVGLMSRVAQPASKKIDQNKLKPEMDEKGNLTTAGFACSQCGQPLFVYKLEQVSEKGKAYTNYFGRCNVAEHEKLILLAQLKPEKDSDEAVTYSLGKFGQRALDFYSIHVTKESTHPVKPLAQIAGNRYASSPVGKALSDACMGTIASFLSKYQDIIIEHQKVVKGNQKRLESLRELAGKENLEYPSVTLPPQPHTKEGVDAYNEVIARVRMWVNLNLWQKLKLSRDDAKPLLRLKGFPSFPLVERQANEVDWWDMVCNVKKLINEKKEDGKVFWQNLAGYKRQEALRPYLSSEEDREKGKKFARYQLGDLLLHLEKKHGEDWGKVYDEAWERIDKKVEGLSKHIKLEEERRSEDAQSKAALTDWLRAKASFVIEGLKEADKDEFCRCELKLQKWYGDLRGKPFAIEAENSILDISGFSKQYNCAFIWQKDGVKKLNLYLIINYFKGGKLRFKKIKPEAFEANRFYTVINKKSGEIVPMEVNFNFDDPNLIILPLAFGKRQGREFIWNDLLSLETGSLKLANGRVIEKTLYNRRTRQDEPALFVALTFERREVLDSSNIKPMNLIGVDRGENIPAVIALTDPEGCPLSRFKDSLGNPTHILRIGESYKEKQRTIQAKKEVEQRRAGGYSRKYASKAKNLADDMVRNTARDLLYYAVTQDAMLIFENLSRGFGRQGKRTFMAERQYTRMEDWLTAKLAYEGLPSKTYLSKTLAQYTSKTCSNCGFTITSADYDRVLEKLKKTATGWMTTINGKELKVEGQITYYNRYKRQNVVKDLSVELDRLSEESVNNDISSWTKGRSGEALSLLKKRFSHRPVQEKFVCLNCGFETHADEQAALNIARSWLFLRSQEYKKYQTNKTTGNTDKRAFVETWQSFYRKKLKEVWKPAV

SEQ ID NO: 42453 - protein, 978 aa, synthetic construct
  REGION 1..978: note = engineered CasX variant
QEIKRINKIRRRLVKDSNTKKAGKTGPMKTLLVRVMTPDLRERLENLRKKPPNIPQPISNTSRANLNKLLTDYTEMKKAILHVYWEEFQKDPVGLMSRVAQPASKKIDQNKLKPEMDEKGNLTTAGFACSQCGQPLFVYKLEQVSEKGKAYTNYFGRCNVAEHEKLILLAQLKPEKDSDEAVTYSLGKFGQRALDFYSIHVTKESTHPVKPLAQIAGNRYASTPVGKALSDACMGTIASFLSKYQDIIIEHQKVVKGNQKRLESLRELAGKENLEYPSVTLPPQPHTKEGVDAYNEVIARVRMWVNLNLWQKLKLSRDDAKPLLRLKGFPSFPLVERQANEVDWWDMVCNVKKLINEKKEDGKVFWQNLAGYKRQEALRPYLSSEEDREKGKKFARYQLGDLLLHLEKKHGEDWGKVYDEAWERIDKKVEGLSKHIKLEEERRSEDAQSKAALTDWLRAKASFVIEGLKEADKDEFCRCELKLQKWYGDLRGKPFAIEAENSILDISGFSKQYNCAFIWQKDGVKKLNLYLIINYFKGGKLRFKKIKPEAFEANRFYTVINKKSGEIVPMEVNFNFDDPNLIILPLAFGKRQGREFIWNDLLSLETGSLKLANGRVIEKTLYNRRTRQDEPALFVALTFERREVLDSSNIKPMNLIGVDRGENIPAVIALTDPEGCPLSRFKDSLGNPTHILRIGESYKEKQRTIQAKKEVEQRRAGGYSRKYASKAKNLADDMVRNTARDLLYYAVTQDAMLIFENLSRGFGRQGKRTFMAERQYTRMEDWLTAKLAYEGLPSKTYLSKTLAQYTSKTCSNCGFTITSADYDRVLEKLKKTATGWMTTINGKELKVEGQITYYNRYKRQNVVKDLSVELDRLSEESVNNDISSWTKGRSGEALSLLKKRFSHRPVQEKFVCLNCGFETHADEQAALNIARSWLFLRSQEYKKYQTNKTTGNTDKRAFVETWQSFYRKKLKEVWKPAV

SEQ ID NO: 42454 - protein, 978 aa, synthetic construct
  REGION 1..978: note = engineered CasX variant
QEIKRINKIRRRLVKDSNTKKAGKTGPMKTLLVRVMTPDLRERLENLRKKPPNIPQPISNTSRANLNKLLTDYTEMKKAILHVYWEEFQKDPVGLMSRVAQPASKKIDQNKLKPEMDEKGNLTTAGFACSQCGQPLFVYKLEQVSEKGKAYTNYFGRCNVAEHEKLILLAQLKPEKDSDEAVTYSLGKFGQRALDFYSIHVTKESTHPVKPLAQIAGNRYASAPVGKALSDACMGTIASFLSKYQDIIIEHQKVVKGNQKRLESLRELAGKENLEYPSVTLPPQPHTKEGVDAYNEVIARVRMWVNLNLWQKLKLSRDDAKPLLRLKGFPSFPLVERQANEVDWWDMVCNVKKLINEKKEDGKVFWQNLAGYKRQEALRPYLSSEEDREKGKKFARYQLGDLLLHLEKKHGEDWGKVYDEAWERIDKKVEGLSKHIKLEEERRSEDAQSKAALTDWLRAKASFVIEGLKEADKDEFCRCELKLQKWYGDLRGKPFAIEAENSILDISGFSKQYNCAFIWQKDGVKKLNLYLIINYFKGGKLRFKKIKPEAFEANRFYTVINKKSGEIVPMEVNFNFDDPNLIILPLAFGKRQGREFIWNDLLSLETGSLKLANGRVIEKTLYNRRTRQDEPALFVALTFERREVLDSSNIKPMNLIGVDRGENIPAVIALTDPEGCPLSRFKDSLGNPTHILRIGESYKEKQRTIQAKKEVEQRRAGGYSRKYASKAKNLADDMVRNTARDLLYYAVTQDAMLIFENLSRGFGRQGKRTFMAERQYTRMEDWLTAKLAYEGLPSKTYLSKTLAQYTSKTCSNCGFTITSADYDRVLEKLKKTATGWMTTINGKELKVEGQITYYNRYKRQNVVKDLSVELDRLSEESVNNDISSWTKGRSGEALSLLKKRFSHRPVQEKFVCLNCGFETHADEQAALNIARSWLFLRSQEYKKYQTNKTTGNTDKRAFVETWQSFYRKKLKEVWKPAV

SEQ ID NO: 42455 - protein, 978 aa, synthetic construct
  REGION 1..978: note = engineered CasX variant
QEIKRINKIRRRLVKDSNTKKAGKTGPMKTLLVRVMTPDLRERLENLRKKPPNIPQPISNTSRANLNKLLTDYTEMKKAILHVYWEEFQKDPVGLMSRVAQPASKKIDQNKLKPEMDEKGNLTTAGFACSQCGQPLFVYKLEQVSEKGKAYTNYFGRCNVAEHEKLILLAQLKPEKDSDEAVTYSLGKFGQRALDFYSIHVTKESTHPVKPLAQIAGNRYASVPVGKALSDACMGTIASFLSKYQDIIIEHQKVVKGNQKRLESLRELAGKENLEYPSVTLPPQPHTKEGVDAYNEVIARVRMWVNLNLWQKLKLSRDDAKPLLRLKGFPSFPLVERQANEVDWWDMVCNVKKLINEKKEDGKVFWQNLAGYKRQEALRPYLSSEEDREKGKKFARYQLGDLLLHLEKKHGEDWGKVYDEAWERIDKKVEGLSKHIKLEEERRSEDAQSKAALTDWLRAKASFVIEGLKEADKDEFCRCELKLQKWYGDLRGKPFAIEAENSILDISGFSKQYNCAFIWQKDGVKKLNLYLIINYFKGGKLRFKKIKPEAFEANRFYTVINKKSGEIVPMEVNFNFDDPNLIILPLAFGKRQGREFIWNDLLSLETGSLKLANGRVIEKTLYNRRTRQDEPALFVALTFERREVLDSSNIKPMNLIGVDRGENIPAVIALTDPEGCPLSRFKDSLGNPTHILRIGESYKEKQRTIQAKKEVEQRRAGGYSRKYASKAKNLADDMVRNTARDLLYYAVTQDAMLIFENLSRGFGRQGKRTFMAERQYTRMEDWLTAKLAYEGLPSKTYLSKTLAQYTSKTCSNCGFTITSADYDRVLEKLKKTATGWMTTINGKELKVEGQITYYNRYKRQNVVKDLSVELDRLSEESVNNDISSWTKGRSGEALSLLKKRFSHRPVQEKFVCLNCGFETHADEQAALNIARSWLFLRSQEYKKYQTNKTTGNTDKRAFVETWQSFYRKKLKEVWKPAV

SEQ ID NO: 42456 - protein, 978 aa, synthetic construct
  REGION 1..978: note = engineered CasX variant
QEIKRINKIRRRLVKDSNTKKAGKTGPMKTLLVRVMTPDLRERLENLRKKPPNIPQPISNTSRANLNKLLTDYTEMKKAILHVYWEEFQKDPVGLMSRVAQPASKKIDQNKLKPEMDEKGNLTTAGFACSQCGQPLFVYKLEQVSEKGKAYTNYFGRCNVAEHEKLIKLAQLKPEKDSDEAVTYSLGKFGQRALDFYSIHVTKESTHPVKPLAQIAGNRYASGPVGKALSDACMGTIASFLSKYQDIIIEHQKVVKGNQKRLESLRELAGKENLEYPSVTLPPQPHTKEGVDAYNEVIARVRMWVNLNLWQKLKLSRDDAKPLLRLKGFPSFPLVERQANEVDWWDMVCNVKKLINEKKEDGKVFWQNLAGYKRQEALRPYLSSEEDREKGKKFARYQLGDLLLHLEKKHGEDWGKVYDEAWERIDKKVEGLSKHIKLEEERRSEDAQSKAALTDWLRAKASFVIEGLKEADKDEFCRCELKLQKWYGDLRGKPFAIEAENSILDISGFSKQYNCAFIWQKDGVKKLNLYLIINYFKGGKLRFKKIKPEAFEANRFYTVINKKSGEIVPMEVNFNFDDPNLIILPLAFGKRQGREFIWNDLLSLETGSLKLANGRVIEKTLYNRRTRQDEPALFVALTFERREVLDSSNIKPMNLIGVDRGENIPAVIALTDPEGCPLSRFKDSLGNPTHILRIGESYKEKQRTIQAKKEVEQRRAGGYSRKYASKAKNLADDMVRNTARDLLYYAVTQDAMLIFENLSRGFGRQGKRTFMAERQYTRMEDWLTAKLAYEGLPSKTYLSKTLAQYTSKTCSNCGFTITSADYDRVLEKLKKTATGWMTTINGKELKVEGQITYYNRYKRQNVVKDLSVELDRLSEESVNNDISSWTKGRSGEALSLLKKRFSHRPVQEKFVCLNCGFETHADEQAALNIARSWLFLRSQEYKKYQTNKTTGNTDKRAFVETWQSFYRKKLKEVWKPAV

SEQ ID NO: 42457 - protein, 977 aa, synthetic construct
  REGION 1..977: note = engineered CasX variant
QEIKRINKIRRRLVKDSNTKKAGKTGPMKTLLVRVMTPDLRERLENLRKKPPNIPQPISNTSRANLNKLLTDYTEMKKAILHVYWEEFQKDPVGLMSRVAQPASKKIDQNKLKPEMDEKGNLTTAGFACSQCGQPLFVYKLEQVSEKGKAYTNYFGRCNVAEHEKLILLAQLKPEKDSDEAVTYSLGKFGQRALDFYSIHVTKESTHPVKPLAQIAGNRYASPVGKALSDACMGTIASFLSKYQDIIIEHQKVVKGNQKRLESLRELAGKENLEYPSVTLPPQPHTKEGVDAYNEVIARVRMWVNLNLWQKLKLSRDDAKPLLRLKGFPSFPLVERQANEVDWWDMVCNVKKLINEKKEDGKVFWQNLAGYKRQEALRPYLSSEEDREKGKKFARYQLGDLLLHLEKKHGEDWGKVYDEAWERIDKKVEGLSKHIKLEEERRSEDAQSKAALTDWLRAKASFVIEGLKEADKDEFCRCELKLQKWYGDLRGKPFAIEAENSILDISGFSKQYNCAFIWQKDGVKKLNLYLIINYFKGGKLRFKKIKPEAFEANRFYTVINKKSGEIVPMEVNFNFDDPNLIILPLAFGKRQGREFIWNDLLSLETGSLKLANGRVIEKTLYNRRTRQDEPALFVALTFERREVLDSSNIKPMNLIGVDRGENIPAVIALTDPEGCPLSRFKDSLGNPTHILRIGESYKEKQRTIQAKKEVEQRRAGGYSRKYASKAKNLADDMVRNTARDLLYYAVTQDAMLIFENLSRGFGRQGKRTFMAERQYTRMEDWLTAKLAYEGLPSKTYLSKTLAQYTSKTCSNCGFTITSADYDRVLEKLKKTATGWMTTINGKELKVEGQITYYNRYKRQNVVKDLSVELDRLSEESVNNDISSWTKGRSGEALSLLKKRFSHRPVQEKFVCLNCGFETHADEQAALNIARSWLFLRSQEYKKYQTNKTTGNTDKRAFVETWQSFYRKKLKEVWKPAV

SEQ ID NO: 42458 - protein, 978 aa, synthetic construct
  REGION 1..978: note = engineered CasX variant
QEIKRINKIRRRLVKDSNTKKAGKTGPMKTLLVRVMTPDLRERLENLRKKPPNIPQPISNTSRANLNKLLTDYTEMKKAILHVYWEEFQKDPVGLMSRVAQPASKKIDQNKLKPEMDEKGNLTTAGFACSQCGQPLFVYKLEQVSEKGKAYTNYFGRCNVAEHEKLILLAQLKPEKDSDEAVTYSLGKFGQRALDFYSIHVTKESTHPVKPLAQIAGNRYASYPVGKALSDACMGTIASFLSKYQDIIIEHQKVVKGNQKRLESLRELAGKENLEYPSVTLPPQPHTKEGVDAYNEVIARVRMWVNLNLWQKLKLSRDDAKPLLRLKGFPSFPLVERQANEVDWWDMVCNVKKLINEKKEDGKVFWQNLAGYKRQEALRPYLSSEEDRKKGKKFARYQLGDLLLHLEKKHGEDWGKVYDEAWERIDKKVEGLSKHIKLEEERRSEDAQSKAALTDWLRAKASFVIEGLKEADKDEFCRCELKLQKWYGDLRGKPFAIEAENSILDISGFSKQYNCAFIWQKDGVKKLNLYLIINYFKGGKLRFKKIKPEAFEANRFYTVINKKSGEIVIMEVNFNFDDPNLIILPLAFGKRQGREFIWNDLLSLETGSLKLANGRVIEKTLYNRRTRQDEPALFVALTFERREVLDSSNIKPMNLIGVDRGENIPAVIALTDPEGCPLSRFKDSLGNPTHILRIGESYKEKQRTIQAKKEVEQRRAGGYSRKYASKAKNLADDMVRNTARDLLYYAVTQDAMLIFENLSRGFGRQGKRTFMAERQYTRMEDWLTAKLAYEGLPSKTYLSKTLAQYTSKTCSNCGFTITSADYDRVLEKLKKTATGWMTTINGKELKVEGQITYYNRYKRQNVVKDLSVELDRLSEESVNNDISSWTKGRSGEALSLLKKRFSHRPVQEKFVCLNCGFETHADEQAALNIARSWLFLRSQEYKKYQTNKTTGNTDKRAFVETWQSFYRKKLKEVWKPAV

SEQ ID NO: 42459 - protein, 978 aa, synthetic construct
  REGION 1..978: note = engineered CasX variant
QEIKRINKIRRRLVKDSNTKKAGKTGPMKTLLVRVMTPDLRERLENLRKKPPNIPQPISNTSRANLNKLLTDYTEMKKAILHVYWEEFQKDPVGLMSRVAQPASKKIDQNKLKPEMDEKGNLTTAGFACSQCGQPLFVYKLEQVSEKGKAYTNYFGRCNVAEHEKLILLAQLKPEKDSDEAVTYSLGKFGQRALDFYSIHVTKESTHPVKPLAQIAGNRYASHPVGKALSDACMGTIASFLSKYQDIIIEHQKVVKGNQKRLESLRELAGKENLEYPSVTLPPQPHTKEGVDAYNEVIARVRMWVNLNLWQKLKLSRDDAKPLLRLKGFPSFPLVERQANEVDWWDMVCNVKKLINEKKEDGKVFWQNLAGYKRQEALRPYLSSEEDRKKGKKFARYQLGDLLLHLEKKHGEDWGKVYDEAWERIDKKVEGLSKHIKLEEERRSEDAQSKAALTDWLRAKASFVIEGLKEADKDEFCRCELKLQKWYGDLRGKPFAIEAENSILDISGFSKQYNCAFIWQKDGVKKLNLYLIINYFKGGKLRFKKIKPEAFEANRFYTVINKKSGEIVIMEVNFNFDDPNLIILPLAFGKRQGREFIWNDLLSLETGSLKLANGRVIEKTLYNRRTRQDEPALFVALTFERREVLDSSNIKPMNLIGVDRGENIPAVIALTDPEGCPLSRFKDSLGNPTHILRIGESYKEKQRTIQAKKEVEQRRAGGYSRKYASKAKNLADDMVRNTARDLLYYAVTQDAMLIFENLSRGFGRQGKRTFMAERQYTRMEDWLTAKLAYEGLPSKTYLSKTLAQYTSKTCSNCGFTITSADYDRVLEKLKKTATGWMTTINGKELKVEGQITYYNRYKRQNVVKDLSVELDRLSEESVNNDISSWTKGRSGEALSLLKKRFSHRPVQEKFVCLNCGFETHADEQAALNIARSWLFLRSQEYKKYQTNKTTGNTDKRAFVETWQSFYRKKLKEVWKPAV

SEQ ID NO: 42460 - protein, 978 aa, synthetic construct
  REGION 1..978: note = engineered CasX variant
QEIKRINKIRRRLVKDSNTKKAGKTGPMKTLLVRVMTPDLRERLENLRKKPPNIPQPISNTSRANLNKLLTDYTEMKKAILHVYWEEFQKDPVGLMSRVAQPASKKIDQNKLKPEMDEKGNLTTAGFACSQCGQPLFVYKLEQVSEKGKAYTNYFGRCNVAEHEKLILLAQLKPEKDSDEAVTYSLGKFGQRALDFYSIHVTKESTHPVKPLAQIAGNRYASSPVGKALSDACMGTIASFLSKYQDIIIEHQKVVKGNQKRLESLRELAGKENLEYPSVTLPPQPHTKEGVDAYNEVIARVRMWVNLNLWQKLKLSRDDAKPLLRLKGFPSFPLVERQANEVDWWDMVCNVKKLINEKKEDGKVFWQNLAGYKRQEALRPYLSSEEDRKKGKKFARYQLGDLLLHLEKKHGEDWGKVYDEAWERIDKKVEGLSKHIKLEEERRSEDAQSKAALTDWLRAKASFVIEGLKEADKDEFCRCELKLQKWYGDLRGKPFAIEAENSILDISGFSKQYNCAFIWQKDGVKKLNLYLIINYFKGGKLRFKKIKPEAFEANRFYTVINKKSGEIVIMEVNFNFDDPNLIILPLAFGKRQGREFIWNDLLSLETGSLKLANGRVIEKTLYNRRTRQDEPALFVALTFERREVLDSSNIKPMNLIGVDRGENIPAVIALTDPEGCPLSRFKDSLGNPTHILRIGESYKEKQRTIQAKKEVEQRRAGGYSRKYASKAKNLADDMVRNTARDLLYYAVTQDAMLIFENLSRGFGRQGKRTFMAERQYTRMEDWLTAKLAYEGLPSKTYLSKTLAQYTSKTCSNCGFTITSADYDRVLEKLKKTATGWMTTINGKELKVEGQITYYNRYKRQNVVKDLSVELDRLSEESVNNDISSWTKGRSGEALSLLKKRFSHRPVQEKFVCLNCGFETHADEQAALNIARSWLFLRSQEYKKYQTNKTTGNTDKRAFVETWQSFYRKKLKEVWKPAV

SEQ ID NO: 42461 - protein, 978 aa, synthetic construct
  REGION 1..978: note = engineered CasX variant
QEIKRINKIRRRLVKDSNTKKAGKTGPMKTLLVRVMTPDLRERLENLRKKPPNIPQPISNTSRANLNKLLTDYTEMKKAILHVYWEEFQKDPVGLMSRVAQPASKKIDQNKLKPEMDEKGNLTTAGFACSQCGQPLFVYKLEQVSEKGKAYTNYFGRCNVAEHEKLILLAQLKPEKDSDEAVTYSLGKFGQRALDFYSIHVTKESTHPVKPLAQIAGNRYASTPVGKALSDACMGTIASFLSKYQDIIIEHQKVVKGNQKRLESLRELAGKENLEYPSVTLPPQPHTKEGVDAYNEVIARVRMWVNLNLWQKLKLSRDDAKPLLRLKGFPSFPLVERQANEVDWWDMVCNVKKLINEKKEDGKVFWQNLAGYKRQEALRPYLSSEEDRKKGKKFARYQLGDLLLHLEKKHGEDWGKVYDEAWERIDKKVEGLSKHIKLEEERRSEDAQSKAALTDWLRAKASFVIEGLKEADKDEFCRCELKLQKWYGDLRGKPFAIEAENSILDISGFSKQYNCAFIWQKDGVKKLNLYLIINYFKGGKLRFKKIKPEAFEANRFYTVINKKSGEIVIMEVNFNFDDPNLIILPLAFGKRQGREFIWNDLLSLETGSLKLANGRVIEKTLYNRRTRQDEPALFVALTFERREVLDSSNIKPMNLIGVDRGENIPAVIALTDPEGCPLSRFKDSLGNPTHILRIGESYKEKQRTIQAKKEVEQRRAGGYSRKYASKAKNLADDMVRNTARDLLYYAVTQDAMLIFENLSRGFGRQGKRTFMAERQYTRMEDWLTAKLAYEGLPSKTYLSKTLAQYTSKTCSNCGFTITSADYDRVLEKLKKTATGWMTTINGKELKVEGQITYYNRYKRQNVVKDLSVELDRLSEESVNNDISSWTKGRSGEALSLLKKRFSHRPVQEKFVCLNCGFETHADEQAALNIARSWLFLRSQEYKKYQTNKTTGNTDKRAFVETWQSFYRKKLKEVWKPAV

SEQ ID NO: 42462 - protein, 978 aa, synthetic construct
  REGION 1..978: note = engineered CasX variant
QEIKRINKIRRRLVKDSNTKKAGKTGPMKTLLVRVMTPDLRERLENLRKKPPNIPQPISNTSRANLNKLLTDYTEMKKAILHVYWEEFQKDPVGLMSRVAQPASKKIDQNKLKPEMDEKGNLTTAGFACSQCGQPLFVYKLEQVSEKGKAYTNYFGRCNVAEHEKLILLAQLKPEKDSDEAVTYSLGKFGQRALDFYSIHVTKESTHPVKPLAQIAGNRYASAPVGKALSDACMGTIASFLSKYQDIIIEHQKVVKGNQKRLESLRELAGKENLEYPSVTLPPQPHTKEGVDAYNEVIARVRMWVNLNLWQKLKLSRDDAKPLLRLKGFPSFPLVERQANEVDWWDMVCNVKKLINEKKEDGKVFWQNLAGYKRQEALRPYLSSEEDRKKGKKFARYQLGDLLLHLEKKHGEDWGKVYDEAWERIDKKVEGLSKHIKLEEERRSEDAQSKAALTDWLRAKASFVIEGLKEADKDEFCRCELKLQKWYGDLRGKPFAIEAENSILDISGFSKQYNCAFIWQKDGVKKLNLYLIINYFKGGKLRFKKIKPEAFEANRFYTVINKKSGEIVIMEVNFNFDDPNLIILPLAFGKRQGREFIWNDLLSLETGSLKLANGRVIEKTLYNRRTRQDEPALFVALTFERREVLDSSNIKPMNLIGVDRGENIPAVIALTDPEGCPLSRFKDSLGNPTHILRIGESYKEKQRTIQAKKEVEQRRAGGYSRKYASKAKNLADDMVRNTARDLLYYAVTQDAMLIFENLSRGFGRQGKRTFMAERQYTRMEDWLTAKLAYEGLPSKTYLSKTLAQYTSKTCSNCGFTITSADYDRVLEKLKKTATGWMTTINGKELKVEGQITYYNRYKRQNVVKDLSVELDRLSEESVNNDISSWTKGRSGEALSLLKKRFSHRPVQEKFVCLNCGFETHADEQAALNIARSWLFLRSQEYKKYQTNKTTGNTDKRAFVETWQSFYRKKLKEVWKPAV

SEQ ID NO: 42463 - protein, 978 aa, synthetic construct
  REGION 1..978: note = engineered CasX variant
QEIKRINKIRRRLVKDSNTKKAGKTGPMKTLLVRVMTPDLRERLENLRKKPPNIPQPISNTSRANLNKLLTDYTEMKKAILHVYWEEFQKDPVGLMSRVAQPASKKIDQNKLKPEMDEKGNLTTAGFACSQCGQPLFVYKLEQVSEKGKAYTNYFGRCNVAEHEKLILLAQLKPEKDSDEAVTYSLGKFGQRALDFYSIHVTKESTHPVKPLAQIAGNRYASVPVGKALSDACMGTIASFLSKYQDIIIEHQKVVKGNQKRLESLRELAGKENLEYPSVTLPPQPHTKEGVDAYNEVIARVRMWVNLNLWQKLKLSRDDAKPLLRLKGFPSFPLVERQANEVDWWDMVCNVKKLINEKKEDGKVFWQNLAGYKRQEALRPYLSSEEDRKKGKKFARYQLGDLLLHLEKKHGEDWGKVYDEAWERIDKKVEGLSKHIKLEEERRSEDAQSKAALTDWLRAKASFVIEGLKEADKDEFCRCELKLQKWYGDLRGKPFAIEAENSILDISGFSKQYNCAFIWQKDGVKKLNLYLIINYFKGGKLRFKKIKPEAFEANRFYTVINKKSGEIVIMEVNFNFDDPNLIILPLAFGKRQGREFIWNDLLSLETGSLKLANGRVIEKTLYNRRTRQDEPALFVALTFERREVLDSSNIKPMNLIGVDRGENIPAVIALTDPEGCPLSRFKDSLGNPTHILRIGESYKEKQRTIQAKKEVEQRRAGGYSRKYASKAKNLADDMVRNTARDLLYYAVTQDAMLIFENLSRGFGRQGKRTFMAERQYTRMEDWLTAKLAYEGLPSKTYLSKTLAQYTSKTCSNCGFTITSADYDRVLEKLKKTATGWMTTINGKELKVEGQITYYNRYKRQNVVKDLSVELDRLSEESVNNDISSWTKGRSGEALSLLKKRFSHRPVQEKFVCLNCGFETHADEQAALNIARSWLFLRSQEYKKYQTNKTTGNTDKRAFVETWQSFYRKKLKEVWKPAV

SEQ ID NO: 42464 - protein, 978 aa, synthetic construct
  REGION 1..978: note = engineered CasX variant
QEIKRINKIRRRLVKDSNTKKAGKTGPMKTLLVRVMTPDLRERLENLRKKPPNIPQPISNTSRANLNKLLTDYTEMKKAILHVYWEEFQKDPVGLMSRVAQPASKKIDQNKLKPEMDEKGNLTTAGFACSQCGQPLFVYKLEQVSEKGKAYTNYFGRCNVAEHEKLIKLAQLKPEKDSDEAVTYSLGKFGQRALDFYSIHVTKESTHPVKPLAQIAGNRYASGPVGKALSDACMGTIASFLSKYQDIIIEHQKVVKGNQKRLESLRELAGKENLEYPSVTLPPQPHTKEGVDAYNEVIARVRMWVNLNLWQKLKLSRDDAKPLLRLKGFPSFPLVERQANEVDWWDMVCNVKKLINEKKEDGKVFWQNLAGYKRQEALRPYLSSEEDRKKGKKFARYQLGDLLLHLEKKHGEDWGKVYDEAWERIDKKVEGLSKHIKLEEERRSEDAQSKAALTDWLRAKASFVIEGLKEADKDEFCRCELKLQKWYGDLRGKPFAIEAENSILDISGFSKQYNCAFIWQKDGVKKLNLYLIINYFKGGKLRFKKIKPEAFEANRFYTVINKKSGEIVIMEVNFNFDDPNLIILPLAFGKRQGREFIWNDLLSLETGSLKLANGRVIEKTLYNRRTRQDEPALFVALTFERREVLDSSNIKPMNLIGVDRGENIPAVIALTDPEGCPLSRFKDSLGNPTHILRIGESYKEKQRTIQAKKEVEQRRAGGYSRKYASKAKNLADDMVRNTARDLLYYAVTQDAMLIFENLSRGFGRQGKRTFMAERQYTRMEDWLTAKLAYEGLPSKTYLSKTLAQYTSKTCSNCGFTITSADYDRVLEKLKKTATGWMTTINGKELKVEGQITYYNRYKRQNVVKDLSVELDRLSEESVNNDISSWTKGRSGEALSLLKKRFSHRPVQEKFVCLNCGFETHADEQAALNIARSWLFLRSQEYKKYQTNKTTGNTDKRAFVETWQSFYRKKLKEVWKPAV

SEQ ID NO: 42465 - protein, 977 aa, synthetic construct
  REGION 1..977: note = engineered CasX variant
QEIKRINKIRRRLVKDSNTKKAGKTGPMKTLLVRVMTPDLRERLENLRKKPPNIPQPISNTSRANLNKLLTDYTEMKKAILHVYWEEFQKDPVGLMSRVAQPASKKIDQNKLKPEMDEKGNLTTAGFACSQCGQPLFVYKLEQVSEKGKAYTNYFGRCNVAEHEKLILLAQLKPEKDSDEAVTYSLGKFGQRALDFYSIHVTKESTHPVKPLAQIAGNRYASPVGKALSDACMGTIASFLSKYQDIIIEHQKVVKGNQKRLESLRELAGKENLEYPSVTLPPQPHTKEGVDAYNEVIARVRMWVNLNLWQKLKLSRDDAKPLLRLKGFPSFPLVERQANEVDWWDMVCNVKKLINEKKEDGKVFWQNLAGYKRQEALRPYLSSEEDRKKGKKFARYQLGDLLLHLEKKHGEDWGKVYDEAWERIDKKVEGLSKHIKLEEERRSEDAQSKAALTDWLRAKASFVIEGLKEADKDEFCRCELKLQKWYGDLRGKPFAIEAENSILDISGFSKQYNCAFIWQKDGVKKLNLYLIINYFKGGKLRFKKIKPEAFEANRFYTVINKKSGEIVIMEVNFNFDDPNLIILPLAFGKRQGREFIWNDLLSLETGSLKLANGRVIEKTLYNRRTRQDEPALFVALTFERREVLDSSNIKPMNLIGVDRGENIPAVIALTDPEGCPLSRFKDSLGNPTHILRIGESYKEKQRTIQAKKEVEQRRAGGYSRKYASKAKNLADDMVRNTARDLLYYAVTQDAMLIFENLSRGFGRQGKRTFMAERQYTRMEDWLTAKLAYEGLPSKTYLSKTLAQYTSKTCSNCGFTITSADYDRVLEKLKKTATGWMTTINGKELKVEGQITYYNRYKRQNVVKDLSVELDRLSEESVNNDISSWTKGRSGEALSLLKKRFSHRPVQEKFVCLNCGFETHADEQAALNIARSWLFLRSQEYKKYQTNKTTGNTDKRAFVETWQSFYRKKLKEVWKPAV

SEQ ID NO: 42466 - protein, 978 aa, synthetic construct
  REGION 1..978: note = engineered CasX variant
QEIKRINKIRRRLVKDSNTKKAGKTGPMKTLLVRVMTPDLRERLENLRKKPENIPQPISNTSQANLNKLLTDYTEMKKAILHVYWEEFQKDPVGLMSRVAQPASKKIDQNKLKPEMDEKGNLTTAGFACSQCGQPLFVYKLEQVSEKGKAYTNYFGRCNVAEHEKLILLAQLKPEKDSDEAVTYSLGKFGQRALDFYSIHVTKESTHPVKPLAQIAGNRYASYPVGKALSGACMGTIASFLSKYQDIIIEHQKVVKGNQKRLESLRELAGKENLEYPSVTLPPQPHTKEGVDAYNEVIARVRMWVNLNLWQKLKLSRDDAKPLLRLKGFPSFPLVERQANEVDWWDMVCNVKKLINEKKEDGKVFWQNLAGYKRQEALRPYLSSEEDRKKGKKFARYQLGDLLLHLEKKHGEDWGKVYDEAWERIDKKVEGLSKHIKLEEERRSEDAQSKAALTDWLRAKASFVIEGLKEADKDEFCRCELKLQKWYGDLRGKPFAIEAENSILDISGFSKQYNCAFIWQKDGVKKLNLYLIINYFKGGKLRFKKIKPEAFEANRFYTVINKKSGEIVPMEVNFNFDDPNLIILPLAFGKRQGREFIWNDLLSLETGSLKLANGRVIEKTLYNRRTRQDEPALFVALTFERREVLDSSNIKPMNLIGVDRGENIPAVIALTDPEGCPLSRFKDSLGNPTHILRIGESYKEKQRTIQAKKEVEQRRAGGYSRKYASKAKNLADDMVRNTARDLLYYAVTQDAMLIFENLSRGFGRQGKRTFMAERQYTRMEDWLTAKLAYEGLPSKTYLSKTLAQYTSKTCSNCGFTITSADYDRVLEKLKKTATGWMTTINGKELKVEGQITYYNRYKRQNVVKDLSVELDRLSEESVNNDISSWTKGRSGEALSLLKKRFSHRPVQEKFVCLNCGFETHADEQAALNIARSWLFLRSQEYKKYQTNKTTGNTDKRAFVETWQSFYRKKLKEVWKPAV

SEQ ID NO: 42467 - protein, 978 aa, synthetic construct
  REGION 1..978: note = engineered CasX variant
QEIKRINKIRRRLVKDSNTKKAGKTGPMKTLLVRVMTPDLRERLENLRKKPENIPQPISNTSQANLNKLLTDYTEMKKAILHVYWEEFQKDPVGLMSRVAQPASKKIDQNKLKPEMDEKGNLTTAGFACSQCGQPLFVYKLEQVSEKGKAYTNYFGRCNVAEHEKLILLAQLKPEKDSDEAVTYSLGKFGQRALDFYSIHVTKESTHPVKPLAQIAGNRYASHPVGKALSGACMGTIASFLSKYQDIIIEHQKVVKGNQKRLESLRELAGKENLEYPSVTLPPQPHTKEGVDAYNEVIARVRMWVNLNLWQKLKLSRDDAKPLLRLKGFPSFPLVERQANEVDWWDMVCNVKKLINEKKEDGKVFWQNLAGYKRQEALRPYLSSEEDRKKGKKFARYQLGDLLLHLEKKHGEDWGKVYDEAWERIDKKVEGLSKHIKLEEERRSEDAQSKAALTDWLRAKASFVIEGLKEADKDEFCRCELKLQKWYGDLRGKPFAIEAENSILDISGFSKQYNCAFIWQKDGVKKLNLYLIINYFKGGKLRFKKIKPEAFEANRFYTVINKKSGEIVPMEVNFNFDDPNLIILPLAFGKRQGREFIWNDLLSLETGSLKLANGRVIEKTLYNRRTRQDEPALFVALTFERREVLDSSNIKPMNLIGVDRGENIPAVIALTDPEGCPLSRFKDSLGNPTHILRIGESYKEKQRTIQAKKEVEQRRAGGYSRKYASKAKNLADDMVRNTARDLLYYAVTQDAMLIFENLSRGFGRQGKRTFMAERQYTRMEDWLTAKLAYEGLPSKTYLSKTLAQYTSKTCSNCGFTITSADYDRVLEKLKKTATGWMTTINGKELKVEGQITYYNRYKRQNVVKDLSVELDRLSEESVNNDISSWTKGRSGEALSLLKKRFSHRPVQEKFVCLNCGFETHADEQAALNIARSWLFLRSQEYKKYQTNKTTGNTDKRAFVETWQSFYRKKLKEVWKPAV

SEQ ID NO: 42468 - protein, 978 aa, synthetic construct
  REGION 1..978: note = engineered CasX variant
QEIKRINKIRRRLVKDSNTKKAGKTGPMKTLLVRVMTPDLRERLENLRKKPENIPQPISNTSQANLNKLLTDYTEMKKAILHVYWEEFQKDPVGLMSRVAQPASKKIDQNKLKPEMDEKGNLTTAGFACSQCGQPLFVYKLEQVSEKGKAYTNYFGRCNVAEHEKLILLAQLKPEKDSDEAVTYSLGKFGQRALDFYSIHVTKESTHPVKPLAQIAGNRYASSPVGKALSGACMGTIASFLSKYQDIIIEHQKVVKGNQKRLESLRELAGKENLEYPSVTLPPQPHTKEGVDAYNEVIARVRMWVNLNLWQKLKLSRDDAKPLLRLKGFPSFPLVERQANEVDWWDMVCNVKKLINEKKEDGKVFWQNLAGYKRQEALRPYLSSEEDRKKGKKFARYQLGDLLLHLEKKHGEDWGKVYDEAWERIDKKVEGLSKHIKLEEERRSEDAQSKAALTDWLRAKASFVIEGLKEADKDEFCRCELKLQKWYGDLRGKPFAIEAENSILDISGFSKQYNCAFIWQKDGVKKLNLYLIINYFKGGKLRFKKIKPEAFEANRFYTVINKKSGEIVPMEVNFNFDDPNLIILPLAFGKRQGREFIWNDLLSLETGSLKLANGRVIEKTLYNRRTRQDEPALFVALTFERREVLDSSNIKPMNLIGVDRGENIPAVIALTDPEGCPLSRFKDSLGNPTHILRIGESYKEKQRTIQAKKEVEQRRAGGYSRKYASKAKNLADDMVRNTARDLLYYAVTQDAMLIFENLSRGFGRQGKRTFMAERQYTRMEDWLTAKLAYEGLPSKTYLSKTLAQYTSKTCSNCGFTITSADYDRVLEKLKKTATGWMTTINGKELKVEGQITYYNRYKRQNVVKDLSVELDRLSEESVNNDISSWTKGRSGEALSLLKKRFSHRPVQEKFVCLNCGFETHADEQAALNIARSWLFLRSQEYKKYQTNKTTGNTDKRAFVETWQSFYRKKLKEVWKPAV

SEQ ID NO: 42469 - protein, 978 aa, synthetic construct
  REGION 1..978: note = engineered CasX variant
QEIKRINKIRRRLVKDSNTKKAGKTGPMKTLLVRVMTPDLRERLENLRKKPENIPQPISNTSQANLNKLLTDYTEMKKAILHVYWEEFQKDPVGLMSRVAQPASKKIDQNKLKPEMDEKGNLTTAGFACSQCGQPLFVYKLEQVSEKGKAYTNYFGRCNVAEHEKLILLAQLKPEKDSDEAVTYSLGKFGQRALDFYSIHVTKESTHPVKPLAQIAGNRYASTPVGKALSGACMGTIASFLSKYQDIIIEHQKVVKGNQKRLESLRELAGKENLEYPSVTLPPQPHTKEGVDAYNEVIARVRMWVNLNLWQKLKLSRDDAKPLLRLKGFPSFPLVERQANEVDWWDMVCNVKKLINEKKEDGKVFWQNLAGYKRQEALRPYLSSEEDRKKGKKFARYQLGDLLLHLEKKHGEDWGKVYDEAWERIDKKVEGLSKHIKLEEERRSEDAQSKAALTDWLRAKASFVIEGLKEADKDEFCRCELKLQKWYGDLRGKPFAIEAENSILDISGFSKQYNCAFIWQKDGVKKLNLYLIINYFKGGKLRFKKIKPEAFEANRFYTVINKKSGEIVPMEVNFNFDDPNLIILPLAFGKRQGREFIWNDLLSLETGSLKLANGRVIEKTLYNRRTRQDEPALFVALTFERREVLDSSNIKPMNLIGVDRGENIPAVIALTDPEGCPLSRFKDSLGNPTHILRIGESYKEKQRTIQAKKEVEQRRAGGYSRKYASKAKNLADDMVRNTARDLLYYAVTQDAMLIFENLSRGFGRQGKRTFMAERQYTRMEDWLTAKLAYEGLPSKTYLSKTLAQYTSKTCSNCGFTITSADYDRVLEKLKKTATGWMTTINGKELKVEGQITYYNRYKRQNVVKDLSVELDRLSEESVNNDISSWTKGRSGEALSLLKKRFSHRPVQEKFVCLNCGFETHADEQAALNIARSWLFLRSQEYKKYQTNKTTGNTDKRAFVETWQSFYRKKLKEVWKPAV

SEQ ID NO: 42470 - protein, 978 aa, synthetic construct
  REGION 1..978: note = engineered CasX variant
QEIKRINKIRRRLVKDSNTKKAGKTGPMKTLLVRVMTPDLRERLENLRKKPENIPQPISNTSQANLNKLLTDYTEMKKAILHVYWEEFQKDPVGLMSRVAQPASKKIDQNKLKPEMDEKGNLTTAGFACSQCGQPLFVYKLEQVSEKGKAYTNYFGRCNVAEHEKLILLAQLKPEKDSDEAVTYSLGKFGQRALDFYSIHVTKESTHPVKPLAQIAGNRYASAPVGKALSGACMGTIASFLSKYQDIIIEHQKVVKGNQKRLESLRELAGKENLEYPSVTLPPQPHTKEGVDAYNEVIARVRMWVNLNLWQKLKLSRDDAKPLLRLKGFPSFPLVERQANEVDWWDMVCNVKKLINEKKEDGKVFWQNLAGYKRQEALRPYLSSEEDRKKGKKFARYQLGDLLLHLEKKHGEDWGKVYDEAWERIDKKVEGLSKHIKLEEERRSEDAQSKAALTDWLRAKASFVIEGLKEADKDEFCRCELKLQKWYGDLRGKPFAIEAENSILDISGFSKQYNCAFIWQKDGVKKLNLYLIINYFKGGKLRFKKIKPEAFEANRFYTVINKKSGEIVPMEVNFNFDDPNLIILPLAFGKRQGREFIWNDLLSLETGSLKLANGRVIEKTLYNRRTRQDEPALFVALTFERREVLDSSNIKPMNLIGVDRGENIPAVIALTDPEGCPLSRFKDSLGNPTHILRIGESYKEKQRTIQAKKEVEQRRAGGYSRKYASKAKNLADDMVRNTARDLLYYAVTQDAMLIFENLSRGFGRQGKRTFMAERQYTRMEDWLTAKLAYEGLPSKTYLSKTLAQYTSKTCSNCGFTITSADYDRVLEKLKKTATGWMTTINGKELKVEGQITYYNRYKRQNVVKDLSVELDRLSEESVNNDISSWTKGRSGEALSLLKKRFSHRPVQEKFVCLNCGFETHADEQAALNIARSWLFLRSQEYKKYQTNKTTGNTDKRAFVETWQSFYRKKLKEVWKPAV

SEQ ID NO: 42471 - protein, 978 aa, synthetic construct
  REGION 1..978: note = engineered CasX variant
QEIKRINKIRRRLVKDSNTKKAGKTGPMKTLLVRVMTPDLRERLENLRKKPENIPQPISNTSQANLNKLLTDYTEMKKAILHVYWEEFQKDPVGLMSRVAQPASKKIDQNKLKPEMDEKGNLTTAGFACSQCGQPLFVYKLEQVSEKGKAYTNYFGRCNVAEHEKLILLAQLKPEKDSDEAVTYSLGKFGQRALDFYSIHVTKESTHPVKPLAQIAGNRYASVPVGKALSGACMGTIASFLSKYQDIIIEHQKVVKGNQKRLESLRELAGKENLEYPSVTLPPQPHTKEGVDAYNEVIARVRMWVNLNLWQKLKLSRDDAKPLLRLKGFPSFPLVERQANEVDWWDMVCNVKKLINEKKEDGKVFWQNLAGYKRQEALRPYLSSEEDRKKGKKFARYQLGDLLLHLEKKHGEDWGKVYDEAWERIDKKVEGLSKHIKLEEERRSEDAQSKAALTDWLRAKASFVIEGLKEADKDEFCRCELKLQKWYGDLRGKPFAIEAENSILDISGFSKQYNCAFIWQKDGVKKLNLYLIINYFKGGKLRFKKIKPEAFEANRFYTVINKKSGEIVPMEVNFNFDDPNLIILPLAFGKRQGREFIWNDLLSLETGSLKLANGRVIEKTLYNRRTRQDEPALFVALTFERREVLDSSNIKPMNLIGVDRGENIPAVIALTDPEGCPLSRFKDSLGNPTHILRIGESYKEKQRTIQAKKEVEQRRAGGYSRKYASKAKNLADDMVRNTARDLLYYAVTQDAMLIFENLSRGFGRQGKRTFMAERQYTRMEDWLTAKLAYEGLPSKTYLSKTLAQYTSKTCSNCGFTITSADYDRVLEKLKKTATGWMTTINGKELKVEGQITYYNRYKRQNVVKDLSVELDRLSEESVNNDISSWTKGRSGEALSLLKKRFSHRPVQEKFVCLNCGFETHADEQAALNIARSWLFLRSQEYKKYQTNKTTGNTDKRAFVETWQSFYRKKLKEVWKPAV

SEQ ID NO: 42472 - protein, 978 aa, synthetic construct
  REGION 1..978: note = engineered CasX variant
QEIKRINKIRRRLVKDSNTKKAGKTGPMKTLLVRVMTPDLRERLENLRKKPENIPQPISNTSQANLNKLLTDYTEMKKAILHVYWEEFQKDPVGLMSRVAQPASKKIDQNKLKPEMDEKGNLTTAGFACSQCGQPLFVYKLEQVSEKGKAYTNYFGRCNVAEHEKLIKLAQLKPEKDSDEAVTYSLGKFGQRALDFYSIHVTKESTHPVKPLAQIAGNRYASGPVGKALSGACMGTIASFLSKYQDIIIEHQKVVKGNQKRLESLRELAGKENLEYPSVTLPPQPHTKEGVDAYNEVIARVRMWVNLNLWQKLKLSRDDAKPLLRLKGFPSFPLVERQANEVDWWDMVCNVKKLINEKKEDGKVFWQNLAGYKRQEALRPYLSSEEDRKKGKKFARYQLGDLLLHLEKKHGEDWGKVYDEAWERIDKKVEGLSKHIKLEEERRSEDAQSKAALTDWLRAKASFVIEGLKEADKDEFCRCELKLQKWYGDLRGKPFAIEAENSILDISGFSKQYNCAFIWQKDGVKKLNLYLIINYFKGGKLRFKKIKPEAFEANRFYTVINKKSGEIVPMEVNFNFDDPNLIILPLAFGKRQGREFIWNDLLSLETGSLKLANGRVIEKTLYNRRTRQDEPALFVALTFERREVLDSSNIKPMNLIGVDRGENIPAVIALTDPEGCPLSRFKDSLGNPTHILRIGESYKEKQRTIQAKKEVEQRRAGGYSRKYASKAKNLADDMVRNTARDLLYYAVTQDAMLIFENLSRGFGRQGKRTFMAERQYTRMEDWLTAKLAYEGLPSKTYLSKTLAQYTSKTCSNCGFTITSADYDRVLEKLKKTATGWMTTINGKELKVEGQITYYNRYKRQNVVKDLSVELDRLSEESVNNDISSWTKGRSGEALSLLKKRFSHRPVQEKFVCLNCGFETHADEQAALNIARSWLFLRSQEYKKYQTNKTTGNTDKRAFVETWQSFYRKKLKEVWKPAV

SEQ ID NO: 42473 - protein, 977 aa, synthetic construct
  REGION 1..977: note = engineered CasX variant
QEIKRINKIRRRLVKDSNTKKAGKTGPMKTLLVRVMTPDLRERLENLRKKPENIPQPISNTSQANLNKLLTDYTEMKKAILHVYWEEFQKDPVGLMSRVAQPASKKIDQNKLKPEMDEKGNLTTAGFACSQCGQPLFVYKLEQVSEKGKAYTNYFGRCNVAEHEKLILLAQLKPEKDSDEAVTYSLGKFGQRALDFYSIHVTKESTHPVKPLAQIAGNRYASPVGKALSGACMGTIASFLSKYQDIIIEHQKVVKGNQKRLESLRELAGKENLEYPSVTLPPQPHTKEGVDAYNEVIARVRMWVNLNLWQKLKLSRDDAKPLLRLKGFPSFPLVERQANEVDWWDMVCNVKKLINEKKEDGKVFWQNLAGYKRQEALRPYLSSEEDRKKGKKFARYQLGDLLLHLEKKHGEDWGKVYDEAWERIDKKVEGLSKHIKLEEERRSEDAQSKAALTDWLRAKASFVIEGLKEADKDEFCRCELKLQKWYGDLRGKPFAIEAENSILDISGFSKQYNCAFIWQKDGVKKLNLYLIINYFKGGKLRFKKIKPEAFEANRFYTVINKKSGEIVPMEVNFNFDDPNLIILPLAFGKRQGREFIWNDLLSLETGSLKLANGRVIEKTLYNRRTRQDEPALFVALTFERREVLDSSNIKPMNLIGVDRGENIPAVIALTDPEGCPLSRFKDSLGNPTHILRIGESYKEKQRTIQAKKEVEQRRAGGYSRKYASKAKNLADDMVRNTARDLLYYAVTQDAMLIFENLSRGFGRQGKRTFMAERQYTRMEDWLTAKLAYEGLPSKTYLSKTLAQYTSKTCSNCGFTITSADYDRVLEKLKKTATGWMTTINGKELKVEGQITYYNRYKRQNVVKDLSVELDRLSEESVNNDISSWTKGRSGEALSLLKKRFSHRPVQEKFVCLNCGFETHADEQAALNIARSWLFLRSQEYKKYQTNKTTGNTDKRAFVETWQSFYRKKLKEVWKPAV

SEQ ID NO: 42474 - protein, 978 aa, synthetic construct
  REGION 1..978: note = engineered CasX variant
QEIKRINKIRRRLVKDSNTKKAGKTGPMKTLLVRVMTPDLRERLENLRKKPENIPQPISNTSQANLNKLLTDYTEMKKAILHVYWEEFQKDPVGLMSRVAQPASKKIDQNKLKPEMDEKGNLTTAGFACSQCGQPLFVYKLEQVSEKGKAYTNYFGRCNVAEHEKLILLAQLKPEKDSDEAVTYSLGKFGQRALDFYSIHVTKESTHPVKPLAQIAGNRYASYPVGKALSDACMGTIASFLSKYQDIIIEHQKVVKGNQKRLESLRELAGKENLEYPSVTLPPQPHTKEGVDAYNEVIARVRMWVNLNLWQKLKLSRDDAKPLLRLKNFPSFPLVERQANEVDWWDMVCNVKKLINEKKEDGKVFWQNLAGYKRQEALRPYLSSEEDRKKGKKFARYQLGDLLLHLEKKHGEDWGKVYDEAWERIDKKVEGLSKHIKLEEERRSEDAQSKAALTDWLRAKASFVIEGLKEADKDEFCRCELKLQKWYGDLRGKPFAIEAENSILDISGFSKQYNCAFIWQKDGVKKLNLYLIINYFKGGKLRFKKIKPEAFEANRFYTVINKKSGEIVPMEVNFNFDDPNLIILPLAFGKRQGREFIWNDLLSLETGSLKLANGRVIEKTLYNRRTRQDEPALFVALTFERREVLDSSNIKPMNLIGVDRGENIPAVIALTDPEGCPLSRFKDSLGNPTHILRIGESYKEKQRTIQAKKEVEQRRAGGYSRKYASKAKNLADDMVRNTARDLLYYAVTQDAMLIFENLSRGFGRQGKRTFMAERQYTRMEDWLTAKLAYEGLPSKTYLSKTLAQYTSKTCSNCGFTITSADYDRVLEKLKKTATGWMTTINGKELKVEGQITYYNRYKRQNVVKDLSVELDRLSEESVNNDISSWTKGRSGEALSLLKKRFSHRPVQEKFVCLNCGFETHADEQAALNIARSWLFLRSQEYKKYQTNKTTGNTDKRAFVETWQSFYRKKLKEVWKPAV

SEQ ID NO: 42475 - protein, 978 aa, synthetic construct
  REGION 1..978: note = engineered CasX variant
QEIKRINKIRRRLVKDSNTKKAGKTGPMKTLLVRVMTPDLRERLENLRKKPENIPQPISNTSQANLNKLLTDYTEMKKAILHVYWEEFQKDPVGLMSRVAQPASKKIDQNKLKPEMDEKGNLTTAGFACSQCGQPLFVYKLEQVSEKGKAYTNYFGRCNVAEHEKLILLAQLKPEKDSDEAVTYSLGKFGQRALDFYSIHVTKESTHPVKPLAQIAGNRYASHPVGKALSDACMGTIASFLSKYQDIIIEHQKVVKGNQKRLESLRELAGKENLEYPSVTLPPQPHTKEGVDAYNEVIARVRMWVNLNLWQKLKLSRDDAKPLLRLKNFPSFPLVERQANEVDWWDMVCNVKKLINEKKEDGKVFWQNLAGYKRQEALRPYLSSEEDRKKGKKFARYQLGDLLLHLEKKHGEDWGKVYDEAWERIDKKVEGLSKHIKLEEERRSEDAQSKAALTDWLRAKASFVIEGLKEADKDEFCRCELKLQKWYGDLRGKPFAIEAENSILDISGFSKQYNCAFIWQKDGVKKLNLYLIINYFKGGKLRFKKIKPEAFEANRFYTVINKKSGEIVPMEVNFNFDDPNLIILPLAFGKRQGREFIWNDLLSLETGSLKLANGRVIEKTLYNRRTRQDEPALFVALTFERREVLDSSNIKPMNLIGVDRGENIPAVIALTDPEGCPLSRFKDSLGNPTHILRIGESYKEKQRTIQAKKEVEQRRAGGYSRKYASKAKNLADDMVRNTARDLLYYAVTQDAMLIFENLSRGFGRQGKRTFMAERQYTRMEDWLTAKLAYEGLPSKTYLSKTLAQYTSKTCSNCGFTITSADYDRVLEKLKKTATGWMTTINGKELKVEGQITYYNRYKRQNVVKDLSVELDRLSEESVNNDISSWTKGRSGEALSLLKKRFSHRPVQEKFVCLNCGFETHADEQAALNIARSWLFLRSQEYKKYQTNKTTGNTDKRAFVETWQSFYRKKLKEVWKPAV

SEQ ID NO: 42476 - protein, 978 aa, synthetic construct
  REGION 1..978: note = engineered CasX variant
QEIKRINKIRRRLVKDSNTKKAGKTGPMKTLLVRVMTPDLRERLENLRKKPENIPQPISNTSQANLNKLLTDYTEMKKAILHVYWEEFQKDPVGLMSRVAQPASKKIDQNKLKPEMDEKGNLTTAGFACSQCGQPLFVYKLEQVSEKGKAYTNYFGRCNVAEHEKLILLAQLKPEKDSDEAVTYSLGKFGQRALDFYSIHVTKESTHPVKPLAQIAGNRYASSPVGKALSDACMGTIASFLSKYQDIIIEHQKVVKGNQKRLESLRELAGKENLEYPSVTLPPQPHTKEGVDAYNEVIARVRMWVNLNLWQKLKLSRDDAKPLLRLKNFPSFPLVERQANEVDWWDMVCNVKKLINEKKEDGKVFWQNLAGYKRQEALRPYLSSEEDRKKGKKFARYQLGDLLLHLEKKHGEDWGKVYDEAWERIDKKVEGLSKHIKLEEERRSEDAQSKAALTDWLRAKASFVIEGLKEADKDEFCRCELKLQKWYGDLRGKPFAIEAENSILDISGFSKQYNCAFIWQKDGVKKLNLYLIINYFKGGKLRFKKIKPEAFEANRFYTVINKKSGEIVPMEVNFNFDDPNLIILPLAFGKRQGREFIWNDLLSLETGSLKLANGRVIEKTLYNRRTRQDEPALFVALTFERREVLDSSNIKPMNLIGVDRGENIPAVIALTDPEGCPLSRFKDSLGNPTHILRIGESYKEKQRTIQAKKEVEQRRAGGYSRKYASKAKNLADDMVRNTARDLLYYAVTQDAMLIFENLSRGFGRQGKRTFMAERQYTRMEDWLTAKLAYEGLPSKTYLSKTLAQYTSKTCSNCGFTITSADYDRVLEKLKKTATGWMTTINGKELKVEGQITYYNRYKRQNVVKDLSVELDRLSEESVNNDISSWTKGRSGEALSLLKKRFSHRPVQEKFVCLNCGFETHADEQAALNIARSWLFLRSQEYKKYQTNKTTGNTDKRAFVETWQSFYRKKLKEVWKPAV

SEQ ID NO: 42477 - protein, 978 aa, synthetic construct
  REGION 1..978: note = engineered CasX variant
QEIKRINKIRRRLVKDSNTKKAGKTGPMKTLLVRVMTPDLRERLENLRKKPENIPQPISNTSQANLNKLLTDYTEMKKAILHVYWEEFQKDPVGLMSRVAQPASKKIDQNKLKPEMDEKGNLTTAGFACSQCGQPLFVYKLEQVSEKGKAYTNYFGRCNVAEHEKLILLAQLKPEKDSDEAVTYSLGKFGQRALDFYSIHVTKESTHPVKPLAQIAGNRYASTPVGKALSDACMGTIASFLSKYQDIIIEHQKVVKGNQKRLESLRELAGKENLEYPSVTLPPQPHTKEGVDAYNEVIARVRMWVNLNLWQKLKLSRDDAKPLLRLKNFPSFPLVERQANEVDWWDMVCNVKKLINEKKEDGKVFWQNLAGYKRQEALRPYLSSEEDRKKGKKFARYQLGDLLLHLEKKHGEDWGKVYDEAWERIDKKVEGLSKHIKLEEERRSEDAQSKAALTDWLRAKASFVIEGLKEADKDEFCRCELKLQKWYGDLRGKPFAIEAENSILDISGFSKQYNCAFIWQKDGVKKLNLYLIINYFKGGKLRFKKIKPEAFEANRFYTVINKKSGEIVPMEVNFNFDDPNLIILPLAFGKRQGREFIWNDLLSLETGSLKLANGRVIEKTLYNRRTRQDEPALFVALTFERREVLDSSNIKPMNLIGVDRGENIPAVIALTDPEGCPLSRFKDSLGNPTHILRIGESYKEKQRTIQAKKEVEQRRAGGYSRKYASKAKNLADDMVRNTARDLLYYAVTQDAMLIFENLSRGFGRQGKRTFMAERQYTRMEDWLTAKLAYEGLPSKTYLSKTLAQYTSKTCSNCGFTITSADYDRVLEKLKKTATGWMTTINGKELKVEGQITYYNRYKRQNVVKDLSVELDRLSEESVNNDISSWTKGRSGEALSLLKKRFSHRPVQEKFVCLNCGFETHADEQAALNIARSWLFLRSQEYKKYQTNKTTGNTDKRAFVETWQSFYRKKLKEVWKPAV

SEQ ID NO: 42478 - protein, 978 aa, synthetic construct
  REGION 1..978: note = engineered CasX variant
QEIKRINKIRRRLVKDSNTKKAGKTGPMKTLLVRVMTPDLRERLENLRKKPENIPQPISNTSQANLNKLLTDYTEMKKAILHVYWEEFQKDPVGLMSRVAQPASKKIDQNKLKPEMDEKGNLTTAGFACSQCGQPLFVYKLEQVSEKGKAYTNYFGRCNVAEHEKLILLAQLKPEKDSDEAVTYSLGKFGQRALDFYSIHVTKESTHPVKPLAQIAGNRYASAPVGKALSDACMGTIASFLSKYQDIIIEHQKVVKGNQKRLESLRELAGKENLEYPSVTLPPQPHTKEGVDAYNEVIARVRMWVNLNLWQKLKLSRDDAKPLLRLKNFPSFPLVERQANEVDWWDMVCNVKKLINEKKEDGKVFWQNLAGYKRQEALRPYLSSEEDRKKGKKFARYQLGDLLLHLEKKHGEDWGKVYDEAWERIDKKVEGLSKHIKLEEERRSEDAQSKAALTDWLRAKASFVIEGLKEADKDEFCRCELKLQKWYGDLRGKPFAIEAENSILDISGFSKQYNCAFIWQKDGVKKLNLYLIINYFKGGKLRFKKIKPEAFEANRFYTVINKKSGEIVPMEVNFNFDDPNLIILPLAFGKRQGREFIWNDLLSLETGSLKLANGRVIEKTLYNRRTRQDEPALFVALTFERREVLDSSNIKPMNLIGVDRGENIPAVIALTDPEGCPLSRFKDSLGNPTHILRIGESYKEKQRTIQAKKEVEQRRAGGYSRKYASKAKNLADDMVRNTARDLLYYAVTQDAMLIFENLSRGFGRQGKRTFMAERQYTRMEDWLTAKLAYEGLPSKTYLSKTLAQYTSKTCSNCGFTITSADYDRVLEKLKKTATGWMTTINGKELKVEGQITYYNRYKRQNVVKDLSVELDRLSEESVNNDISSWTKGRSGEALSLLKKRFSHRPVQEKFVCLNCGFETHADEQAALNIARSWLFLRSQEYKKYQTNKTTGNTDKRAFVETWQSFYRKKLKEVWKPAV

SEQ ID NO: 42479 - protein, 978 aa, synthetic construct
  REGION 1..978: note = engineered CasX variant
QEIKRINKIRRRLVKDSNTKKAGKTGPMKTLLVRVMTPDLRERLENLRKKPENIPQPISNTSQANLNKLLTDYTEMKKAILHVYWEEFQKDPVGLMSRVAQPASKKIDQNKLKPEMDEKGNLTTAGFACSQCGQPLFVYKLEQVSEKGKAYTNYFGRCNVAEHEKLILLAQLKPEKDSDEAVTYSLGKFGQRALDFYSIHVTKESTHPVKPLAQIAGNRYASVPVGKALSDACMGTIASFLSKYQDIIIEHQKVVKGNQKRLESLRELAGKENLEYPSVTLPPQPHTKEGVDAYNEVIARVRMWVNLNLWQKLKLSRDDAKPLLRLKNFPSFPLVERQANEVDWWDMVCNVKKLINEKKEDGKVFWQNLAGYKRQEALRPYLSSEEDRKKGKKFARYQLGDLLLHLEKKHGEDWGKVYDEAWERIDKKVEGLSKHIKLEEERRSEDAQSKAALTDWLRAKASFVIEGLKEADKDEFCRCELKLQKWYGDLRGKPFAIEAENSILDISGFSKQYNCAFIWQKDGVKKLNLYLIINYFKGGKLRFKKIKPEAFEANRFYTVINKKSGEIVPMEVNFNFDDPNLIILPLAFGKRQGREFIWNDLLSLETGSLKLANGRVIEKTLYNRRTRQDEPALFVALTFERREVLDSSNIKPMNLIGVDRGENIPAVIALTDPEGCPLSRFKDSLGNPTHILRIGESYKEKQRTIQAKKEVEQRRAGGYSRKYASKAKNLADDMVRNTARDLLYYAVTQDAMLIFENLSRGFGRQGKRTFMAERQYTRMEDWLTAKLAYEGLPSKTYLSKTLAQYTSKTCSNCGFTITSADYDRVLEKLKKTATGWMTTINGKELKVEGQITYYNRYKRQNVVKDLSVELDRLSEESVNNDISSWTKGRSGEALSLLKKRFSHRPVQEKFVCLNCGFETHADEQAALNIARSWLFLRSQEYKKYQTNKTTGNTDKRAFVETWQSFYRKKLKEVWKPAV

SEQ ID NO: 42480 - protein, 978 aa, synthetic construct
  REGION 1..978: note = engineered CasX variant
QEIKRINKIRRRLVKDSNTKKAGKTGPMKTLLVRVMTPDLRERLENLRKKPENIPQPISNTSQANLNKLLTDYTEMKKAILHVYWEEFQKDPVGLMSRVAQPASKKIDQNKLKPEMDEKGNLTTAGFACSQCGQPLFVYKLEQVSEKGKAYTNYFGRCNVAEHEKLIKLAQLKPEKDSDEAVTYSLGKFGQRALDFYSIHVTKESTHPVKPLAQIAGNRYASGPVGKALSDACMGTIASFLSKYQDIIIEHQKVVKGNQKRLESLRELAGKENLEYPSVTLPPQPHTKEGVDAYNEVIARVRMWVNLNLWQKLKLSRDDAKPLLRLKNFPSFPLVERQANEVDWWDMVCNVKKLINEKKEDGKVFWQNLAGYKRQEALRPYLSSEEDRKKGKKFARYQLGDLLLHLEKKHGEDWGKVYDEAWERIDKKVEGLSKHIKLEEERRSEDAQSKAALTDWLRAKASFVIEGLKEADKDEFCRCELKLQKWYGDLRGKPFAIEAENSILDISGFSKQYNCAFIWQKDGVKKLNLYLIINYFKGGKLRFKKIKPEAFEANRFYTVINKKSGEIVPMEVNFNFDDPNLIILPLAFGKRQGREFIWNDLLSLETGSLKLANGRVIEKTLYNRRTRQDEPALFVALTFERREVLDSSNIKPMNLIGVDRGENIPAVIALTDPEGCPLSRFKDSLGNPTHILRIGESYKEKQRTIQAKKEVEQRRAGGYSRKYASKAKNLADDMVRNTARDLLYYAVTQDAMLIFENLSRGFGRQGKRTFMAERQYTRMEDWLTAKLAYEGLPSKTYLSKTLAQYTSKTCSNCGFTITSADYDRVLEKLKKTATGWMTTINGKELKVEGQITYYNRYKRQNVVKDLSVELDRLSEESVNNDISSWTKGRSGEALSLLKKRFSHRPVQEKFVCLNCGFETHADEQAALNIARSWLFLRSQEYKKYQTNKTTGNTDKRAFVETWQSFYRKKLKEVWKPAV

SEQ ID NO: 42481 - protein, 977 aa, synthetic construct
  REGION 1..977: note = engineered CasX variant
QEIKRINKIRRRLVKDSNTKKAGKTGPMKTLLVRVMTPDLRERLENLRKKPENIPQPISNTSQANLNKLLTDYTEMKKAILHVYWEEFQKDPVGLMSRVAQPASKKIDQNKLKPEMDEKGNLTTAGFACSQCGQPLFVYKLEQVSEKGKAYTNYFGRCNVAEHEKLILLAQLKPEKDSDEAVTYSLGKFGQRALDFYSIHVTKESTHPVKPLAQIAGNRYASPVGKALSDACMGTIASFLSKYQDIIIEHQKVVKGNQKRLESLRELAGKENLEYPSVTLPPQPHTKEGVDAYNEVIARVRMWVNLNLWQKLKLSRDDAKPLLRLKNFPSFPLVERQANEVDWWDMVCNVKKLINEKKEDGKVFWQNLAGYKRQEALRPYLSSEEDRKKGKKFARYQLGDLLLHLEKKHGEDWGKVYDEAWERIDKKVEGLSKHIKLEEERRSEDAQSKAALTDWLRAKASFVIEGLKEADKDEFCRCELKLQKWYGDLRGKPFAIEAENSILDISGFSKQYNCAFIWQKDGVKKLNLYLIINYFKGGKLRFKKIKPEAFEANRFYTVINKKSGEIVPMEVNFNFDDPNLIILPLAFGKRQGREFIWNDLLSLETGSLKLANGRVIEKTLYNRRTRQDEPALFVALTFERREVLDSSNIKPMNLIGVDRGENIPAVIALTDPEGCPLSRFKDSLGNPTHILRIGESYKEKQRTIQAKKEVEQRRAGGYSRKYASKAKNLADDMVRNTARDLLYYAVTQDAMLIFENLSRGFGRQGKRTFMAERQYTRMEDWLTAKLAYEGLPSKTYLSKTLAQYTSKTCSNCGFTITSADYDRVLEKLKKTATGWMTTINGKELKVEGQITYYNRYKRQNVVKDLSVELDRLSEESVNNDISSWTKGRSGEALSLLKKRFSHRPVQEKFVCLNCGFETHADEQAALNIARSWLFLRSQEYKKYQTNKTTGNTDKRAFVETWQSFYRKKLKEVWKPAV

SEQ ID NO: 42482 - protein, 978 aa, synthetic construct
  REGION 1..978: note = engineered CasX variant
QEIKRINKIRRRLVKDSNTKKAGKTGPMKTLLVRVMTPDLRERLENLRKKPENIPQPISNTSQANLNKLLTDYTEMKKAILHVYWEEFQKDPVGLMSRVAQPASKKIDQNKLKPEMDEKGNLTTAGFACSQCGQPLFVYKLEQVSEKGKAYTNYFGRCNVAEHEKLILLAQLKPEKDSDEAVTYSLGKFGQRALDFYSIHVTKESTHPVKPLAQIAGNRYASYPVGKALSDACMGTIASFLSKYQDIIIEHQKVVKGNQKRLESLRELAGKENLEYPSVTLPPQPHTKEGVDAYNEVIARVRMWVNLNLWQKLKLSRDDAKPLLRLKGFPSFPLVERQANEVDWWDMVCNVKKLINEKKEDGKVFWQNLAGYKRQEALRPYLSSEEDRKKGKKFARYQLGDLLNHLEKKHGEDWGKVYDEAWERIDKKVEGLSKHIKLEEERRSEDAQSKAALTDWLRAKASFVIEGLKEADKDEFCRCELKLQKWYGDLRGKPFAIEAENSILDISGFSKQYNCAFIWQKDGVKKLNLYLIINYFKGGKLRFKKIKPEAFEANRFYTVINKKSGEIVPMEVNFNFDDPNLIILPLAFGKRQGREFIWNDLLSLETGSLKLANGRVIEKTLYNRRTRQDEPALFVALTFERREVLDSSNIKPMNLIGVDRGENIPAVIALTDPEGCPLSRFKDSLGNPTHILRIGESYKEKQRTIQAKKEVEQRRAGGYSRKYASKAKNLADDMVRNTARDLLYYAVTQDAMLIFENLSRGFGRQGKRTFMAERQYTRMEDWLTAKLAYEGLPSKTYLSKTLAQYTSKTCSNCGFTITSADYDRVLEKLKKTATGWMTTINGKELKVEGQITYYNRYKRQNVVKDLSVELDRLSEESVNNDISSWTKGRSGEALSLLKKRFSHRPVQEKFVCLNCGFETHADEQAALNIARSWLFLRSQEYKKYQTNKTTGNTDKRAFVETWQSFYRKKLKEVWKPAV

SEQ ID NO: 42483 - protein, 978 aa, synthetic construct
  REGION 1..978: note = engineered CasX variant
QEIKRINKIRRRLVKDSNTKKAGKTGPMKTLLVRVMTPDLRERLENLRKKPENIPQPISNTSQANLNKLLTDYTEMKKAILHVYWEEFQKDPVGLMSRVAQPASKKIDQNKLKPEMDEKGNLTTAGFACSQCGQPLFVYKLEQVSEKGKAYTNYFGRCNVAEHEKLILLAQLKPEKDSDEAVTYSLGKFGQRALDFYSIHVTKESTHPVKPLAQIAGNRYASHPVGKALSDACMGTIASFLSKYQDIIIEHQKVVKGNQKRLESLRELAGKENLEYPSVTLPPQPHTKEGVDAYNEVIARVRMWVNLNLWQKLKLSRDDAKPLLRLKGFPSFPLVERQANEVDWWDMVCNVKKLINEKKEDGKVFWQNLAGYKRQEALRPYLSSEEDRKKGKKFARYQLGDLLNHLEKKHGEDWGKVYDEAWERIDKKVEGLSKHIKLEEERRSEDAQSKAALTDWLRAKASFVIEGLKEADKDEFCRCELKLQKWYGDLRGKPFAIEAENSILDISGFSKQYNCAFIWQKDGVKKLNLYLIINYFKGGKLRFKKIKPEAFEANRFYTVINKKSGEIVPMEVNFNFDDPNLIILPLAFGKRQGREFIWNDLLSLETGSLKLANGRVIEKTLYNRRTRQDEPALFVALTFERREVLDSSNIKPMNLIGVDRGENIPAVIALTDPEGCPLSRFKDSLGNPTHILRIGESYKEKQRTIQAKKEVEQRRAGGYSRKYASKAKNLADDMVRNTARDLLYYAVTQDAMLIFENLSRGFGRQGKRTFMAERQYTRMEDWLTAKLAYEGLPSKTYLSKTLAQYTSKTCSNCGFTITSADYDRVLEKLKKTATGWMTTINGKELKVEGQITYYNRYKRQNVVKDLSVELDRLSEESVNNDISSWTKGRSGEALSLLKKRFSHRPVQEKFVCLNCGFETHADEQAALNIARSWLFLRSQEYKKYQTNKTTGNTDKRAFVETWQSFYRKKLKEVWKPAV

SEQ ID NO: 42484 - protein, 978 aa, synthetic construct
  REGION 1..978: note = engineered CasX variant
QEIKRINKIRRRLVKDSNTKKAGKTGPMKTLLVRVMTPDLRERLENLRKKPENIPQPISNTSQANLNKLLTDYTEMKKAILHVYWEEFQKDPVGLMSRVAQPASKKIDQNKLKPEMDEKGNLTTAGFACSQCGQPLFVYKLEQVSEKGKAYTNYFGRCNVAEHEKLILLAQLKPEKDSDEAVTYSLGKFGQRALDFYSIHVTKESTHPVKPLAQIAGNRYASSPVGKALSDACMGTIASFLSKYQDIIIEHQKVVKGNQKRLESLRELAGKENLEYPSVTLPPQPHTKEGVDAYNEVIARVRMWVNLNLWQKLKLSRDDAKPLLRLKGFPSFPLVERQANEVDWWDMVCNVKKLINEKKEDGKVFWQNLAGYKRQEALRPYLSSEEDRKKGKKFARYQLGDLLNHLEKKHGEDWGKVYDEAWERIDKKVEGLSKHIKLEEERRSEDAQSKAALTDWLRAKASFVIEGLKEADKDEFCRCELKLQKWYGDLRGKPFAIEAENSILDISGFSKQYNCAFIWQKDGVKKLNLYLIINYFKGGKLRFKKIKPEAFEANRFYTVINKKSGEIVPMEVNFNFDDPNLIILPLAFGKRQGREFIWNDLLSLETGSLKLANGRVIEKTLYNRRTRQDEPALFVALTFERREVLDSSNIKPMNLIGVDRGENIPAVIALTDPEGCPLSRFKDSLGNPTHILRIGESYKEKQRTIQAKKEVEQRRAGGYSRKYASKAKNLADDMVRNTARDLLYYAVTQDAMLIFENLSRGFGRQGKRTFMAERQYTRMEDWLTAKLAYEGLPSKTYLSKTLAQYTSKTCSNCGFTITSADYDRVLEKLKKTATGWMTTINGKELKVEGQITYYNRYKRQNVVKDLSVELDRLSEESVNNDISSWTKGRSGEALSLLKKRFSHRPVQEKFVCLNCGFETHADEQAALNIARSWLFLRSQEYKKYQTNKTTGNTDKRAFVETWQSFYRKKLKEVWKPAV

SEQ ID NO: 42485 - protein, 978 aa, synthetic construct
  REGION 1..978: note = engineered CasX variant
QEIKRINKIRRRLVKDSNTKKAGKTGPMKTLLVRVMTPDLRERLENLRKKPENIPQPISNTSQANLNKLLTDYTEMKKAILHVYWEEFQKDPVGLMSRVAQPASKKIDQNKLKPEMDEKGNLTTAGFACSQCGQPLFVYKLEQVSEKGKAYTNYFGRCNVAEHEKLILLAQLKPEKDSDEAVTYSLGKFGQRALDFYSIHVTKESTHPVKPLAQIAGNRYASTPVGKALSDACMGTIASFLSKYQDIIIEHQKVVKGNQKRLESLRELAGKENLEYPSVTLPPQPHTKEGVDAYNEVIARVRMWVNLNLWQKLKLSRDDAKPLLRLKGFPSFPLVERQANEVDWWDMVCNVKKLINEKKEDGKVFWQNLAGYKRQEALRPYLSSEEDRKKGKKFARYQLGDLLNHLEKKHGEDWGKVYDEAWERIDKKVEGLSKHIKLEEERRSEDAQSKAALTDWLRAKASFVIEGLKEADKDEFCRCELKLQKWYGDLRGKPFAIEAENSILDISGFSKQYNCAFIWQKDGVKKLNLYLIINYFKGGKLRFKKIKPEAFEANRFYTVINKKSGEIVPMEVNFNFDDPNLIILPLAFGKRQGREFIWNDLLSLETGSLKLANGRVIEKTLYNRRTRQDEPALFVALTFERREVLDSSNIKPMNLIGVDRGENIPAVIALTDPEGCPLSRFKDSLGNPTHILRIGESYKEKQRTIQAKKEVEQRRAGGYSRKYASKAKNLADDMVRNTARDLLYYAVTQDAMLIFENLSRGFGRQGKRTFMAERQYTRMEDWLTAKLAYEGLPSKTYLSKTLAQYTSKTCSNCGFTITSADYDRVLEKLKKTATGWMTTINGKELKVEGQITYYNRYKRQNVVKDLSVELDRLSEESVNNDISSWTKGRSGEALSLLKKRFSHRPVQEKFVCLNCGFETHADEQAALNIARSWLFLRSQEYKKYQTNKTTGNTDKRAFVETWQSFYRKKLKEVWKPAV

SEQ ID NO: 42486 - protein, 978 aa, synthetic construct
  REGION 1..978: note = engineered CasX variant
QEIKRINKIRRRLVKDSNTKKAGKTGPMKTLLVRVMTPDLRERLENLRKKPENIPQPISNTSQANLNKLLTDYTEMKKAILHVYWEEFQKDPVGLMSRVAQPASKKIDQNKLKPEMDEKGNLTTAGFACSQCGQPLFVYKLEQVSEKGKAYTNYFGRCNVAEHEKLILLAQLKPEKDSDEAVTYSLGKFGQRALDFYSIHVTKESTHPVKPLAQIAGNRYASAPVGKALSDACMGTIASFLSKYQDIIIEHQKVVKGNQKRLESLRELAGKENLEYPSVTLPPQPHTKEGVDAYNEVIARVRMWVNLNLWQKLKLSRDDAKPLLRLKGFPSFPLVERQANEVDWWDMVCNVKKLINEKKEDGKVFWQNLAGYKRQEALRPYLSSEEDRKKGKKFARYQLGDLLNHLEKKHGEDWGKVYDEAWERIDKKVEGLSKHIKLEEERRSEDAQSKAALTDWLRAKASFVIEGLKEADKDEFCRCELKLQKWYGDLRGKPFAIEAENSILDISGFSKQYNCAFIWQKDGVKKLNLYLIINYFKGGKLRFKKIKPEAFEANRFYTVINKKSGEIVPMEVNFNFDDPNLIILPLAFGKRQGREFIWNDLLSLETGSLKLANGRVIEKTLYNRRTRQDEPALFVALTFERREVLDSSNIKPMNLIGVDRGENIPAVIALTDPEGCPLSRFKDSLGNPTHILRIGESYKEKQRTIQAKKEVEQRRAGGYSRKYASKAKNLADDMVRNTARDLLYYAVTQDAMLIFENLSRGFGRQGKRTFMAERQYTRMEDWLTAKLAYEGLPSKTYLSKTLAQYTSKTCSNCGFTITSADYDRVLEKLKKTATGWMTTINGKELKVEGQITYYNRYKRQNVVKDLSVELDRLSEESVNNDISSWTKGRSGEALSLLKKRFSHRPVQEKFVCLNCGFETHADEQAALNIARSWLFLRSQEYKKYQTNKTTGNTDKRAFVETWQSFYRKKLKEVWKPAV

SEQ ID NO: 42487 - protein, 978 aa, synthetic construct
  REGION 1..978: note = engineered CasX variant
QEIKRINKIRRRLVKDSNTKKAGKTGPMKTLLVRVMTPDLRERLENLRKKPENIPQPISNTSQANLNKLLTDYTEMKKAILHVYWEEFQKDPVGLMSRVAQPASKKIDQNKLKPEMDEKGNLTTAGFACSQCGQPLFVYKLEQVSEKGKAYTNYFGRCNVAEHEKLILLAQLKPEKDSDEAVTYSLGKFGQRALDFYSIHVTKESTHPVKPLAQIAGNRYASVPVGKALSDACMGTIASFLSKYQDIIIEHQKVVKGNQKRLESLRELAGKENLEYPSVTLPPQPHTKEGVDAYNEVIARVRMWVNLNLWQKLKLSRDDAKPLLRLKGFPSFPLVERQANEVDWWDMVCNVKKLINEKKEDGKVFWQNLAGYKRQEALRPYLSSEEDRKKGKKFARYQLGDLLNHLEKKHGEDWGKVYDEAWERIDKKVEGLSKHIKLEEERRSEDAQSKAALTDWLRAKASFVIEGLKEADKDEFCRCELKLQKWYGDLRGKPFAIEAENSILDISGFSKQYNCAFIWQKDGVKKLNLYLIINYFKGGKLRFKKIKPEAFEANRFYTVINKKSGEIVPMEVNFNFDDPNLIILPLAFGKRQGREFIWNDLLSLETGSLKLANGRVIEKTLYNRRTRQDEPALFVALTFERREVLDSSNIKPMNLIGVDRGENIPAVIALTDPEGCPLSRFKDSLGNPTHILRIGESYKEKQRTIQAKKEVEQRRAGGYSRKYASKAKNLADDMVRNTARDLLYYAVTQDAMLIFENLSRGFGRQGKRTFMAERQYTRMEDWLTAKLAYEGLPSKTYLSKTLAQYTSKTCSNCGFTITSADYDRVLEKLKKTATGWMTTINGKELKVEGQITYYNRYKRQNVVKDLSVELDRLSEESVNNDISSWTKGRSGEALSLLKKRFSHRPVQEKFVCLNCGFETHADEQAALNIARSWLFLRSQEYKKYQTNKTTGNTDKRAFVETWQSFYRKKLKEVWKPAV

SEQ ID NO: 42488 - protein, 978 aa, synthetic construct
  REGION 1..978: note = engineered CasX variant
QEIKRINKIRRRLVKDSNTKKAGKTGPMKTLLVRVMTPDLRERLENLRKKPENIPQPISNTSQANLNKLLTDYTEMKKAILHVYWEEFQKDPVGLMSRVAQPASKKIDQNKLKPEMDEKGNLTTAGFACSQCGQPLFVYKLEQVSEKGKAYTNYFGRCNVAEHEKLIKLAQLKPEKDSDEAVTYSLGKFGQRALDFYSIHVTKESTHPVKPLAQIAGNRYASGPVGKALSDACMGTIASFLSKYQDIIIEHQKVVKGNQKRLESLRELAGKENLEYPSVTLPPQPHTKEGVDAYNEVIARVRMWVNLNLWQKLKLSRDDAKPLLRLKGFPSFPLVERQANEVDWWDMVCNVKKLINEKKEDGKVFWQNLAGYKRQEALRPYLSSEEDRKKGKKFARYQLGDLLNHLEKKHGEDWGKVYDEAWERIDKKVEGLSKHIKLEEERRSEDAQSKAALTDWLRAKASFVIEGLKEADKDEFCRCELKLQKWYGDLRGKPFAIEAENSILDISGFSKQYNCAFIWQKDGVKKLNLYLIINYFKGGKLRFKKIKPEAFEANRFYTVINKKSGEIVPMEVNFNFDDPNLIILPLAFGKRQGREFIWNDLLSLETGSLKLANGRVIEKTLYNRRTRQDEPALFVALTFERREVLDSSNIKPMNLIGVDRGENIPAVIALTDPEGCPLSRFKDSLGNPTHILRIGESYKEKQRTIQAKKEVEQRRAGGYSRKYASKAKNLADDMVRNTARDLLYYAVTQDAMLIFENLSRGFGRQGKRTFMAERQYTRMEDWLTAKLAYEGLPSKTYLSKTLAQYTSKTCSNCGFTITSADYDRVLEKLKKTATGWMTTINGKELKVEGQITYYNRYKRQNVVKDLSVELDRLSEESVNNDISSWTKGRSGEALSLLKKRFSHRPVQEKFVCLNCGFETHADEQAALNIARSWLFLRSQEYKKYQTNKTTGNTDKRAFVETWQSFYRKKLKEVWKPAV

SEQ ID NO: 42489 - protein, 977 aa, synthetic construct
  REGION 1..977: note = engineered CasX variant
QEIKRINKIRRRLVKDSNTKKAGKTGPMKTLLVRVMTPDLRERLENLRKKPENIPQPISNTSQANLNKLLTDYTEMKKAILHVYWEEFQKDPVGLMSRVAQPASKKIDQNKLKPEMDEKGNLTTAGFACSQCGQPLFVYKLEQVSEKGKAYTNYFGRCNVAEHEKLILLAQLKPEKDSDEAVTYSLGKFGQRALDFYSIHVTKESTHPVKPLAQIAGNRYASPVGKALSDACMGTIASFLSKYQDIIIEHQKVVKGNQKRLESLRELAGKENLEYPSVTLPPQPHTKEGVDAYNEVIARVRMWVNLNLWQKLKLSRDDAKPLLRLKGFPSFPLVERQANEVDWWDMVCNVKKLINEKKEDGKVFWQNLAGYKRQEALRPYLSSEEDRKKGKKFARYQLGDLLNHLEKKHGEDWGKVYDEAWERIDKKVEGLSKHIKLEEERRSEDAQSKAALTDWLRAKASFVIEGLKEADKDEFCRCELKLQKWYGDLRGKPFAIEAENSILDISGFSKQYNCAFIWQKDGVKKLNLYLIINYFKGGKLRFKKIKPEAFEANRFYTVINKKSGEIVPMEVNFNFDDPNLIILPLAFGKRQGREFIWNDLLSLETGSLKLANGRVIEKTLYNRRTRQDEPALFVALTFERREVLDSSNIKPMNLIGVDRGENIPAVIALTDPEGCPLSRFKDSLGNPTHILRIGESYKEKQRTIQAKKEVEQRRAGGYSRKYASKAKNLADDMVRNTARDLLYYAVTQDAMLIFENLSRGFGRQGKRTFMAERQYTRMEDWLTAKLAYEGLPSKTYLSKTLAQYTSKTCSNCGFTITSADYDRVLEKLKKTATGWMTTINGKELKVEGQITYYNRYKRQNVVKDLSVELDRLSEESVNNDISSWTKGRSGEALSLLKKRFSHRPVQEKFVCLNCGFETHADEQAALNIARSWLFLRSQEYKKYQTNKTTGNTDKRAFVETWQSFYRKKLKEVWKPAV

SEQ ID NO: 42490 - protein, 978 aa, synthetic construct
  REGION 1..978: note = engineered CasX variant
QEIKRINKIRRRLVKDSNTKKAGKTGPMKTLLVRVMTPDLRERLENLRKKPENIPQPISNTSQANLNKLLTDYTEMKKAILHVYWEEFQKDPVGLMSRVAQPASKKIDQNKLKPEMDEKGNLTTAGFACSQCGQPLFVYKLEQVSEKGKAYTNYFGRCNVAEHEKLILLAQLKPEKDSDEAVTYSLGKFGQRALDFYSIHVTKESTHPVKPLAQIAGNRYASYPVGKALSDACMGTIASFLSKYQDIIIEHQKVVKGNQKRLESLRELAGKENLEYPSVTLPPQPHTKEGVDAYNEVIARVRMWVNLNLWQKLKLSRDDAKPLLRLKGFPSFPLVERQANEVDWWDMVCNVKKLINEKKEDGKVFWQNLAGYKRQEALRPYLSSEEDRKKGKKFARYQLGDLLWHLEKKHGEDWGKVYDEAWERIDKKVEGLSKHIKLEEERRSEDAQSKAALTDWLRAKASFVIEGLKEADKDEFCRCELKLQKWYGDLRGKPFAIEAENSILDISGFSKQYNCAFIWQKDGVKKLNLYLIINYFKGGKLRFKKIKPEAFEANRFYTVINKKSGEIVPMEVNFNFDDPNLIILPLAFGKRQGREFIWNDLLSLETGSLKLANGRVIEKTLYNRRTRQDEPALFVALTFERREVLDSSNIKPMNLIGVDRGENIPAVIALTDPEGCPLSRFKDSLGNPTHILRIGESYKEKQRTIQAKKEVEQRRAGGYSRKYASKAKNLADDMVRNTARDLLYYAVTQDAMLIFENLSRGFGRQGKRTFMAERQYTRMEDWLTAKLAYEGLPSKTYLSKTLAQYTSKTCSNCGFTITSADYDRVLEKLKKTATGWMTTINGKELKVEGQITYYNRYKRQNVVKDLSVELDRLSEESVNNDISSWTKGRSGEALSLLKKRFSHRPVQEKFVCLNCGFETHADEQAALNIARSWLFLRSQEYKKYQTNKTTGNTDKRAFVETWQSFYRKKLKEVWKPAV

SEQ ID NO: 42491 - protein, 978 aa, synthetic construct
  REGION 1..978: note = engineered CasX variant
QEIKRINKIRRRLVKDSNTKKAGKTGPMKTLLVRVMTPDLRERLENLRKKPENIPQPISNTSQANLNKLLTDYTEMKKAILHVYWEEFQKDPVGLMSRVAQPASKKIDQNKLKPEMDEKGNLTTAGFACSQCGQPLFVYKLEQVSEKGKAYTNYFGRCNVAEHEKLILLAQLKPEKDSDEAVTYSLGKFGQRALDFYSIHVTKESTHPVKPLAQIAGNRYASHPVGKALSDACMGTIASFLSKYQDIIIEHQKVVKGNQKRLESLRELAGKENLEYPSVTLPPQPHTKEGVDAYNEVIARVRMWVNLNLWQKLKLSRDDAKPLLRLKGFPSFPLVERQANEVDWWDMVCNVKKLINEKKEDGKVFWQNLAGYKRQEALRPYLSSEEDRKKGKKFARYQLGDLLWHLEKKHGEDWGKVYDEAWERIDKKVEGLSKHIKLEEERRSEDAQSKAALTDWLRAKASFVIEGLKEADKDEFCRCELKLQKWYGDLRGKPFAIEAENSILDISGFSKQYNCAFIWQKDGVKKLNLYLIINYFKGGKLRFKKIKPEAFEANRFYTVINKKSGEIVPMEVNFNFDDPNLIILPLAFGKRQGREFIWNDLLSLETGSLKLANGRVIEKTLYNRRTRQDEPALFVALTFERREVLDSSNIKPMNLIGVDRGENIPAVIALTDPEGCPLSRFKDSLGNPTHILRIGESYKEKQRTIQAKKEVEQRRAGGYSRKYASKAKNLADDMVRNTARDLLYYAVTQDAMLIFENLSRGFGRQGKRTFMAERQYTRMEDWLTAKLAYEGLPSKTYLSKTLAQYTSKTCSNCGFTITSADYDRVLEKLKKTATGWMTTINGKELKVEGQITYYNRYKRQNVVKDLSVELDRLSEESVNNDISSWTKGRSGEALSLLKKRFSHRPVQEKFVCLNCGFETHADEQAALNIARSWLFLRSQEYKKYQTNKTTGNTDKRAFVETWQSFYRKKLKEVWKPAV

SEQ ID NO: 42492 - protein, 978 aa, synthetic construct
  REGION 1..978: note = engineered CasX variant
QEIKRINKIRRRLVKDSNTKKAGKTGPMKTLLVRVMTPDLRERLENLRKKPENIPQPISNTSQANLNKLLTDYTEMKKAILHVYWEEFQKDPVGLMSRVAQPASKKIDQNKLKPEMDEKGNLTTAGFACSQCGQPLFVYKLEQVSEKGKAYTNYFGRCNVAEHEKLILLAQLKPEKDSDEAVTYSLGKFGQRALDFYSIHVTKESTHPVKPLAQIAGNRYASSPVGKALSDACMGTIASFLSKYQDIIIEHQKVVKGNQKRLESLRELAGKENLEYPSVTLPPQPHTKEGVDAYNEVIARVRMWVNLNLWQKLKLSRDDAKPLLRLKGFPSFPLVERQANEVDWWDMVCNVKKLINEKKEDGKVFWQNLAGYKRQEALRPYLSSEEDRKKGKKFARYQLGDLLWHLEKKHGEDWGKVYDEAWERIDKKVEGLSKHIKLEEERRSEDAQSKAALTDWLRAKASFVIEGLKEADKDEFCRCELKLQKWYGDLRGKPFAIEAENSILDISGFSKQYNCAFIWQKDGVKKLNLYLIINYFKGGKLRFKKIKPEAFEANRFYTVINKKSGEIVPMEVNFNFDDPNLIILPLAFGKRQGREFIWNDLLSLETGSLKLANGRVIEKTLYNRRTRQDEPALFVALTFERREVLDSSNIKPMNLIGVDRGENIPAVIALTDPEGCPLSRFKDSLGNPTHILRIGESYKEKQRTIQAKKEVEQRRAGGYSRKYASKAKNLADDMVRNTARDLLYYAVTQDAMLIFENLSRGFGRQGKRTFMAERQYTRMEDWLTAKLAYEGLPSKTYLSKTLAQYTSKTCSNCGFTITSADYDRVLEKLKKTATGWMTTINGKELKVEGQITYYNRYKRQNVVKDLSVELDRLSEESVNNDISSWTKGRSGEALSLLKKRFSHRPVQEKFVCLNCGFETHADEQAALNIARSWLFLRSQEYKKYQTNKTTGNTDKRAFVETWQSFYRKKLKEVWKPAV

SEQ ID NO: 42493 - protein, 978 aa, synthetic construct
  REGION 1..978: note = engineered CasX variant
QEIKRINKIRRRLVKDSNTKKAGKTGPMKTLLVRVMTPDLRERLENLRKKPENIPQPISNTSQANLNKLLTDYTEMKKAILHVYWEEFQKDPVGLMSRVAQPASKKIDQNKLKPEMDEKGNLTTAGFACSQCGQPLFVYKLEQVSEKGKAYTNYFGRCNVAEHEKLILLAQLKPEKDSDEAVTYSLGKFGQRALDFYSIHVTKESTHPVKPLAQIAGNRYASTPVGKALSDACMGTIASFLSKYQDIIIEHQKVVKGNQKRLESLRELAGKENLEYPSVTLPPQPHTKEGVDAYNEVIARVRMWVNLNLWQKLKLSRDDAKPLLRLKGFPSFPLVERQANEVDWWDMVCNVKKLINEKKEDGKVFWQNLAGYKRQEALRPYLSSEEDRKKGKKFARYQLGDLLWHLEKKHGEDWGKVYDEAWERIDKKVEGLSKHIKLEEERRSEDAQSKAALTDWLRAKASFVIEGLKEADKDEFCRCELKLQKWYGDLRGKPFAIEAENSILDISGFSKQYNCAFIWQKDGVKKLNLYLIINYFKGGKLRFKKIKPEAFEANRFYTVINKKSGEIVPMEVNFNFDDPNLIILPLAFGKRQGREFIWNDLLSLETGSLKLANGRVIEKTLYNRRTRQDEPALFVALTFERREVLDSSNIKPMNLIGVDRGENIPAVIALTDPEGCPLSRFKDSLGNPTHILRIGESYKEKQRTIQAKKEVEQRRAGGYSRKYASKAKNLADDMVRNTARDLLYYAVTQDAMLIFENLSRGFGRQGKRTFMAERQYTRMEDWLTAKLAYEGLPSKTYLSKTLAQYTSKTCSNCGFTITSADYDRVLEKLKKTATGWMTTINGKELKVEGQITYYNRYKRQNVVKDLSVELDRLSEESVNNDISSWTKGRSGEALSLLKKRFSHRPVQEKFVCLNCGFETHADEQAALNIARSWLFLRSQEYKKYQTNKTTGNTDKRAFVETWQSFYRKKLKEVWKPAV

SEQ ID NO: 42494 - protein, 978 aa, synthetic construct
  REGION 1..978: note = engineered CasX variant
QEIKRINKIRRRLVKDSNTKKAGKTGPMKTLLVRVMTPDLRERLENLRKKPENIPQPISNTSQANLNKLLTDYTEMKKAILHVYWEEFQKDPVGLMSRVAQPASKKIDQNKLKPEMDEKGNLTTAGFACSQCGQPLFVYKLEQVSEKGKAYTNYFGRCNVAEHEKLILLAQLKPEKDSDEAVTYSLGKFGQRALDFYSIHVTKESTHPVKPLAQIAGNRYASAPVGKALSDACMGTIASFLSKYQDIIIEHQKVVKGNQKRLESLRELAGKENLEYPSVTLPPQPHTKEGVDAYNEVIARVRMWVNLNLWQKLKLSRDDAKPLLRLKGFPSFPLVERQANEVDWWDMVCNVKKLINEKKEDGKVFWQNLAGYKRQEALRPYLSSEEDRKKGKKFARYQLGDLLWHLEKKHGEDWGKVYDEAWERIDKKVEGLSKHIKLEEERRSEDAQSKAALTDWLRAKASFVIEGLKEADKDEFCRCELKLQKWYGDLRGKPFAIEAENSILDISGFSKQYNCAFIWQKDGVKKLNLYLIINYFKGGKLRFKKIKPEAFEANRFYTVINKKSGEIVPMEVNFNFDDPNLIILPLAFGKRQGREFIWNDLLSLETGSLKLANGRVIEKTLYNRRTRQDEPALFVALTFERREVLDSSNIKPMNLIGVDRGENIPAVIALTDPEGCPLSRFKDSLGNPTHILRIGESYKEKQRTIQAKKEVEQRRAGGYSRKYASKAKNLADDMVRNTARDLLYYAVTQDAMLIFENLSRGFGRQGKRTFMAERQYTRMEDWLTAKLAYEGLPSKTYLSKTLAQYTSKTCSNCGFTITSADYDRVLEKLKKTATGWMTTINGKELKVEGQITYYNRYKRQNVVKDLSVELDRLSEESVNNDISSWTKGRSGEALSLLKKRFSHRPVQEKFVCLNCGFETHADEQAALNIARSWLFLRSQEYKKYQTNKTTGNTDKRAFVETWQSFYRKKLKEVWKPAV

SEQ ID NO: 42495 - protein, 978 aa, synthetic construct
  REGION 1..978: note = engineered CasX variant
QEIKRINKIRRRLVKDSNTKKAGKTGPMKTLLVRVMTPDLRERLENLRKKPENIPQPISNTSQANLNKLLTDYTEMKKAILHVYWEEFQKDPVGLMSRVAQPASKKIDQNKLKPEMDEKGNLTTAGFACSQCGQPLFVYKLEQVSEKGKAYTNYFGRCNVAEHEKLILLAQLKPEKDSDEAVTYSLGKFGQRALDFYSIHVTKESTHPVKPLAQIAGNRYASVPVGKALSDACMGTIASFLSKYQDIIIEHQKVVKGNQKRLESLRELAGKENLEYPSVTLPPQPHTKEGVDAYNEVIARVRMWVNLNLWQKLKLSRDDAKPLLRLKGFPSFPLVERQANEVDWWDMVCNVKKLINEKKEDGKVFWQNLAGYKRQEALRPYLSSEEDRKKGKKFARYQLGDLLWHLEKKHGEDWGKVYDEAWERIDKKVEGLSKHIKLEEERRSEDAQSKAALTDWLRAKASFVIEGLKEADKDEFCRCELKLQKWYGDLRGKPFAIEAENSILDISGFSKQYNCAFIWQKDGVKKLNLYLIINYFKGGKLRFKKIKPEAFEANRFYTVINKKSGEIVPMEVNFNFDDPNLIILPLAFGKRQGREFIWNDLLSLETGSLKLANGRVIEKTLYNRRTRQDEPALFVALTFERREVLDSSNIKPMNLIGVDRGENIPAVIALTDPEGCPLSRFKDSLGNPTHILRIGESYKEKQRTIQAKKEVEQRRAGGYSRKYASKAKNLADDMVRNTARDLLYYAVTQDAMLIFENLSRGFGRQGKRTFMAERQYTRMEDWLTAKLAYEGLPSKTYLSKTLAQYTSKTCSNCGFTITSADYDRVLEKLKKTATGWMTTINGKELKVEGQITYYNRYKRQNVVKDLSVELDRLSEESVNNDISSWTKGRSGEALSLLKKRFSHRPVQEKFVCLNCGFETHADEQAALNIARSWLFLRSQEYKKYQTNKTTGNTDKRAFVETWQSFYRKKLKEVWKPAV

SEQ ID NO: 42496 - protein, 978 aa, synthetic construct
  REGION 1..978: note = engineered CasX variant
QEIKRINKIRRRLVKDSNTKKAGKTGPMKTLLVRVMTPDLRERLENLRKKPENIPQPISNTSQANLNKLLTDYTEMKKAILHVYWEEFQKDPVGLMSRVAQPASKKIDQNKLKPEMDEKGNLTTAGFACSQCGQPLFVYKLEQVSEKGKAYTNYFGRCNVAEHEKLIKLAQLKPEKDSDEAVTYSLGKFGQRALDFYSIHVTKESTHPVKPLAQIAGNRYASGPVGKALSDACMGTIASFLSKYQDIIIEHQKVVKGNQKRLESLRELAGKENLEYPSVTLPPQPHTKEGVDAYNEVIARVRMWVNLNLWQKLKLSRDDAKPLLRLKGFPSFPLVERQANEVDWWDMVCNVKKLINEKKEDGKVFWQNLAGYKRQEALRPYLSSEEDRKKGKKFARYQLGDLLWHLEKKHGEDWGKVYDEAWERIDKKVEGLSKHIKLEEERRSEDAQSKAALTDWLRAKASFVIEGLKEADKDEFCRCELKLQKWYGDLRGKPFAIEAENSILDISGFSKQYNCAFIWQKDGVKKLNLYLIINYFKGGKLRFKKIKPEAFEANRFYTVINKKSGEIVPMEVNFNFDDPNLIILPLAFGKRQGREFIWNDLLSLETGSLKLANGRVIEKTLYNRRTRQDEPALFVALTFERREVLDSSNIKPMNLIGVDRGENIPAVIALTDPEGCPLSRFKDSLGNPTHILRIGESYKEKQRTIQAKKEVEQRRAGGYSRKYASKAKNLADDMVRNTARDLLYYAVTQDAMLIFENLSRGFGRQGKRTFMAERQYTRMEDWLTAKLAYEGLPSKTYLSKTLAQYTSKTCSNCGFTITSADYDRVLEKLKKTATGWMTTINGKELKVEGQITYYNRYKRQNVVKDLSVELDRLSEESVNNDISSWTKGRSGEALSLLKKRFSHRPVQEKFVCLNCGFETHADEQAALNIARSWLFLRSQEYKKYQTNKTTGNTDKRAFVETWQSFYRKKLKEVWKPAV

SEQ ID NO: 42497 - protein, 977 aa, synthetic construct
  REGION 1..977: note = engineered CasX variant
QEIKRINKIRRRLVKDSNTKKAGKTGPMKTLLVRVMTPDLRERLENLRKKPENIPQPISNTSQANLNKLLTDYTEMKKAILHVYWEEFQKDPVGLMSRVAQPASKKIDQNKLKPEMDEKGNLTTAGFACSQCGQPLFVYKLEQVSEKGKAYTNYFGRCNVAEHEKLILLAQLKPEKDSDEAVTYSLGKFGQRALDFYSIHVTKESTHPVKPLAQIAGNRYASPVGKALSDACMGTIASFLSKYQDIIIEHQKVVKGNQKRLESLRELAGKENLEYPSVTLPPQPHTKEGVDAYNEVIARVRMWVNLNLWQKLKLSRDDAKPLLRLKGFPSFPLVERQANEVDWWDMVCNVKKLINEKKEDGKVFWQNLAGYKRQEALRPYLSSEEDRKKGKKFARYQLGDLLWHLEKKHGEDWGKVYDEAWERIDKKVEGLSKHIKLEEERRSEDAQSKAALTDWLRAKASFVIEGLKEADKDEFCRCELKLQKWYGDLRGKPFAIEAENSILDISGFSKQYNCAFIWQKDGVKKLNLYLIINYFKGGKLRFKKIKPEAFEANRFYTVINKKSGEIVPMEVNFNFDDPNLIILPLAFGKRQGREFIWNDLLSLETGSLKLANGRVIEKTLYNRRTRQDEPALFVALTFERREVLDSSNIKPMNLIGVDRGENIPAVIALTDPEGCPLSRFKDSLGNPTHILRIGESYKEKQRTIQAKKEVEQRRAGGYSRKYASKAKNLADDMVRNTARDLLYYAVTQDAMLIFENLSRGFGRQGKRTFMAERQYTRMEDWLTAKLAYEGLPSKTYLSKTLAQYTSKTCSNCGFTITSADYDRVLEKLKKTATGWMTTINGKELKVEGQITYYNRYKRQNVVKDLSVELDRLSEESVNNDISSWTKGRSGEALSLLKKRFSHRPVQEKFVCLNCGFETHADEQAALNIARSWLFLRSQEYKKYQTNKTTGNTDKRAFVETWQSFYRKKLKEVWKPAV

SEQ ID NO: 42498 - protein, 978 aa, synthetic construct
  REGION 1..978: note = engineered CasX variant
QEIKRINKIRRRLVKDSNTKKAGKTGPMKTLLVRVMTPDLRERLENLRKKPENIPQPISNTSQANLNKLLTDYTEMKKAILHVYWEEFQKDPVGLMSRVAQPASKKIDQNKLKPEMDEKGNLTTAGFACSQCGQPLFVYKLEQVSEKGKAYTNYFGRCNVAEHEKLILLAQLKPEKDSDEAVTYSLGKFGQRALDFYSIHVTKESTHPVKPLAQIAGNRYASYPVGKALSDACMGTIASFLSKYQDIIIEHQKVVKGNQKRLESLRELAGKENLEYPSVTLPPQPHTKEGVDAYNEVIARVRMWVNLNLWQKLKLSRDDAKPLLRLKGFPSFPLVERQANEVDWWDMVCNVKKLINEKKEDGKVFWQNLAGYKRQEALRPYLSSEEDRKKGKKFARYQLGDLLLHLYKKHGEDWGKVYDEAWERIDKKVEGLSKHIKLEEERRSEDAQSKAALTDWLRAKASFVIEGLKEADKDEFCRCELKLQKWYGDLRGKPFAIEAENSILDISGFSKQYNCAFIWQKDGVKKLNLYLIINYFKGGKLRFKKIKPEAFEANRFYTVINKKSGEIVPMEVNFNFDDPNLIILPLAFGKRQGREFIWNDLLSLETGSLKLANGRVIEKTLYNRRTRQDEPALFVALTFERREVLDSSNIKPMNLIGVDRGENIPAVIALTDPEGCPLSRFKDSLGNPTHILRIGESYKEKQRTIQAKKEVEQRRAGGYSRKYASKAKNLADDMVRNTARDLLYYAVTQDAMLIFENLSRGFGRQGKRTFMAERQYTRMEDWLTAKLAYEGLPSKTYLSKTLAQYTSKTCSNCGFTITSADYDRVLEKLKKTATGWMTTINGKELKVEGQITYYNRYKRQNVVKDLSVELDRLSEESVNNDISSWTKGRSGEALSLLKKRFSHRPVQEKFVCLNCGFETHADEQAALNIARSWLFLRSQEYKKYQTNKTTGNTDKRAFVETWQSFYRKKLKEVWKPAV

SEQ ID NO: 42499 - protein, 978 aa, synthetic construct
  REGION 1..978: note = engineered CasX variant
QEIKRINKIRRRLVKDSNTKKAGKTGPMKTLLVRVMTPDLRERLENLRKKPENIPQPISNTSQANLNKLLTDYTEMKKAILHVYWEEFQKDPVGLMSRVAQPASKKIDQNKLKPEMDEKGNLTTAGFACSQCGQPLFVYKLEQVSEKGKAYTNYFGRCNVAEHEKLILLAQLKPEKDSDEAVTYSLGKFGQRALDFYSIHVTKESTHPVKPLAQIAGNRYASHPVGKALSDACMGTIASFLSKYQDIIIEHQKVVKGNQKRLESLRELAGKENLEYPSVTLPPQPHTKEGVDAYNEVIARVRMWVNLNLWQKLKLSRDDAKPLLRLKGFPSFPLVERQANEVDWWDMVCNVKKLINEKKEDGKVFWQNLAGYKRQEALRPYLSSEEDRKKGKKFARYQLGDLLLHLYKKHGEDWGKVYDEAWERIDKKVEGLSKHIKLEEERRSEDAQSKAALTDWLRAKASFVIEGLKEADKDEFCRCELKLQKWYGDLRGKPFAIEAENSILDISGFSKQYNCAFIWQKDGVKKLNLYLIINYFKGGKLRFKKIKPEAFEANRFYTVINKKSGEIVPMEVNFNFDDPNLIILPLAFGKRQGREFIWNDLLSLETGSLKLANGRVIEKTLYNRRTRQDEPALFVALTFERREVLDSSNIKPMNLIGVDRGENIPAVIALTDPEGCPLSRFKDSLGNPTHILRIGESYKEKQRTIQAKKEVEQRRAGGYSRKYASKAKNLADDMVRNTARDLLYYAVTQDAMLIFENLSRGFGRQGKRTFMAERQYTRMEDWLTAKLAYEGLPSKTYLSKTLAQYTSKTCSNCGFTITSADYDRVLEKLKKTATGWMTTINGKELKVEGQITYYNRYKRQNVVKDLSVELDRLSEESVNNDISSWTKGRSGEALSLLKKRFSHRPVQEKFVCLNCGFETHADEQAALNIARSWLFLRSQEYKKYQTNKTTGNTDKRAFVETWQSFYRKKLKEVWKPAV

SEQ ID NO: 42500 - protein, 978 aa, synthetic construct
  REGION 1..978: note = engineered CasX variant
QEIKRINKIRRRLVKDSNTKKAGKTGPMKTLLVRVMTPDLRERLENLRKKPENIPQPISNTSQANLNKLLTDYTEMKKAILHVYWEEFQKDPVGLMSRVAQPASKKIDQNKLKPEMDEKGNLTTAGFACSQCGQPLFVYKLEQVSEKGKAYTNYFGRCNVAEHEKLILLAQLKPEKDSDEAVTYSLGKFGQRALDFYSIHVTKESTHPVKPLAQIAGNRYASSPVGKALSDACMGTIASFLSKYQDIIIEHQKVVKGNQKRLESLRELAGKENLEYPSVTLPPQPHTKEGVDAYNEVIARVRMWVNLNLWQKLKLSRDDAKPLLRLKGFPSFPLVERQANEVDWWDMVCNVKKLINEKKEDGKVFWQNLAGYKRQEALRPYLSSEEDRKKGKKFARYQLGDLLLHLYKKHGEDWGKVYDEAWERIDKKVEGLSKHIKLEEERRSEDAQSKAALTDWLRAKASFVIEGLKEADKDEFCRCELKLQKWYGDLRGKPFAIEAENSILDISGFSKQYNCAFIWQKDGVKKLNLYLIINYFKGGKLRFKKIKPEAFEANRFYTVINKKSGEIVPMEVNFNFDDPNLIILPLAFGKRQGREFIWNDLLSLETGSLKLANGRVIEKTLYNRRTRQDEPALFVALTFERREVLDSSNIKPMNLIGVDRGENIPAVIALTDPEGCPLSRFKDSLGNPTHILRIGESYKEKQRTIQAKKEVEQRRAGGYSRKYASKAKNLADDMVRNTARDLLYYAVTQDAMLIFENLSRGFGRQGKRTFMAERQYTRMEDWLTAKLAYEGLPSKTYLSKTLAQYTSKTCSNCGFTITSADYDRVLEKLKKTATGWMTTINGKELKVEGQITYYNRYKRQNVVKDLSVELDRLSEESVNNDISSWTKGRSGEALSLLKKRFSHRPVQEKFVCLNCGFETHADEQAALNIARSWLFLRSQEYKKYQTNKTTGNTDKRAFVETWQSFYRKKLKEVWKPAV

SEQ ID NO: 42501 - protein, 978 aa, synthetic construct
  REGION 1..978: note = engineered CasX variant
QEIKRINKIRRRLVKDSNTKKAGKTGPMKTLLVRVMTPDLRERLENLRKKPENIPQPISNTSQANLNKLLTDYTEMKKAILHVYWEEFQKDPVGLMSRVAQPASKKIDQNKLKPEMDEKGNLTTAGFACSQCGQPLFVYKLEQVSEKGKAYTNYFGRCNVAEHEKLILLAQLKPEKDSDEAVTYSLGKFGQRALDFYSIHVTKESTHPVKPLAQIAGNRYASTPVGKALSDACMGTIASFLSKYQDIIIEHQKVVKGNQKRLESLRELAGKENLEYPSVTLPPQPHTKEGVDAYNEVIARVRMWVNLNLWQKLKLSRDDAKPLLRLKGFPSFPLVERQANEVDWWDMVCNVKKLINEKKEDGKVFWQNLAGYKRQEALRPYLSSEEDRKKGKKFARYQLGDLLLHLYKKHGEDWGKVYDEAWERIDKKVEGLSKHIKLEEERRSEDAQSKAALTDWLRAKASFVIEGLKEADKDEFCRCELKLQKWYGDLRGKPFAIEAENSILDISGFSKQYNCAFIWQKDGVKKLNLYLIINYFKGGKLRFKKIKPEAFEANRFYTVINKKSGEIVPMEVNFNFDDPNLIILPLAFGKRQGREFIWNDLLSLETGSLKLANGRVIEKTLYNRRTRQDEPALFVALTFERREVLDSSNIKPMNLIGVDRGENIPAVIALTDPEGCPLSRFKDSLGNPTHILRIGESYKEKQRTIQAKKEVEQRRAGGYSRKYASKAKNLADDMVRNTARDLLYYAVTQDAMLIFENLSRGFGRQGKRTFMAERQYTRMEDWLTAKLAYEGLPSKTYLSKTLAQYTSKTCSNCGFTITSADYDRVLEKLKKTATGWMTTINGKELKVEGQITYYNRYKRQNVVKDLSVELDRLSEESVNNDISSWTKGRSGEALSLLKKRFSHRPVQEKFVCLNCGFETHADEQAALNIARSWLFLRSQEYKKYQTNKTTGNTDKRAFVETWQSFYRKKLKEVWKPAV

SEQ ID NO: 42502 - protein, 978 aa, synthetic construct
  REGION 1..978: note = engineered CasX variant
QEIKRINKIRRRLVKDSNTKKAGKTGPMKTLLVRVMTPDLRERLENLRKKPENIPQPISNTSQANLNKLLTDYTEMKKAILHVYWEEFQKDPVGLMSRVAQPASKKIDQNKLKPEMDEKGNLTTAGFACSQCGQPLFVYKLEQVSEKGKAYTNYFGRCNVAEHEKLILLAQLKPEKDSDEAVTYSLGKFGQRALDFYSIHVTKESTHPVKPLAQIAGNRYASAPVGKALSDACMGTIASFLSKYQDIIIEHQKVVKGNQKRLESLRELAGKENLEYPSVTLPPQPHTKEGVDAYNEVIARVRMWVNLNLWQKLKLSRDDAKPLLRLKGFPSFPLVERQANEVDWWDMVCNVKKLINEKKEDGKVFWQNLAGYKRQEALRPYLSSEEDRKKGKKFARYQLGDLLLHLYKKHGEDWGKVYDEAWERIDKKVEGLSKHIKLEEERRSEDAQSKAALTDWLRAKASFVIEGLKEADKDEFCRCELKLQKWYGDLRGKPFAIEAENSILDISGFSKQYNCAFIWQKDGVKKLNLYLIINYFKGGKLRFKKIKPEAFEANRFYTVINKKSGEIVPMEVNFNFDDPNLIILPLAFGKRQGREFIWNDLLSLETGSLKLANGRVIEKTLYNRRTRQDEPALFVALTFERREVLDSSNIKPMNLIGVDRGENIPAVIALTDPEGCPLSRFKDSLGNPTHILRIGESYKEKQRTIQAKKEVEQRRAGGYSRKYASKAKNLADDMVRNTARDLLYYAVTQDAMLIFENLSRGFGRQGKRTFMAERQYTRMEDWLTAKLAYEGLPSKTYLSKTLAQYTSKTCSNCGFTITSADYDRVLEKLKKTATGWMTTINGKELKVEGQITYYNRYKRQNVVKDLSVELDRLSEESVNNDISSWTKGRSGEALSLLKKRFSHRPVQEKFVCLNCGFETHADEQAALNIARSWLFLRSQEYKKYQTNKTTGNTDKRAFVETWQSFYRKKLKEVWKPAV

SEQ ID NO: 42503 - protein, 978 aa, synthetic construct
  REGION 1..978: note = engineered CasX variant
QEIKRINKIRRRLVKDSNTKKAGKTGPMKTLLVRVMTPDLRERLENLRKKPENIPQPISNTSQANLNKLLTDYTEMKKAILHVYWEEFQKDPVGLMSRVAQPASKKIDQNKLKPEMDEKGNLTTAGFACSQCGQPLFVYKLEQVSEKGKAYTNYFGRCNVAEHEKLILLAQLKPEKDSDEAVTYSLGKFGQRALDFYSIHVTKESTHPVKPLAQIAGNRYASVPVGKALSDACMGTIASFLSKYQDIIIEHQKVVKGNQKRLESLRELAGKENLEYPSVTLPPQPHTKEGVDAYNEVIARVRMWVNLNLWQKLKLSRDDAKPLLRLKGFPSFPLVERQANEVDWWDMVCNVKKLINEKKEDGKVFWQNLAGYKRQEALRPYLSSEEDRKKGKKFARYQLGDLLLHLYKKHGEDWGKVYDEAWERIDKKVEGLSKHIKLEEERRSEDAQSKAALTDWLRAKASFVIEGLKEADKDEFCRCELKLQKWYGDLRGKPFAIEAENSILDISGFSKQYNCAFIWQKDGVKKLNLYLIINYFKGGKLRFKKIKPEAFEANRFYTVINKKSGEIVPMEVNFNFDDPNLIILPLAFGKRQGREFIWNDLLSLETGSLKLANGRVIEKTLYNRRTRQDEPALFVALTFERREVLDSSNIKPMNLIGVDRGENIPAVIALTDPEGCPLSRFKDSLGNPTHILRIGESYKEKQRTIQAKKEVEQRRAGGYSRKYASKAKNLADDMVRNTARDLLYYAVTQDAMLIFENLSRGFGRQGKRTFMAERQYTRMEDWLTAKLAYEGLPSKTYLSKTLAQYTSKTCSNCGFTITSADYDRVLEKLKKTATGWMTTINGKELKVEGQITYYNRYKRQNVVKDLSVELDRLSEESVNNDISSWTKGRSGEALSLLKKRFSHRPVQEKFVCLNCGFETHADEQAALNIARSWLFLRSQEYKKYQTNKTTGNTDKRAFVETWQSFYRKKLKEVWKPAV

SEQ ID NO: 42504 - protein, 978 aa, synthetic construct
  REGION 1..978: note = engineered CasX variant
QEIKRINKIRRRLVKDSNTKKAGKTGPMKTLLVRVMTPDLRERLENLRKKPENIPQPISNTSQANLNKLLTDYTEMKKAILHVYWEEFQKDPVGLMSRVAQPASKKIDQNKLKPEMDEKGNLTTAGFACSQCGQPLFVYKLEQVSEKGKAYTNYFGRCNVAEHEKLIKLAQLKPEKDSDEAVTYSLGKFGQRALDFYSIHVTKESTHPVKPLAQIAGNRYASGPVGKALSDACMGTIASFLSKYQDIIIEHQKVVKGNQKRLESLRELAGKENLEYPSVTLPPQPHTKEGVDAYNEVIARVRMWVNLNLWQKLKLSRDDAKPLLRLKGFPSFPLVERQANEVDWWDMVCNVKKLINEKKEDGKVFWQNLAGYKRQEALRPYLSSEEDRKKGKKFARYQLGDLLLHLYKKHGEDWGKVYDEAWERIDKKVEGLSKHIKLEEERRSEDAQSKAALTDWLRAKASFVIEGLKEADKDEFCRCELKLQKWYGDLRGKPFAIEAENSILDISGFSKQYNCAFIWQKDGVKKLNLYLIINYFKGGKLRFKKIKPEAFEANRFYTVINKKSGEIVPMEVNFNFDDPNLIILPLAFGKRQGREFIWNDLLSLETGSLKLANGRVIEKTLYNRRTRQDEPALFVALTFERREVLDSSNIKPMNLIGVDRGENIPAVIALTDPEGCPLSRFKDSLGNPTHILRIGESYKEKQRTIQAKKEVEQRRAGGYSRKYASKAKNLADDMVRNTARDLLYYAVTQDAMLIFENLSRGFGRQGKRTFMAERQYTRMEDWLTAKLAYEGLPSKTYLSKTLAQYTSKTCSNCGFTITSADYDRVLEKLKKTATGWMTTINGKELKVEGQITYYNRYKRQNVVKDLSVELDRLSEESVNNDISSWTKGRSGEALSLLKKRFSHRPVQEKFVCLNCGFETHADEQAALNIARSWLFLRSQEYKKYQTNKTTGNTDKRAFVETWQSFYRKKLKEVWKPAV

SEQ ID NO: 42505 - protein, 977 aa, synthetic construct
  REGION 1..977: note = engineered CasX variant
QEIKRINKIRRRLVKDSNTKKAGKTGPMKTLLVRVMTPDLRERLENLRKKPENIPQPISNTSQANLNKLLTDYTEMKKAILHVYWEEFQKDPVGLMSRVAQPASKKIDQNKLKPEMDEKGNLTTAGFACSQCGQPLFVYKLEQVSEKGKAYTNYFGRCNVAEHEKLILLAQLKPEKDSDEAVTYSLGKFGQRALDFYSIHVTKESTHPVKPLAQIAGNRYASPVGKALSDACMGTIASFLSKYQDIIIEHQKVVKGNQKRLESLRELAGKENLEYPSVTLPPQPHTKEGVDAYNEVIARVRMWVNLNLWQKLKLSRDDAKPLLRLKGFPSFPLVERQANEVDWWDMVCNVKKLINEKKEDGKVFWQNLAGYKRQEALRPYLSSEEDRKKGKKFARYQLGDLLLHLYKKHGEDWGKVYDEAWERIDKKVEGLSKHIKLEEERRSEDAQSKAALTDWLRAKASFVIEGLKEADKDEFCRCELKLQKWYGDLRGKPFAIEAENSILDISGFSKQYNCAFIWQKDGVKKLNLYLIINYFKGGKLRFKKIKPEAFEANRFYTVINKKSGEIVPMEVNFNFDDPNLIILPLAFGKRQGREFIWNDLLSLETGSLKLANGRVIEKTLYNRRTRQDEPALFVALTFERREVLDSSNIKPMNLIGVDRGENIPAVIALTDPEGCPLSRFKDSLGNPTHILRIGESYKEKQRTIQAKKEVEQRRAGGYSRKYASKAKNLADDMVRNTARDLLYYAVTQDAMLIFENLSRGFGRQGKRTFMAERQYTRMEDWLTAKLAYEGLPSKTYLSKTLAQYTSKTCSNCGFTITSADYDRVLEKLKKTATGWMTTINGKELKVEGQITYYNRYKRQNVVKDLSVELDRLSEESVNNDISSWTKGRSGEALSLLKKRFSHRPVQEKFVCLNCGFETHADEQAALNIARSWLFLRSQEYKKYQTNKTTGNTDKRAFVETWQSFYRKKLKEVWKPAV

SEQ ID NO: 42506 - protein, 978 aa, synthetic construct
  REGION 1..978: note = engineered CasX variant
QEIKRINKIRRRLVKDSNTKKAGKTGPMKTLLVRVMTPDLRERLENLRKKPENIPQPISNTSQANLNKLLTDYTEMKKAILHVYWEEFQKDPVGLMSRVAQPASKKIDQNKLKPEMDEKGNLTTAGFACSQCGQPLFVYKLEQVSEKGKAYTNYFGRCNVAEHEKLILLAQLKPEKDSDEAVTYSLGKFGQRALDFYSIHVTKESTHPVKPLAQIAGNRYASYPVGKALSDACMGTIASFLSKYQDIIIEHQKVVKGNQKRLESLRELAGKENLEYPSVTLPPQPHTKEGVDAYNEVIARVRMWVNLNLWQKLKLSRDDAKPLLRLKGFPSFPLVERQANEVDWWDMVCNVKKLINEKKEDGKVFWQNLAGYKRQEALRPYLSSEEDRKKGKKFARYQLGDLLLHLEKKHPEDWGKVYDEAWERIDKKVEGLSKHIKLEEERRSEDAQSKAALTDWLRAKASFVIEGLKEADKDEFCRCELKLQKWYGDLRGKPFAIEAENSILDISGFSKQYNCAFIWQKDGVKKLNLYLIINYFKGGKLRFKKIKPEAFEANRFYTVINKKSGEIVPMEVNFNFDDPNLIILPLAFGKRQGREFIWNDLLSLETGSLKLANGRVIEKTLYNRRTRQDEPALFVALTFERREVLDSSNIKPMNLIGVDRGENIPAVIALTDPEGCPLSRFKDSLGNPTHILRIGESYKEKQRTIQAKKEVEQRRAGGYSRKYASKAKNLADDMVRNTARDLLYYAVTQDAMLIFENLSRGFGRQGKRTFMAERQYTRMEDWLTAKLAYEGLPSKTYLSKTLAQYTSKTCSNCGFTITSADYDRVLEKLKKTATGWMTTINGKELKVEGQITYYNRYKRQNVVKDLSVELDRLSEESVNNDISSWTKGRSGEALSLLKKRFSHRPVQEKFVCLNCGFETHADEQAALNIARSWLFLRSQEYKKYQTNKTTGNTDKRAFVETWQSFYRKKLKEVWKPAV

SEQ ID NO: 42507 - protein, 978 aa, synthetic construct
  REGION 1..978: note = engineered CasX variant
QEIKRINKIRRRLVKDSNTKKAGKTGPMKTLLVRVMTPDLRERLENLRKKPENIPQPISNTSQANLNKLLTDYTEMKKAILHVYWEEFQKDPVGLMSRVAQPASKKIDQNKLKPEMDEKGNLTTAGFACSQCGQPLFVYKLEQVSEKGKAYTNYFGRCNVAEHEKLILLAQLKPEKDSDEAVTYSLGKFGQRALDFYSIHVTKESTHPVKPLAQIAGNRYASHPVGKALSDACMGTIASFLSKYQDIIIEHQKVVKGNQKRLESLRELAGKENLEYPSVTLPPQPHTKEGVDAYNEVIARVRMWVNLNLWQKLKLSRDDAKPLLRLKGFPSFPLVERQANEVDWWDMVCNVKKLINEKKEDGKVFWQNLAGYKRQEALRPYLSSEEDRKKGKKFARYQLGDLLLHLEKKHPEDWGKVYDEAWERIDKKVEGLSKHIKLEEERRSEDAQSKAALTDWLRAKASFVIEGLKEADKDEFCRCELKLQKWYGDLRGKPFAIEAENSILDISGFSKQYNCAFIWQKDGVKKLNLYLIINYFKGGKLRFKKIKPEAFEANRFYTVINKKSGEIVPMEVNFNFDDPNLIILPLAFGKRQGREFIWNDLLSLETGSLKLANGRVIEKTLYNRRTRQDEPALFVALTFERREVLDSSNIKPMNLIGVDRGENIPAVIALTDPEGCPLSRFKDSLGNPTHILRIGESYKEKQRTIQAKKEVEQRRAGGYSRKYASKAKNLADDMVRNTARDLLYYAVTQDAMLIFENLSRGFGRQGKRTFMAERQYTRMEDWLTAKLAYEGLPSKTYLSKTLAQYTSKTCSNCGFTITSADYDRVLEKLKKTATGWMTTINGKELKVEGQITYYNRYKRQNVVKDLSVELDRLSEESVNNDISSWTKGRSGEALSLLKKRFSHRPVQEKFVCLNCGFETHADEQAALNIARSWLFLRSQEYKKYQTNKTTGNTDKRAFVETWQSFYRKKLKEVWKPAV

SEQ ID NO: 42508 - protein, 978 aa, synthetic construct
  REGION 1..978: note = engineered CasX variant
QEIKRINKIRRRLVKDSNTKKAGKTGPMKTLLVRVMTPDLRERLENLRKKPENIPQPISNTSQANLNKLLTDYTEMKKAILHVYWEEFQKDPVGLMSRVAQPASKKIDQNKLKPEMDEKGNLTTAGFACSQCGQPLFVYKLEQVSEKGKAYTNYFGRCNVAEHEKLILLAQLKPEKDSDEAVTYSLGKFGQRALDFYSIHVTKESTHPVKPLAQIAGNRYASSPVGKALSDACMGTIASFLSKYQDIIIEHQKVVKGNQKRLESLRELAGKENLEYPSVTLPPQPHTKEGVDAYNEVIARVRMWVNLNLWQKLKLSRDDAKPLLRLKGFPSFPLVERQANEVDWWDMVCNVKKLINEKKEDGKVFWQNLAGYKRQEALRPYLSSEEDRKKGKKFARYQLGDLLLHLEKKHPEDWGKVYDEAWERIDKKVEGLSKHIKLEEERRSEDAQSKAALTDWLRAKASFVIEGLKEADKDEFCRCELKLQKWYGDLRGKPFAIEAENSILDISGFSKQYNCAFIWQKDGVKKLNLYLIINYFKGGKLRFKKIKPEAFEANRFYTVINKKSGEIVPMEVNFNFDDPNLIILPLAFGKRQGREFIWNDLLSLETGSLKLANGRVIEKTLYNRRTRQDEPALFVALTFERREVLDSSNIKPMNLIGVDRGENIPAVIALTDPEGCPLSRFKDSLGNPTHILRIGESYKEKQRTIQAKKEVEQRRAGGYSRKYASKAKNLADDMVRNTARDLLYYAVTQDAMLIFENLSRGFGRQGKRTFMAERQYTRMEDWLTAKLAYEGLPSKTYLSKTLAQYTSKTCSNCGFTITSADYDRVLEKLKKTATGWMTTINGKELKVEGQITYYNRYKRQNVVKDLSVELDRLSEESVNNDISSWTKGRSGEALSLLKKRFSHRPVQEKFVCLNCGFETHADEQAALNIARSWLFLRSQEYKKYQTNKTTGNTDKRAFVETWQSFYRKKLKEVWKPAV

SEQ ID NO: 42509 - protein, 978 aa, synthetic construct
  REGION 1..978: note = engineered CasX variant
QEIKRINKIRRRLVKDSNTKKAGKTGPMKTLLVRVMTPDLRERLENLRKKPENIPQPISNTSQANLNKLLTDYTEMKKAILHVYWEEFQKDPVGLMSRVAQPASKKIDQNKLKPEMDEKGNLTTAGFACSQCGQPLFVYKLEQVSEKGKAYTNYFGRCNVAEHEKLILLAQLKPEKDSDEAVTYSLGKFGQRALDFYSIHVTKESTHPVKPLAQIAGNRYASTPVGKALSDACMGTIASFLSKYQDIIIEHQKVVKGNQKRLESLRELAGKENLEYPSVTLPPQPHTKEGVDAYNEVIARVRMWVNLNLWQKLKLSRDDAKPLLRLKGFPSFPLVERQANEVDWWDMVCNVKKLINEKKEDGKVFWQNLAGYKRQEALRPYLSSEEDRKKGKKFARYQLGDLLLHLEKKHPEDWGKVYDEAWERIDKKVEGLSKHIKLEEERRSEDAQSKAALTDWLRAKASFVIEGLKEADKDEFCRCELKLQKWYGDLRGKPFAIEAENSILDISGFSKQYNCAFIWQKDGVKKLNLYLIINYFKGGKLRFKKIKPEAFEANRFYTVINKKSGEIVPMEVNFNFDDPNLIILPLAFGKRQGREFIWNDLLSLETGSLKLANGRVIEKTLYNRRTRQDEPALFVALTFERREVLDSSNIKPMNLIGVDRGENIPAVIALTDPEGCPLSRFKDSLGNPTHILRIGESYKEKQRTIQAKKEVEQRRAGGYSRKYASKAKNLADDMVRNTARDLLYYAVTQDAMLIFENLSRGFGRQGKRTFMAERQYTRMEDWLTAKLAYEGLPSKTYLSKTLAQYTSKTCSNCGFTITSADYDRVLEKLKKTATGWMTTINGKELKVEGQITYYNRYKRQNVVKDLSVELDRLSEESVNNDISSWTKGRSGEALSLLKKRFSHRPVQEKFVCLNCGFETHADEQAALNIARSWLFLRSQEYKKYQTNKTTGNTDKRAFVETWQSFYRKKLKEVWKPAV

SEQ ID NO: 42510 - protein, 978 aa, synthetic construct
  REGION 1..978: note = engineered CasX variant
QEIKRINKIRRRLVKDSNTKKAGKTGPMKTLLVRVMTPDLRERLENLRKKPENIPQPISNTSQANLNKLLTDYTEMKKAILHVYWEEFQKDPVGLMSRVAQPASKKIDQNKLKPEMDEKGNLTTAGFACSQCGQPLFVYKLEQVSEKGKAYTNYFGRCNVAEHEKLILLAQLKPEKDSDEAVTYSLGKFGQRALDFYSIHVTKESTHPVKPLAQIAGNRYASAPVGKALSDACMGTIASFLSKYQDIIIEHQKVVKGNQKRLESLRELAGKENLEYPSVTLPPQPHTKEGVDAYNEVIARVRMWVNLNLWQKLKLSRDDAKPLLRLKGFPSFPLVERQANEVDWWDMVCNVKKLINEKKEDGKVFWQNLAGYKRQEALRPYLSSEEDRKKGKKFARYQLGDLLLHLEKKHPEDWGKVYDEAWERIDKKVEGLSKHIKLEEERRSEDAQSKAALTDWLRAKASFVIEGLKEADKDEFCRCELKLQKWYGDLRGKPFAIEAENSILDISGFSKQYNCAFIWQKDGVKKLNLYLIINYFKGGKLRFKKIKPEAFEANRFYTVINKKSGEIVPMEVNFNFDDPNLIILPLAFGKRQGREFIWNDLLSLETGSLKLANGRVIEKTLYNRRTRQDEPALFVALTFERREVLDSSNIKPMNLIGVDRGENIPAVIALTDPEGCPLSRFKDSLGNPTHILRIGESYKEKQRTIQAKKEVEQRRAGGYSRKYASKAKNLADDMVRNTARDLLYYAVTQDAMLIFENLSRGFGRQGKRTFMAERQYTRMEDWLTAKLAYEGLPSKTYLSKTLAQYTSKTCSNCGFTITSADYDRVLEKLKKTATGWMTTINGKELKVEGQITYYNRYKRQNVVKDLSVELDRLSEESVNNDISSWTKGRSGEALSLLKKRFSHRPVQEKFVCLNCGFETHADEQAALNIARSWLFLRSQEYKKYQTNKTTGNTDKRAFVETWQSFYRKKLKEVWKPAV

SEQ ID NO: 42511 - protein, 978 aa, synthetic construct
  REGION 1..978: note = engineered CasX variant
QEIKRINKIRRRLVKDSNTKKAGKTGPMKTLLVRVMTPDLRERLENLRKKPENIPQPISNTSQANLNKLLTDYTEMKKAILHVYWEEFQKDPVGLMSRVAQPASKKIDQNKLKPEMDEKGNLTTAGFACSQCGQPLFVYKLEQVSEKGKAYTNYFGRCNVAEHEKLILLAQLKPEKDSDEAVTYSLGKFGQRALDFYSIHVTKESTHPVKPLAQIAGNRYASVPVGKALSDACMGTIASFLSKYQDIIIEHQKVVKGNQKRLESLRELAGKENLEYPSVTLPPQPHTKEGVDAYNEVIARVRMWVNLNLWQKLKLSRDDAKPLLRLKGFPSFPLVERQANEVDWWDMVCNVKKLINEKKEDGKVFWQNLAGYKRQEALRPYLSSEEDRKKGKKFARYQLGDLLLHLEKKHPEDWGKVYDEAWERIDKKVEGLSKHIKLEEERRSEDAQSKAALTDWLRAKASFVIEGLKEADKDEFCRCELKLQKWYGDLRGKPFAIEAENSILDISGFSKQYNCAFIWQKDGVKKLNLYLIINYFKGGKLRFKKIKPEAFEANRFYTVINKKSGEIVPMEVNFNFDDPNLIILPLAFGKRQGREFIWNDLLSLETGSLKLANGRVIEKTLYNRRTRQDEPALFVALTFERREVLDSSNIKPMNLIGVDRGENIPAVIALTDPEGCPLSRFKDSLGNPTHILRIGESYKEKQRTIQAKKEVEQRRAGGYSRKYASKAKNLADDMVRNTARDLLYYAVTQDAMLIFENLSRGFGRQGKRTFMAERQYTRMEDWLTAKLAYEGLPSKTYLSKTLAQYTSKTCSNCGFTITSADYDRVLEKLKKTATGWMTTINGKELKVEGQITYYNRYKRQNVVKDLSVELDRLSEESVNNDISSWTKGRSGEALSLLKKRFSHRPVQEKFVCLNCGFETHADEQAALNIARSWLFLRSQEYKKYQTNKTTGNTDKRAFVETWQSFYRKKLKEVWKPAV

SEQ ID NO: 42512 - protein, 978 aa, synthetic construct
  REGION 1..978: note = engineered CasX variant
QEIKRINKIRRRLVKDSNTKKAGKTGPMKTLLVRVMTPDLRERLENLRKKPENIPQPISNTSQANLNKLLTDYTEMKKAILHVYWEEFQKDPVGLMSRVAQPASKKIDQNKLKPEMDEKGNLTTAGFACSQCGQPLFVYKLEQVSEKGKAYTNYFGRCNVAEHEKLIKLAQLKPEKDSDEAVTYSLGKFGQRALDFYSIHVTKESTHPVKPLAQIAGNRYASGPVGKALSDACMGTIASFLSKYQDIIIEHQKVVKGNQKRLESLRELAGKENLEYPSVTLPPQPHTKEGVDAYNEVIARVRMWVNLNLWQKLKLSRDDAKPLLRLKGFPSFPLVERQANEVDWWDMVCNVKKLINEKKEDGKVFWQNLAGYKRQEALRPYLSSEEDRKKGKKFARYQLGDLLLHLEKKHPEDWGKVYDEAWERIDKKVEGLSKHIKLEEERRSEDAQSKAALTDWLRAKASFVIEGLKEADKDEFCRCELKLQKWYGDLRGKPFAIEAENSILDISGFSKQYNCAFIWQKDGVKKLNLYLIINYFKGGKLRFKKIKPEAFEANRFYTVINKKSGEIVPMEVNFNFDDPNLIILPLAFGKRQGREFIWNDLLSLETGSLKLANGRVIEKTLYNRRTRQDEPALFVALTFERREVLDSSNIKPMNLIGVDRGENIPAVIALTDPEGCPLSRFKDSLGNPTHILRIGESYKEKQRTIQAKKEVEQRRAGGYSRKYASKAKNLADDMVRNTARDLLYYAVTQDAMLIFENLSRGFGRQGKRTFMAERQYTRMEDWLTAKLAYEGLPSKTYLSKTLAQYTSKTCSNCGFTITSADYDRVLEKLKKTATGWMTTINGKELKVEGQITYYNRYKRQNVVKDLSVELDRLSEESVNNDISSWTKGRSGEALSLLKKRFSHRPVQEKFVCLNCGFETHADEQAALNIARSWLFLRSQEYKKYQTNKTTGNTDKRAFVETWQSFYRKKLKEVWKPAV

SEQ ID NO: 42513 - protein, 977 aa, synthetic construct
  REGION 1..977: note = engineered CasX variant
QEIKRINKIRRRLVKDSNTKKAGKTGPMKTLLVRVMTPDLRERLENLRKKPENIPQPISNTSQANLNKLLTDYTEMKKAILHVYWEEFQKDPVGLMSRVAQPASKKIDQNKLKPEMDEKGNLTTAGFACSQCGQPLFVYKLEQVSEKGKAYTNYFGRCNVAEHEKLILLAQLKPEKDSDEAVTYSLGKFGQRALDFYSIHVTKESTHPVKPLAQIAGNRYASPVGKALSDACMGTIASFLSKYQDIIIEHQKVVKGNQKRLESLRELAGKENLEYPSVTLPPQPHTKEGVDAYNEVIARVRMWVNLNLWQKLKLSRDDAKPLLRLKGFPSFPLVERQANEVDWWDMVCNVKKLINEKKEDGKVFWQNLAGYKRQEALRPYLSSEEDRKKGKKFARYQLGDLLLHLEKKHPEDWGKVYDEAWERIDKKVEGLSKHIKLEEERRSEDAQSKAALTDWLRAKASFVIEGLKEADKDEFCRCELKLQKWYGDLRGKPFAIEAENSILDISGFSKQYNCAFIWQKDGVKKLNLYLIINYFKGGKLRFKKIKPEAFEANRFYTVINKKSGEIVPMEVNFNFDDPNLIILPLAFGKRQGREFIWNDLLSLETGSLKLANGRVIEKTLYNRRTRQDEPALFVALTFERREVLDSSNIKPMNLIGVDRGENIPAVIALTDPEGCPLSRFKDSLGNPTHILRIGESYKEKQRTIQAKKEVEQRRAGGYSRKYASKAKNLADDMVRNTARDLLYYAVTQDAMLIFENLSRGFGRQGKRTFMAERQYTRMEDWLTAKLAYEGLPSKTYLSKTLAQYTSKTCSNCGFTITSADYDRVLEKLKKTATGWMTTINGKELKVEGQITYYNRYKRQNVVKDLSVELDRLSEESVNNDISSWTKGRSGEALSLLKKRFSHRPVQEKFVCLNCGFETHADEQAALNIARSWLFLRSQEYKKYQTNKTTGNTDKRAFVETWQSFYRKKLKEVWKPAV

SEQ ID NO: 42514 - protein, 979 aa, synthetic construct
  REGION 1..979: note = engineered CasX variant
QEIKRINKIRRRLVKDSNTKKAGKTGPMKTLLVRVMTPDLRERLENLRKKPENIPQPISNTSQANLNKLLTDYTEMKKAILHVYWEEFQKDPVGLMSRVAQPASKKIDQNKLKPEMDEKGNLTTAGFACSQCGQPLFVYKLEQVSEKGKAYTNYFGRCNVAEHEKLILLAQLKPEKDSDEAVTYSLGKFGQRALDFYSIHVTKESTHPVKPLAQIAGNRYASYPVGKALSDACMGTIASFLSKYQDIIIEHQKVVKGNQKRLESLRELAGKENLEYPSVTLPPQPHTKEGVDAYNEVIARVRMWVNLNLWQKLKLSRDDAKPLLRLKGFPSFPLVERQANEVDWWDMVCNVKKLINEKKEDGKVFWQNLAGYKRQEALRPYLSSEEDRKKGKKFARYQLGDLLLHLEKKHGERDWGKVYDEAWERIDKKVEGLSKHIKLEEERRSEDAQSKAALTDWLRAKASFVIEGLKEADKDEFCRCELKLQKWYGDLRGKPFAIEAENSILDISGFSKQYNCAFIWQKDGVKKLNLYLIINYFKGGKLRFKKIKPEAFEANRFYTVINKKSGEIVPMEVNFNFDDPNLIILPLAFGKRQGREFIWNDLLSLETGSLKLANGRVIEKTLYNRRTRQDEPALFVALTFERREVLDSSNIKPMNLIGVDRGENIPAVIALTDPEGCPLSRFKDSLGNPTHILRIGESYKEKQRTIQAKKEVEQRRAGGYSRKYASKAKNLADDMVRNTARDLLYYAVTQDAMLIFENLSRGFGRQGKRTFMAERQYTRMEDWLTAKLAYEGLPSKTYLSKTLAQYTSKTCSNCGFTITSADYDRVLEKLKKTATGWMTTINGKELKVEGQITYYNRYKRQNVVKDLSVELDRLSEESVNNDISSWTKGRSGEALSLLKKRFSHRPVQEKFVCLNCGFETHADEQAALNIARSWLFLRSQEYKKYQTNKTTGNTDKRAFVETWQSFYRKKLKEVWKPAV

SEQ ID NO: 42515 - protein, 979 aa, synthetic construct
  REGION 1..979: note = engineered CasX variant
QEIKRINKIRRRLVKDSNTKKAGKTGPMKTLLVRVMTPDLRERLENLRKKPENIPQPISNTSQANLNKLLTDYTEMKKAILHVYWEEFQKDPVGLMSRVAQPASKKIDQNKLKPEMDEKGNLTTAGFACSQCGQPLFVYKLEQVSEKGKAYTNYFGRCNVAEHEKLILLAQLKPEKDSDEAVTYSLGKFGQRALDFYSIHVTKESTHPVKPLAQIAGNRYASHPVGKALSDACMGTIASFLSKYQDIIIEHQKVVKGNQKRLESLRELAGKENLEYPSVTLPPQPHTKEGVDAYNEVIARVRMWVNLNLWQKLKLSRDDAKPLLRLKGFPSFPLVERQANEVDWWDMVCNVKKLINEKKEDGKVFWQNLAGYKRQEALRPYLSSEEDRKKGKKFARYQLGDLLLHLEKKHGERDWGKVYDEAWERIDKKVEGLSKHIKLEEERRSEDAQSKAALTDWLRAKASFVIEGLKEADKDEFCRCELKLQKWYGDLRGKPFAIEAENSILDISGFSKQYNCAFIWQKDGVKKLNLYLIINYFKGGKLRFKKIKPEAFEANRFYTVINKKSGEIVPMEVNFNFDDPNLIILPLAFGKRQGREFIWNDLLSLETGSLKLANGRVIEKTLYNRRTRQDEPALFVALTFERREVLDSSNIKPMNLIGVDRGENIPAVIALTDPEGCPLSRFKDSLGNPTHILRIGESYKEKQRTIQAKKEVEQRRAGGYSRKYASKAKNLADDMVRNTARDLLYYAVTQDAMLIFENLSRGFGRQGKRTFMAERQYTRMEDWLTAKLAYEGLPSKTYLSKTLAQYTSKTCSNCGFTITSADYDRVLEKLKKTATGWMTTINGKELKVEGQITYYNRYKRQNVVKDLSVELDRLSEESVNNDISSWTKGRSGEALSLLKKRFSHRPVQEKFVCLNCGFETHADEQAALNIARSWLFLRSQEYKKYQTNKTTGNTDKRAFVETWQSFYRKKLKEVWKPAV

SEQ ID NO: 42516 - protein, 979 aa, synthetic construct
  REGION 1..979: note = engineered CasX variant
QEIKRINKIRRRLVKDSNTKKAGKTGPMKTLLVRVMTPDLRERLENLRKKPENIPQPISNTSQANLNKLLTDYTEMKKAILHVYWEEFQKDPVGLMSRVAQPASKKIDQNKLKPEMDEKGNLTTAGFACSQCGQPLFVYKLEQVSEKGKAYTNYFGRCNVAEHEKLILLAQLKPEKDSDEAVTYSLGKFGQRALDFYSIHVTKESTHPVKPLAQIAGNRYASSPVGKALSDACMGTIASFLSKYQDIIIEHQKVVKGNQKRLESLRELAGKENLEYPSVTLPPQPHTKEGVDAYNEVIARVRMWVNLNLWQKLKLSRDDAKPLLRLKGFPSFPLVERQANEVDWWDMVCNVKKLINEKKEDGKVFWQNLAGYKRQEALRPYLSSEEDRKKGKKFARYQLGDLLLHLEKKHGERDWGKVYDEAWERIDKKVEGLSKHIKLEEERRSEDAQSKAALTDWLRAKASFVIEGLKEADKDEFCRCELKLQKWYGDLRGKPFAIEAENSILDISGFSKQYNCAFIWQKDGVKKLNLYLIINYFKGGKLRFKKIKPEAFEANRFYTVINKKSGEIVPMEVNFNFDDPNLIILPLAFGKRQGREFIWNDLLSLETGSLKLANGRVIEKTLYNRRTRQDEPALFVALTFERREVLDSSNIKPMNLIGVDRGENIPAVIALTDPEGCPLSRFKDSLGNPTHILRIGESYKEKQRTIQAKKEVEQRRAGGYSRKYASKAKNLADDMVRNTARDLLYYAVTQDAMLIFENLSRGFGRQGKRTFMAERQYTRMEDWLTAKLAYEGLPSKTYLSKTLAQYTSKTCSNCGFTITSADYDRVLEKLKKTATGWMTTINGKELKVEGQITYYNRYKRQNVVKDLSVELDRLSEESVNNDISSWTKGRSGEALSLLKKRFSHRPVQEKFVCLNCGFETHADEQAALNIARSWLFLRSQEYKKYQTNKTTGNTDKRAFVETWQSFYRKKLKEVWKPAV

SEQ ID NO: 42517 - protein, 979 aa, synthetic construct
  REGION 1..979: note = engineered CasX variant
QEIKRINKIRRRLVKDSNTKKAGKTGPMKTLLVRVMTPDLRERLENLRKKPENIPQPISNTSQANLNKLLTDYTEMKKAILHVYWEEFQKDPVGLMSRVAQPASKKIDQNKLKPEMDEKGNLTTAGFACSQCGQPLFVYKLEQVSEKGKAYTNYFGRCNVAEHEKLILLAQLKPEKDSDEAVTYSLGKFGQRALDFYSIHVTKESTHPVKPLAQIAGNRYASTPVGKALSDACMGTIASFLSKYQDIIIEHQKVVKGNQKRLESLRELAGKENLEYPSVTLPPQPHTKEGVDAYNEVIARVRMWVNLNLWQKLKLSRDDAKPLLRLKGFPSFPLVERQANEVDWWDMVCNVKKLINEKKEDGKVFWQNLAGYKRQEALRPYLSSEEDRKKGKKFARYQLGDLLLHLEKKHGERDWGKVYDEAWERIDKKVEGLSKHIKLEEERRSEDAQSKAALTDWLRAKASFVIEGLKEADKDEFCRCELKLQKWYGDLRGKPFAIEAENSILDISGFSKQYNCAFIWQKDGVKKLNLYLIINYFKGGKLRFKKIKPEAFEANRFYTVINKKSGEIVPMEVNFNFDDPNLIILPLAFGKRQGREFIWNDLLSLETGSLKLANGRVIEKTLYNRRTRQDEPALFVALTFERREVLDSSNIKPMNLIGVDRGENIPAVIALTDPEGCPLSRFKDSLGNPTHILRIGESYKEKQRTIQAKKEVEQRRAGGYSRKYASKAKNLADDMVRNTARDLLYYAVTQDAMLIFENLSRGFGRQGKRTFMAERQYTRMEDWLTAKLAYEGLPSKTYLSKTLAQYTSKTCSNCGFTITSADYDRVLEKLKKTATGWMTTINGKELKVEGQITYYNRYKRQNVVKDLSVELDRLSEESVNNDISSWTKGRSGEALSLLKKRFSHRPVQEKFVCLNCGFETHADEQAALNIARSWLFLRSQEYKKYQTNKTTGNTDKRAFVETWQSFYRKKLKEVWKPAV

SEQ ID NO: 42518 - protein, 979 aa, synthetic construct
  REGION 1..979: note = engineered CasX variant
QEIKRINKIRRRLVKDSNTKKAGKTGPMKTLLVRVMTPDLRERLENLRKKPENIPQPISNTSQANLNKLLTDYTEMKKAILHVYWEEFQKDPVGLMSRVAQPASKKIDQNKLKPEMDEKGNLTTAGFACSQCGQPLFVYKLEQVSEKGKAYTNYFGRCNVAEHEKLILLAQLKPEKDSDEAVTYSLGKFGQRALDFYSIHVTKESTHPVKPLAQIAGNRYASAPVGKALSDACMGTIASFLSKYQDIIIEHQKVVKGNQKRLESLRELAGKENLEYPSVTLPPQPHTKEGVDAYNEVIARVRMWVNLNLWQKLKLSRDDAKPLLRLKGFPSFPLVERQANEVDWWDMVCNVKKLINEKKEDGKVFWQNLAGYKRQEALRPYLSSEEDRKKGKKFARYQLGDLLLHLEKKHGERDWGKVYDEAWERIDKKVEGLSKHIKLEEERRSEDAQSKAALTDWLRAKASFVIEGLKEADKDEFCRCELKLQKWYGDLRGKPFAIEAENSILDISGFSKQYNCAFIWQKDGVKKLNLYLIINYFKGGKLRFKKIKPEAFEANRFYTVINKKSGEIVPMEVNFNFDDPNLIILPLAFGKRQGREFIWNDLLSLETGSLKLANGRVIEKTLYNRRTRQDEPALFVALTFERREVLDSSNIKPMNLIGVDRGENIPAVIALTDPEGCPLSRFKDSLGNPTHILRIGESYKEKQRTIQAKKEVEQRRAGGYSRKYASKAKNLADDMVRNTARDLLYYAVTQDAMLIFENLSRGFGRQGKRTFMAERQYTRMEDWLTAKLAYEGLPSKTYLSKTLAQYTSKTCSNCGFTITSADYDRVLEKLKKTATGWMTTINGKELKVEGQITYYNRYKRQNVVKDLSVELDRLSEESVNNDISSWTKGRSGEALSLLKKRFSHRPVQEKFVCLNCGFETHADEQAALNIARSWLFLRSQEYKKYQTNKTTGNTDKRAFVETWQSFYRKKLKEVWKPAV

SEQ ID NO: 42519 - protein, 979 aa, synthetic construct
  REGION 1..979: note = engineered CasX variant
QEIKRINKIRRRLVKDSNTKKAGKTGPMKTLLVRVMTPDLRERLENLRKKPENIPQPISNTSQANLNKLLTDYTEMKKAILHVYWEEFQKDPVGLMSRVAQPASKKIDQNKLKPEMDEKGNLTTAGFACSQCGQPLFVYKLEQVSEKGKAYTNYFGRCNVAEHEKLILLAQLKPEKDSDEAVTYSLGKFGQRALDFYSIHVTKESTHPVKPLAQIAGNRYASVPVGKALSDACMGTIASFLSKYQDIIIEHQKVVKGNQKRLESLRELAGKENLEYPSVTLPPQPHTKEGVDAYNEVIARVRMWVNLNLWQKLKLSRDDAKPLLRLKGFPSFPLVERQANEVDWWDMVCNVKKLINEKKEDGKVFWQNLAGYKRQEALRPYLSSEEDRKKGKKFARYQLGDLLLHLEKKHGERDWGKVYDEAWERIDKKVEGLSKHIKLEEERRSEDAQSKAALTDWLRAKASFVIEGLKEADKDEFCRCELKLQKWYGDLRGKPFAIEAENSILDISGFSKQYNCAFIWQKDGVKKLNLYLIINYFKGGKLRFKKIKPEAFEANRFYTVINKKSGEIVPMEVNFNFDDPNLIILPLAFGKRQGREFIWNDLLSLETGSLKLANGRVIEKTLYNRRTRQDEPALFVALTFERREVLDSSNIKPMNLIGVDRGENIPAVIALTDPEGCPLSRFKDSLGNPTHILRIGESYKEKQRTIQAKKEVEQRRAGGYSRKYASKAKNLADDMVRNTARDLLYYAVTQDAMLIFENLSRGFGRQGKRTFMAERQYTRMEDWLTAKLAYEGLPSKTYLSKTLAQYTSKTCSNCGFTITSADYDRVLEKLKKTATGWMTTINGKELKVEGQITYYNRYKRQNVVKDLSVELDRLSEESVNNDISSWTKGRSGEALSLLKKRFSHRPVQEKFVCLNCGFETHADEQAALNIARSWLFLRSQEYKKYQTNKTTGNTDKRAFVETWQSFYRKKLKEVWKPAV

SEQ ID NO: 42520 - protein, 979 aa, synthetic construct
  REGION 1..979: note = engineered CasX variant
QEIKRINKIRRRLVKDSNTKKAGKTGPMKTLLVRVMTPDLRERLENLRKKPENIPQPISNTSQANLNKLLTDYTEMKKAILHVYWEEFQKDPVGLMSRVAQPASKKIDQNKLKPEMDEKGNLTTAGFACSQCGQPLFVYKLEQVSEKGKAYTNYFGRCNVAEHEKLIKLAQLKPEKDSDEAVTYSLGKFGQRALDFYSIHVTKESTHPVKPLAQIAGNRYASGPVGKALSDACMGTIASFLSKYQDIIIEHQKVVKGNQKRLESLRELAGKENLEYPSVTLPPQPHTKEGVDAYNEVIARVRMWVNLNLWQKLKLSRDDAKPLLRLKGFPSFPLVERQANEVDWWDMVCNVKKLINEKKEDGKVFWQNLAGYKRQEALRPYLSSEEDRKKGKKFARYQLGDLLLHLEKKHGERDWGKVYDEAWERIDKKVEGLSKHIKLEEERRSEDAQSKAALTDWLRAKASFVIEGLKEADKDEFCRCELKLQKWYGDLRGKPFAIEAENSILDISGFSKQYNCAFIWQKDGVKKLNLYLIINYFKGGKLRFKKIKPEAFEANRFYTVINKKSGEIVPMEVNFNFDDPNLIILPLAFGKRQGREFIWNDLLSLETGSLKLANGRVIEKTLYNRRTRQDEPALFVALTFERREVLDSSNIKPMNLIGVDRGENIPAVIALTDPEGCPLSRFKDSLGNPTHILRIGESYKEKQRTIQAKKEVEQRRAGGYSRKYASKAKNLADDMVRNTARDLLYYAVTQDAMLIFENLSRGFGRQGKRTFMAERQYTRMEDWLTAKLAYEGLPSKTYLSKTLAQYTSKTCSNCGFTITSADYDRVLEKLKKTATGWMTTINGKELKVEGQITYYNRYKRQNVVKDLSVELDRLSEESVNNDISSWTKGRSGEALSLLKKRFSHRPVQEKFVCLNCGFETHADEQAALNIARSWLFLRSQEYKKYQTNKTTGNTDKRAFVETWQSFYRKKLKEVWKPAV

SEQ ID NO: 42521 - protein, 978 aa, synthetic construct
  REGION 1..978: note = engineered CasX variant
QEIKRINKIRRRLVKDSNTKKAGKTGPMKTLLVRVMTPDLRERLENLRKKPENIPQPISNTSQANLNKLLTDYTEMKKAILHVYWEEFQKDPVGLMSRVAQPASKKIDQNKLKPEMDEKGNLTTAGFACSQCGQPLFVYKLEQVSEKGKAYTNYFGRCNVAEHEKLILLAQLKPEKDSDEAVTYSLGKFGQRALDFYSIHVTKESTHPVKPLAQIAGNRYASPVGKALSDACMGTIASFLSKYQDIIIEHQKVVKGNQKRLESLRELAGKENLEYPSVTLPPQPHTKEGVDAYNEVIARVRMWVNLNLWQKLKLSRDDAKPLLRLKGFPSFPLVERQANEVDWWDMVCNVKKLINEKKEDGKVFWQNLAGYKRQEALRPYLSSEEDRKKGKKFARYQLGDLLLHLEKKHGERDWGKVYDEAWERIDKKVEGLSKHIKLEEERRSEDAQSKAALTDWLRAKASFVIEGLKEADKDEFCRCELKLQKWYGDLRGKPFAIEAENSILDISGFSKQYNCAFIWQKDGVKKLNLYLIINYFKGGKLRFKKIKPEAFEANRFYTVINKKSGEIVPMEVNFNFDDPNLIILPLAFGKRQGREFIWNDLLSLETGSLKLANGRVIEKTLYNRRTRQDEPALFVALTFERREVLDSSNIKPMNLIGVDRGENIPAVIALTDPEGCPLSRFKDSLGNPTHILRIGESYKEKQRTIQAKKEVEQRRAGGYSRKYASKAKNLADDMVRNTARDLLYYAVTQDAMLIFENLSRGFGRQGKRTFMAERQYTRMEDWLTAKLAYEGLPSKTYLSKTLAQYTSKTCSNCGFTITSADYDRVLEKLKKTATGWMTTINGKELKVEGQITYYNRYKRQNVVKDLSVELDRLSEESVNNDISSWTKGRSGEALSLLKKRFSHRPVQEKFVCLNCGFETHADEQAALNIARSWLFLRSQEYKKYQTNKTTGNTDKRAFVETWQSFYRKKLKEVWKPAV

SEQ ID NO: 42522 - protein, 979 aa, synthetic construct
  REGION 1..979: note = engineered CasX variant
QEIKRINKIRRRLVKDSNTKKAGKTGPMKTLLVRVMTPDLRERLENLRKKPENIPQPISNTSQANLNKLLTDYTEMKKAILHVYWEEFQKDPVGLMSRVAQPASKKIDQNKLKPEMDEKGNLTTAGFACSQCGQPLFVYKLEQVSEKGKAYTNYFGRCNVAEHEKLILLAQLKPEKDSDEAVTYSLGKFGQRALDFYSIHVTKESTHPVKPLAQIAGNRYASYPVGKALSDACMGTIASFLSKYQDIIIEHQKVVKGNQKRLESLRELAGKENLEYPSVTLPPQPHTKEGVDAYNEVIARVRMWVNLNLWQKLKLSRDDAKPLLRLKGFPSFPLVERQANEVDWWDMVCNVKKLINEKKEDGKVFWQNLAGYKRQEALRPYLSSEEDRKKGKKFARYQLGDLLLHLEKKHGEYDWGKVYDEAWERIDKKVEGLSKHIKLEEERRSEDAQSKAALTDWLRAKASFVIEGLKEADKDEFCRCELKLQKWYGDLRGKPFAIEAENSILDISGFSKQYNCAFIWQKDGVKKLNLYLIINYFKGGKLRFKKIKPEAFEANRFYTVINKKSGEIVPMEVNFNFDDPNLIILPLAFGKRQGREFIWNDLLSLETGSLKLANGRVIEKTLYNRRTRQDEPALFVALTFERREVLDSSNIKPMNLIGVDRGENIPAVIALTDPEGCPLSRFKDSLGNPTHILRIGESYKEKQRTIQAKKEVEQRRAGGYSRKYASKAKNLADDMVRNTARDLLYYAVTQDAMLIFENLSRGFGRQGKRTFMAERQYTRMEDWLTAKLAYEGLPSKTYLSKTLAQYTSKTCSNCGFTITSADYDRVLEKLKKTATGWMTTINGKELKVEGQITYYNRYKRQNVVKDLSVELDRLSEESVNNDISSWTKGRSGEALSLLKKRFSHRPVQEKFVCLNCGFETHADEQAALNIARSWLFLRSQEYKKYQTNKTTGNTDKRAFVETWQSFYRKKLKEVWKPAV

SEQ ID NO: 42523 - protein, 979 aa, synthetic construct
  REGION 1..979: note = engineered CasX variant
QEIKRINKIRRRLVKDSNTKKAGKTGPMKTLLVRVMTPDLRERLENLRKKPENIPQPISNTSQANLNKLLTDYTEMKKAILHVYWEEFQKDPVGLMSRVAQPASKKIDQNKLKPEMDEKGNLTTAGFACSQCGQPLFVYKLEQVSEKGKAYTNYFGRCNVAEHEKLILLAQLKPEKDSDEAVTYSLGKFGQRALDFYSIHVTKESTHPVKPLAQIAGNRYASHPVGKALSDACMGTIASFLSKYQDIIIEHQKVVKGNQKRLESLRELAGKENLEYPSVTLPPQPHTKEGVDAYNEVIARVRMWVNLNLWQKLKLSRDDAKPLLRLKGFPSFPLVERQANEVDWWDMVCNVKKLINEKKEDGKVFWQNLAGYKRQEALRPYLSSEEDRKKGKKFARYQLGDLLLHLEKKHGEYDWGKVYDEAWERIDKKVEGLSKHIKLEEERRSEDAQSKAALTDWLRAKASFVIEGLKEADKDEFCRCELKLQKWYGDLRGKPFAIEAENSILDISGFSKQYNCAFIWQKDGVKKLNLYLIINYFKGGKLRFKKIKPEAFEANRFYTVINKKSGEIVPMEVNFNFDDPNLIILPLAFGKRQGREFIWNDLLSLETGSLKLANGRVIEKTLYNRRTRQDEPALFVALTFERREVLDSSNIKPMNLIGVDRGENIPAVIALTDPEGCPLSRFKDSLGNPTHILRIGESYKEKQRTIQAKKEVEQRRAGGYSRKYASKAKNLADDMVRNTARDLLYYAVTQDAMLIFENLSRGFGRQGKRTFMAERQYTRMEDWLTAKLAYEGLPSKTYLSKTLAQYTSKTCSNCGFTITSADYDRVLEKLKKTATGWMTTINGKELKVEGQITYYNRYKRQNVVKDLSVELDRLSEESVNNDISSWTKGRSGEALSLLKKRFSHRPVQEKFVCLNCGFETHADEQAALNIARSWLFLRSQEYKKYQTNKTTGNTDKRAFVETWQSFYRKKLKEVWKPAV

SEQ ID NO: 42524 - protein, 979 aa, synthetic construct
  REGION 1..979: note = engineered CasX variant
QEIKRINKIRRRLVKDSNTKKAGKTGPMKTLLVRVMTPDLRERLENLRKKPENIPQPISNTSQANLNKLLTDYTEMKKAILHVYWEEFQKDPVGLMSRVAQPASKKIDQNKLKPEMDEKGNLTTAGFACSQCGQPLFVYKLEQVSEKGKAYTNYFGRCNVAEHEKLILLAQLKPEKDSDEAVTYSLGKFGQRALDFYSIHVTKESTHPVKPLAQIAGNRYASSPVGKALSDACMGTIASFLSKYQDIIIEHQKVVKGNQKRLESLRELAGKENLEYPSVTLPPQPHTKEGVDAYNEVIARVRMWVNLNLWQKLKLSRDDAKPLLRLKGFPSFPLVERQANEVDWWDMVCNVKKLINEKKEDGKVFWQNLAGYKRQEALRPYLSSEEDRKKGKKFARYQLGDLLLHLEKKHGEYDWGKVYDEAWERIDKKVEGLSKHIKLEEERRSEDAQSKAALTDWLRAKASFVIEGLKEADKDEFCRCELKLQKWYGDLRGKPFAIEAENSILDISGFSKQYNCAFIWQKDGVKKLNLYLIINYFKGGKLRFKKIKPEAFEANRFYTVINKKSGEIVPMEVNFNFDDPNLIILPLAFGKRQGREFIWNDLLSLETGSLKLANGRVIEKTLYNRRTRQDEPALFVALTFERREVLDSSNIKPMNLIGVDRGENIPAVIALTDPEGCPLSRFKDSLGNPTHILRIGESYKEKQRTIQAKKEVEQRRAGGYSRKYASKAKNLADDMVRNTARDLLYYAVTQDAMLIFENLSRGFGRQGKRTFMAERQYTRMEDWLTAKLAYEGLPSKTYLSKTLAQYTSKTCSNCGFTITSADYDRVLEKLKKTATGWMTTINGKELKVEGQITYYNRYKRQNVVKDLSVELDRLSEESVNNDISSWTKGRSGEALSLLKKRFSHRPVQEKFVCLNCGFETHADEQAALNIARSWLFLRSQEYKKYQTNKTTGNTDKRAFVETWQSFYRKKLKEVWKPAV

SEQ ID NO: 42525 - protein, 979 aa, synthetic construct
  REGION 1..979: note = engineered CasX variant
QEIKRINKIRRRLVKDSNTKKAGKTGPMKTLLVRVMTPDLRERLENLRKKPENIPQPISNTSQANLNKLLTDYTEMKKAILHVYWEEFQKDPVGLMSRVAQPASKKIDQNKLKPEMDEKGNLTTAGFACSQCGQPLFVYKLEQVSEKGKAYTNYFGRCNVAEHEKLILLAQLKPEKDSDEAVTYSLGKFGQRALDFYSIHVTKESTHPVKPLAQIAGNRYASTPVGKALSDACMGTIASFLSKYQDIIIEHQKVVKGNQKRLESLRELAGKENLEYPSVTLPPQPHTKEGVDAYNEVIARVRMWVNLNLWQKLKLSRDDAKPLLRLKGFPSFPLVERQANEVDWWDMVCNVKKLINEKKEDGKVFWQNLAGYKRQEALRPYLSSEEDRKKGKKFARYQLGDLLLHLEKKHGEYDWGKVYDEAWERIDKKVEGLSKHIKLEEERRSEDAQSKAALTDWLRAKASFVIEGLKEADKDEFCRCELKLQKWYGDLRGKPFAIEAENSILDISGFSKQYNCAFIWQKDGVKKLNLYLIINYFKGGKLRFKKIKPEAFEANRFYTVINKKSGEIVPMEVNFNFDDPNLIILPLAFGKRQGREFIWNDLLSLETGSLKLANGRVIEKTLYNRRTRQDEPALFVALTFERREVLDSSNIKPMNLIGVDRGENIPAVIALTDPEGCPLSRFKDSLGNPTHILRIGESYKEKQRTIQAKKEVEQRRAGGYSRKYASKAKNLADDMVRNTARDLLYYAVTQDAMLIFENLSRGFGRQGKRTFMAERQYTRMEDWLTAKLAYEGLPSKTYLSKTLAQYTSKTCSNCGFTITSADYDRVLEKLKKTATGWMTTINGKELKVEGQITYYNRYKRQNVVKDLSVELDRLSEESVNNDISSWTKGRSGEALSLLKKRFSHRPVQEKFVCLNCGFETHADEQAALNIARSWLFLRSQEYKKYQTNKTTGNTDKRAFVETWQSFYRKKLKEVWKPAV

SEQ ID NO: 42526 - protein, 979 aa, synthetic construct
  REGION 1..979: note = engineered CasX variant
QEIKRINKIRRRLVKDSNTKKAGKTGPMKTLLVRVMTPDLRERLENLRKKPENIPQPISNTSQANLNKLLTDYTEMKKAILHVYWEEFQKDPVGLMSRVAQPASKKIDQNKLKPEMDEKGNLTTAGFACSQCGQPLFVYKLEQVSEKGKAYTNYFGRCNVAEHEKLILLAQLKPEKDSDEAVTYSLGKFGQRALDFYSIHVTKESTHPVKPLAQIAGNRYASAPVGKALSDACMGTIASFLSKYQDIIIEHQKVVKGNQKRLESLRELAGKENLEYPSVTLPPQPHTKEGVDAYNEVIARVRMWVNLNLWQKLKLSRDDAKPLLRLKGFPSFPLVERQANEVDWWDMVCNVKKLINEKKEDGKVFWQNLAGYKRQEALRPYLSSEEDRKKGKKFARYQLGDLLLHLEKKHGEYDWGKVYDEAWERIDKKVEGLSKHIKLEEERRSEDAQSKAALTDWLRAKASFVIEGLKEADKDEFCRCELKLQKWYGDLRGKPFAIEAENSILDISGFSKQYNCAFIWQKDGVKKLNLYLIINYFKGGKLRFKKIKPEAFEANRFYTVINKKSGEIVPMEVNFNFDDPNLIILPLAFGKRQGREFIWNDLLSLETGSLKLANGRVIEKTLYNRRTRQDEPALFVALTFERREVLDSSNIKPMNLIGVDRGENIPAVIALTDPEGCPLSRFKDSLGNPTHILRIGESYKEKQRTIQAKKEVEQRRAGGYSRKYASKAKNLADDMVRNTARDLLYYAVTQDAMLIFENLSRGFGRQGKRTFMAERQYTRMEDWLTAKLAYEGLPSKTYLSKTLAQYTSKTCSNCGFTITSADYDRVLEKLKKTATGWMTTINGKELKVEGQITYYNRYKRQNVVKDLSVELDRLSEESVNNDISSWTKGRSGEALSLLKKRFSHRPVQEKFVCLNCGFETHADEQAALNIARSWLFLRSQEYKKYQTNKTTGNTDKRAFVETWQSFYRKKLKEVWKPAV

SEQ ID NO: 42527 - protein, 979 aa, synthetic construct
  REGION 1..979: note = engineered CasX variant
QEIKRINKIRRRLVKDSNTKKAGKTGPMKTLLVRVMTPDLRERLENLRKKPENIPQPISNTSQANLNKLLTDYTEMKKAILHVYWEEFQKDPVGLMSRVAQPASKKIDQNKLKPEMDEKGNLTTAGFACSQCGQPLFVYKLEQVSEKGKAYTNYFGRCNVAEHEKLILLAQLKPEKDSDEAVTYSLGKFGQRALDFYSIHVTKESTHPVKPLAQIAGNRYASVPVGKALSDACMGTIASFLSKYQDIIIEHQKVVKGNQKRLESLRELAGKENLEYPSVTLPPQPHTKEGVDAYNEVIARVRMWVNLNLWQKLKLSRDDAKPLLRLKGFPSFPLVERQANEVDWWDMVCNVKKLINEKKEDGKVFWQNLAGYKRQEALRPYLSSEEDRKKGKKFARYQLGDLLLHLEKKHGEYDWGKVYDEAWERIDKKVEGLSKHIKLEEERRSEDAQSKAALTDWLRAKASFVIEGLKEADKDEFCRCELKLQKWYGDLRGKPFAIEAENSILDISGFSKQYNCAFIWQKDGVKKLNLYLIINYFKGGKLRFKKIKPEAFEANRFYTVINKKSGEIVPMEVNFNFDDPNLIILPLAFGKRQGREFIWNDLLSLETGSLKLANGRVIEKTLYNRRTRQDEPALFVALTFERREVLDSSNIKPMNLIGVDRGENIPAVIALTDPEGCPLSRFKDSLGNPTHILRIGESYKEKQRTIQAKKEVEQRRAGGYSRKYASKAKNLADDMVRNTARDLLYYAVTQDAMLIFENLSRGFGRQGKRTFMAERQYTRMEDWLTAKLAYEGLPSKTYLSKTLAQYTSKTCSNCGFTITSADYDRVLEKLKKTATGWMTTINGKELKVEGQITYYNRYKRQNVVKDLSVELDRLSEESVNNDISSWTKGRSGEALSLLKKRFSHRPVQEKFVCLNCGFETHADEQAALNIARSWLFLRSQEYKKYQTNKTTGNTDKRAFVETWQSFYRKKLKEVWKPAV

SEQ ID NO: 42528 - protein, 979 aa, synthetic construct
  REGION 1..979: note = engineered CasX variant
QEIKRINKIRRRLVKDSNTKKAGKTGPMKTLLVRVMTPDLRERLENLRKKPENIPQPISNTSQANLNKLLTDYTEMKKAILHVYWEEFQKDPVGLMSRVAQPASKKIDQNKLKPEMDEKGNLTTAGFACSQCGQPLFVYKLEQVSEKGKAYTNYFGRCNVAEHEKLIKLAQLKPEKDSDEAVTYSLGKFGQRALDFYSIHVTKESTHPVKPLAQIAGNRYASGPVGKALSDACMGTIASFLSKYQDIIIEHQKVVKGNQKRLESLRELAGKENLEYPSVTLPPQPHTKEGVDAYNEVIARVRMWVNLNLWQKLKLSRDDAKPLLRLKGFPSFPLVERQANEVDWWDMVCNVKKLINEKKEDGKVFWQNLAGYKRQEALRPYLSSEEDRKKGKKFARYQLGDLLLHLEKKHGEYDWGKVYDEAWERIDKKVEGLSKHIKLEEERRSEDAQSKAALTDWLRAKASFVIEGLKEADKDEFCRCELKLQKWYGDLRGKPFAIEAENSILDISGFSKQYNCAFIWQKDGVKKLNLYLIINYFKGGKLRFKKIKPEAFEANRFYTVINKKSGEIVPMEVNFNFDDPNLIILPLAFGKRQGREFIWNDLLSLETGSLKLANGRVIEKTLYNRRTRQDEPALFVALTFERREVLDSSNIKPMNLIGVDRGENIPAVIALTDPEGCPLSRFKDSLGNPTHILRIGESYKEKQRTIQAKKEVEQRRAGGYSRKYASKAKNLADDMVRNTARDLLYYAVTQDAMLIFENLSRGFGRQGKRTFMAERQYTRMEDWLTAKLAYEGLPSKTYLSKTLAQYTSKTCSNCGFTITSADYDRVLEKLKKTATGWMTTINGKELKVEGQITYYNRYKRQNVVKDLSVELDRLSEESVNNDISSWTKGRSGEALSLLKKRFSHRPVQEKFVCLNCGFETHADEQAALNIARSWLFLRSQEYKKYQTNKTTGNTDKRAFVETWQSFYRKKLKEVWKPAV

SEQ ID NO: 42529 - protein, 978 aa, synthetic construct
  REGION 1..978: note = engineered CasX variant
QEIKRINKIRRRLVKDSNTKKAGKTGPMKTLLVRVMTPDLRERLENLRKKPENIPQPISNTSQANLNKLLTDYTEMKKAILHVYWEEFQKDPVGLMSRVAQPASKKIDQNKLKPEMDEKGNLTTAGFACSQCGQPLFVYKLEQVSEKGKAYTNYFGRCNVAEHEKLILLAQLKPEKDSDEAVTYSLGKFGQRALDFYSIHVTKESTHPVKPLAQIAGNRYASPVGKALSDACMGTIASFLSKYQDIIIEHQKVVKGNQKRLESLRELAGKENLEYPSVTLPPQPHTKEGVDAYNEVIARVRMWVNLNLWQKLKLSRDDAKPLLRLKGFPSFPLVERQANEVDWWDMVCNVKKLINEKKEDGKVFWQNLAGYKRQEALRPYLSSEEDRKKGKKFARYQLGDLLLHLEKKHGEYDWGKVYDEAWERIDKKVEGLSKHIKLEEERRSEDAQSKAALTDWLRAKASFVIEGLKEADKDEFCRCELKLQKWYGDLRGKPFAIEAENSILDISGFSKQYNCAFIWQKDGVKKLNLYLIINYFKGGKLRFKKIKPEAFEANRFYTVINKKSGEIVPMEVNFNFDDPNLIILPLAFGKRQGREFIWNDLLSLETGSLKLANGRVIEKTLYNRRTRQDEPALFVALTFERREVLDSSNIKPMNLIGVDRGENIPAVIALTDPEGCPLSRFKDSLGNPTHILRIGESYKEKQRTIQAKKEVEQRRAGGYSRKYASKAKNLADDMVRNTARDLLYYAVTQDAMLIFENLSRGFGRQGKRTFMAERQYTRMEDWLTAKLAYEGLPSKTYLSKTLAQYTSKTCSNCGFTITSADYDRVLEKLKKTATGWMTTINGKELKVEGQITYYNRYKRQNVVKDLSVELDRLSEESVNNDISSWTKGRSGEALSLLKKRFSHRPVQEKFVCLNCGFETHADEQAALNIARSWLFLRSQEYKKYQTNKTTGNTDKRAFVETWQSFYRKKLKEVWKPAV

SEQ ID NO: 42530 - protein, 978 aa, synthetic construct
  REGION 1..978: note = engineered CasX variant
QEIKRINKIRRRLVKDSNTKKAGKTGPMKTLLVRVMTPDLRERLENLRKKPENIPQPISNTSQANLNKLLTDYTEMKKAILHVYWEEFQKDPVGLMSRVAQPASKKIDQNKLKPEMDEKGNLTTAGFACSQCGQPLFVYKLEQVSEKGKAYTNYFGRCNVAEHEKLILLAQLKPEKDSDEAVTYSLGKFGQRALDFYSIHVTKESTHPVKPLAQIAGNRYASYPVGKALSDACMGTIASFLSKYQDIIIEHQKVVKGNQKRLESLRELAGKENLEYPSVTLPPQPHTKEGVDAYNEVIARVRMWVNLNLWQKLKLSRDDAKPLLRLKGFPSFPLVERQANEVDWWDMVCNVKKLINEKKEDGKVFWQNLAGYKRQEALRPYLSSEEDRKKGKKFARYQLGDLLLHLEKKHGEDWGDVYDEAWERIDKKVEGLSKHIKLEEERRSEDAQSKAALTDWLRAKASFVIEGLKEADKDEFCRCELKLQKWYGDLRGKPFAIEAENSILDISGFSKQYNCAFIWQKDGVKKLNLYLIINYFKGGKLRFKKIKPEAFEANRFYTVINKKSGEIVPMEVNFNFDDPNLIILPLAFGKRQGREFIWNDLLSLETGSLKLANGRVIEKTLYNRRTRQDEPALFVALTFERREVLDSSNIKPMNLIGVDRGENIPAVIALTDPEGCPLSRFKDSLGNPTHILRIGESYKEKQRTIQAKKEVEQRRAGGYSRKYASKAKNLADDMVRNTARDLLYYAVTQDAMLIFENLSRGFGRQGKRTFMAERQYTRMEDWLTAKLAYEGLPSKTYLSKTLAQYTSKTCSNCGFTITSADYDRVLEKLKKTATGWMTTINGKELKVEGQITYYNRYKRQNVVKDLSVELDRLSEESVNNDISSWTKGRSGEALSLLKKRFSHRPVQEKFVCLNCGFETHADEQAALNIARSWLFLRSQEYKKYQTNKTTGNTDKRAFVETWQSFYRKKLKEVWKPAV

SEQ ID NO: 42531 - protein, 978 aa, synthetic construct
  REGION 1..978: note = engineered CasX variant
QEIKRINKIRRRLVKDSNTKKAGKTGPMKTLLVRVMTPDLRERLENLRKKPENIPQPISNTSQANLNKLLTDYTEMKKAILHVYWEEFQKDPVGLMSRVAQPASKKIDQNKLKPEMDEKGNLTTAGFACSQCGQPLFVYKLEQVSEKGKAYTNYFGRCNVAEHEKLILLAQLKPEKDSDEAVTYSLGKFGQRALDFYSIHVTKESTHPVKPLAQIAGNRYASHPVGKALSDACMGTIASFLSKYQDIIIEHQKVVKGNQKRLESLRELAGKENLEYPSVTLPPQPHTKEGVDAYNEVIARVRMWVNLNLWQKLKLSRDDAKPLLRLKGFPSFPLVERQANEVDWWDMVCNVKKLINEKKEDGKVFWQNLAGYKRQEALRPYLSSEEDRKKGKKFARYQLGDLLLHLEKKHGEDWGDVYDEAWERIDKKVEGLSKHIKLEEERRSEDAQSKAALTDWLRAKASFVIEGLKEADKDEFCRCELKLQKWYGDLRGKPFAIEAENSILDISGFSKQYNCAFIWQKDGVKKLNLYLIINYFKGGKLRFKKIKPEAFEANRFYTVINKKSGEIVPMEVNFNFDDPNLIILPLAFGKRQGREFIWNDLLSLETGSLKLANGRVIEKTLYNRRTRQDEPALFVALTFERREVLDSSNIKPMNLIGVDRGENIPAVIALTDPEGCPLSRFKDSLGNPTHILRIGESYKEKQRTIQAKKEVEQRRAGGYSRKYASKAKNLADDMVRNTARDLLYYAVTQDAMLIFENLSRGFGRQGKRTFMAERQYTRMEDWLTAKLAYEGLPSKTYLSKTLAQYTSKTCSNCGFTITSADYDRVLEKLKKTATGWMTTINGKELKVEGQITYYNRYKRQNVVKDLSVELDRLSEESVNNDISSWTKGRSGEALSLLKKRFSHRPVQEKFVCLNCGFETHADEQAALNIARSWLFLRSQEYKKYQTNKTTGNTDKRAFVETWQSFYRKKLKEVWKPAV

SEQ ID NO: 42532 - protein, 978 aa, synthetic construct
  REGION 1..978: note = engineered CasX variant
QEIKRINKIRRRLVKDSNTKKAGKTGPMKTLLVRVMTPDLRERLENLRKKPENIPQPISNTSQANLNKLLTDYTEMKKAILHVYWEEFQKDPVGLMSRVAQPASKKIDQNKLKPEMDEKGNLTTAGFACSQCGQPLFVYKLEQVSEKGKAYTNYFGRCNVAEHEKLILLAQLKPEKDSDEAVTYSLGKFGQRALDFYSIHVTKESTHPVKPLAQIAGNRYASSPVGKALSDACMGTIASFLSKYQDIIIEHQKVVKGNQKRLESLRELAGKENLEYPSVTLPPQPHTKEGVDAYNEVIARVRMWVNLNLWQKLKLSRDDAKPLLRLKGFPSFPLVERQANEVDWWDMVCNVKKLINEKKEDGKVFWQNLAGYKRQEALRPYLSSEEDRKKGKKFARYQLGDLLLHLEKKHGEDWGDVYDEAWERIDKKVEGLSKHIKLEEERRSEDAQSKAALTDWLRAKASFVIEGLKEADKDEFCRCELKLQKWYGDLRGKPFAIEAENSILDISGFSKQYNCAFIWQKDGVKKLNLYLIINYFKGGKLRFKKIKPEAFEANRFYTVINKKSGEIVPMEVNFNFDDPNLIILPLAFGKRQGREFIWNDLLSLETGSLKLANGRVIEKTLYNRRTRQDEPALFVALTFERREVLDSSNIKPMNLIGVDRGENIPAVIALTDPEGCPLSRFKDSLGNPTHILRIGESYKEKQRTIQAKKEVEQRRAGGYSRKYASKAKNLADDMVRNTARDLLYYAVTQDAMLIFENLSRGFGRQGKRTFMAERQYTRMEDWLTAKLAYEGLPSKTYLSKTLAQYTSKTCSNCGFTITSADYDRVLEKLKKTATGWMTTINGKELKVEGQITYYNRYKRQNVVKDLSVELDRLSEESVNNDISSWTKGRSGEALSLLKKRFSHRPVQEKFVCLNCGFETHADEQAALNIARSWLFLRSQEYKKYQTNKTTGNTDKRAFVETWQSFYRKKLKEVWKPAV

SEQ ID NO: 42533 - protein, 978 aa, synthetic construct
  REGION 1..978: note = engineered CasX variant
QEIKRINKIRRRLVKDSNTKKAGKTGPMKTLLVRVMTPDLRERLENLRKKPENIPQPISNTSQANLNKLLTDYTEMKKAILHVYWEEFQKDPVGLMSRVAQPASKKIDQNKLKPEMDEKGNLTTAGFACSQCGQPLFVYKLEQVSEKGKAYTNYFGRCNVAEHEKLILLAQLKPEKDSDEAVTYSLGKFGQRALDFYSIHVTKESTHPVKPLAQIAGNRYASTPVGKALSDACMGTIASFLSKYQDIIIEHQKVVKGNQKRLESLRELAGKENLEYPSVTLPPQPHTKEGVDAYNEVIARVRMWVNLNLWQKLKLSRDDAKPLLRLKGFPSFPLVERQANEVDWWDMVCNVKKLINEKKEDGKVFWQNLAGYKRQEALRPYLSSEEDRKKGKKFARYQLGDLLLHLEKKHGEDWGDVYDEAWERIDKKVEGLSKHIKLEEERRSEDAQSKAALTDWLRAKASFVIEGLKEADKDEFCRCELKLQKWYGDLRGKPFAIEAENSILDISGFSKQYNCAFIWQKDGVKKLNLYLIINYFKGGKLRFKKIKPEAFEANRFYTVINKKSGEIVPMEVNFNFDDPNLIILPLAFGKRQGREFIWNDLLSLETGSLKLANGRVIEKTLYNRRTRQDEPALFVALTFERREVLDSSNIKPMNLIGVDRGENIPAVIALTDPEGCPLSRFKDSLGNPTHILRIGESYKEKQRTIQAKKEVEQRRAGGYSRKYASKAKNLADDMVRNTARDLLYYAVTQDAMLIFENLSRGFGRQGKRTFMAERQYTRMEDWLTAKLAYEGLPSKTYLSKTLAQYTSKTCSNCGFTITSADYDRVLEKLKKTATGWMTTINGKELKVEGQITYYNRYKRQNVVKDLSVELDRLSEESVNNDISSWTKGRSGEALSLLKKRFSHRPVQEKFVCLNCGFETHADEQAALNIARSWLFLRSQEYKKYQTNKTTGNTDKRAFVETWQSFYRKKLKEVWKPAV

SEQ ID NO: 42534 - protein, 978 aa, synthetic construct
  REGION 1..978: note = engineered CasX variant
QEIKRINKIRRRLVKDSNTKKAGKTGPMKTLLVRVMTPDLRERLENLRKKPENIPQPISNTSQANLNKLLTDYTEMKKAILHVYWEEFQKDPVGLMSRVAQPASKKIDQNKLKPEMDEKGNLTTAGFACSQCGQPLFVYKLEQVSEKGKAYTNYFGRCNVAEHEKLILLAQLKPEKDSDEAVTYSLGKFGQRALDFYSIHVTKESTHPVKPLAQIAGNRYASAPVGKALSDACMGTIASFLSKYQDIIIEHQKVVKGNQKRLESLRELAGKENLEYPSVTLPPQPHTKEGVDAYNEVIARVRMWVNLNLWQKLKLSRDDAKPLLRLKGFPSFPLVERQANEVDWWDMVCNVKKLINEKKEDGKVFWQNLAGYKRQEALRPYLSSEEDRKKGKKFARYQLGDLLLHLEKKHGEDWGDVYDEAWERIDKKVEGLSKHIKLEEERRSEDAQSKAALTDWLRAKASFVIEGLKEADKDEFCRCELKLQKWYGDLRGKPFAIEAENSILDISGFSKQYNCAFIWQKDGVKKLNLYLIINYFKGGKLRFKKIKPEAFEANRFYTVINKKSGEIVPMEVNFNFDDPNLIILPLAFGKRQGREFIWNDLLSLETGSLKLANGRVIEKTLYNRRTRQDEPALFVALTFERREVLDSSNIKPMNLIGVDRGENIPAVIALTDPEGCPLSRFKDSLGNPTHILRIGESYKEKQRTIQAKKEVEQRRAGGYSRKYASKAKNLADDMVRNTARDLLYYAVTQDAMLIFENLSRGFGRQGKRTFMAERQYTRMEDWLTAKLAYEGLPSKTYLSKTLAQYTSKTCSNCGFTITSADYDRVLEKLKKTATGWMTTINGKELKVEGQITYYNRYKRQNVVKDLSVELDRLSEESVNNDISSWTKGRSGEALSLLKKRFSHRPVQEKFVCLNCGFETHADEQAALNIARSWLFLRSQEYKKYQTNKTTGNTDKRAFVETWQSFYRKKLKEVWKPAV

SEQ ID NO: 42535 - protein, 978 aa, synthetic construct
  REGION 1..978: note = engineered CasX variant
QEIKRINKIRRRLVKDSNTKKAGKTGPMKTLLVRVMTPDLRERLENLRKKPENIPQPISNTSQANLNKLLTDYTEMKKAILHVYWEEFQKDPVGLMSRVAQPASKKIDQNKLKPEMDEKGNLTTAGFACSQCGQPLFVYKLEQVSEKGKAYTNYFGRCNVAEHEKLILLAQLKPEKDSDEAVTYSLGKFGQRALDFYSIHVTKESTHPVKPLAQIAGNRYASVPVGKALSDACMGTIASFLSKYQDIIIEHQKVVKGNQKRLESLRELAGKENLEYPSVTLPPQPHTKEGVDAYNEVIARVRMWVNLNLWQKLKLSRDDAKPLLRLKGFPSFPLVERQANEVDWWDMVCNVKKLINEKKEDGKVFWQNLAGYKRQEALRPYLSSEEDRKKGKKFARYQLGDLLLHLEKKHGEDWGDVYDEAWERIDKKVEGLSKHIKLEEERRSEDAQSKAALTDWLRAKASFVIEGLKEADKDEFCRCELKLQKWYGDLRGKPFAIEAENSILDISGFSKQYNCAFIWQKDGVKKLNLYLIINYFKGGKLRFKKIKPEAFEANRFYTVINKKSGEIVPMEVNFNFDDPNLIILPLAFGKRQGREFIWNDLLSLETGSLKLANGRVIEKTLYNRRTRQDEPALFVALTFERREVLDSSNIKPMNLIGVDRGENIPAVIALTDPEGCPLSRFKDSLGNPTHILRIGESYKEKQRTIQAKKEVEQRRAGGYSRKYASKAKNLADDMVRNTARDLLYYAVTQDAMLIFENLSRGFGRQGKRTFMAERQYTRMEDWLTAKLAYEGLPSKTYLSKTLAQYTSKTCSNCGFTITSADYDRVLEKLKKTATGWMTTINGKELKVEGQITYYNRYKRQNVVKDLSVELDRLSEESVNNDISSWTKGRSGEALSLLKKRFSHRPVQEKFVCLNCGFETHADEQAALNIARSWLFLRSQEYKKYQTNKTTGNTDKRAFVETWQSFYRKKLKEVWKPAV

SEQ ID NO: 42536 - protein, 978 aa, synthetic construct
  REGION 1..978: note = engineered CasX variant
QEIKRINKIRRRLVKDSNTKKAGKTGPMKTLLVRVMTPDLRERLENLRKKPENIPQPISNTSQANLNKLLTDYTEMKKAILHVYWEEFQKDPVGLMSRVAQPASKKIDQNKLKPEMDEKGNLTTAGFACSQCGQPLFVYKLEQVSEKGKAYTNYFGRCNVAEHEKLIKLAQLKPEKDSDEAVTYSLGKFGQRALDFYSIHVTKESTHPVKPLAQIAGNRYASGPVGKALSDACMGTIASFLSKYQDIIIEHQKVVKGNQKRLESLRELAGKENLEYPSVTLPPQPHTKEGVDAYNEVIARVRMWVNLNLWQKLKLSRDDAKPLLRLKGFPSFPLVERQANEVDWWDMVCNVKKLINEKKEDGKVFWQNLAGYKRQEALRPYLSSEEDRKKGKKFARYQLGDLLLHLEKKHGEDWGDVYDEAWERIDKKVEGLSKHIKLEEERRSEDAQSKAALTDWLRAKASFVIEGLKEADKDEFCRCELKLQKWYGDLRGKPFAIEAENSILDISGFSKQYNCAFIWQKDGVKKLNLYLIINYFKGGKLRFKKIKPEAFEANRFYTVINKKSGEIVPMEVNFNFDDPNLIILPLAFGKRQGREFIWNDLLSLETGSLKLANGRVIEKTLYNRRTRQDEPALFVALTFERREVLDSSNIKPMNLIGVDRGENIPAVIALTDPEGCPLSRFKDSLGNPTHILRIGESYKEKQRTIQAKKEVEQRRAGGYSRKYASKAKNLADDMVRNTARDLLYYAVTQDAMLIFENLSRGFGRQGKRTFMAERQYTRMEDWLTAKLAYEGLPSKTYLSKTLAQYTSKTCSNCGFTITSADYDRVLEKLKKTATGWMTTINGKELKVEGQITYYNRYKRQNVVKDLSVELDRLSEESVNNDISSWTKGRSGEALSLLKKRFSHRPVQEKFVCLNCGFETHADEQAALNIARSWLFLRSQEYKKYQTNKTTGNTDKRAFVETWQSFYRKKLKEVWKPAV

SEQ ID NO: 42537 - protein, 977 aa, synthetic construct
  REGION 1..977: note = engineered CasX variant
QEIKRINKIRRRLVKDSNTKKAGKTGPMKTLLVRVMTPDLRERLENLRKKPENIPQPISNTSQANLNKLLTDYTEMKKAILHVYWEEFQKDPVGLMSRVAQPASKKIDQNKLKPEMDEKGNLTTAGFACSQCGQPLFVYKLEQVSEKGKAYTNYFGRCNVAEHEKLILLAQLKPEKDSDEAVTYSLGKFGQRALDFYSIHVTKESTHPVKPLAQIAGNRYASPVGKALSDACMGTIASFLSKYQDIIIEHQKVVKGNQKRLESLRELAGKENLEYPSVTLPPQPHTKEGVDAYNEVIARVRMWVNLNLWQKLKLSRDDAKPLLRLKGFPSFPLVERQANEVDWWDMVCNVKKLINEKKEDGKVFWQNLAGYKRQEALRPYLSSEEDRKKGKKFARYQLGDLLLHLEKKHGEDWGDVYDEAWERIDKKVEGLSKHIKLEEERRSEDAQSKAALTDWLRAKASFVIEGLKEADKDEFCRCELKLQKWYGDLRGKPFAIEAENSILDISGFSKQYNCAFIWQKDGVKKLNLYLIINYFKGGKLRFKKIKPEAFEANRFYTVINKKSGEIVPMEVNFNFDDPNLIILPLAFGKRQGREFIWNDLLSLETGSLKLANGRVIEKTLYNRRTRQDEPALFVALTFERREVLDSSNIKPMNLIGVDRGENIPAVIALTDPEGCPLSRFKDSLGNPTHILRIGESYKEKQRTIQAKKEVEQRRAGGYSRKYASKAKNLADDMVRNTARDLLYYAVTQDAMLIFENLSRGFGRQGKRTFMAERQYTRMEDWLTAKLAYEGLPSKTYLSKTLAQYTSKTCSNCGFTITSADYDRVLEKLKKTATGWMTTINGKELKVEGQITYYNRYKRQNVVKDLSVELDRLSEESVNNDISSWTKGRSGEALSLLKKRFSHRPVQEKFVCLNCGFETHADEQAALNIARSWLFLRSQEYKKYQTNKTTGNTDKRAFVETWQSFYRKKLKEVWKPAV

SEQ ID NO: 42538 - protein, 978 aa, synthetic construct
  REGION 1..978: note = engineered CasX variant
QEIKRINKIRRRLVKDSNTKKAGKTGPMKTLLVRVMTPDLRERLENLRKKPENIPQPISNTSQANLNKLLTDYTEMKKAILHVYWEEFQKDPVGLMSRVAQPASKKIDQNKLKPEMDEKGNLTTAGFACSQCGQPLFVYKLEQVSEKGKAYTNYFGRCNVAEHEKLILLAQLKPEKDSDEAVTYSLGKFGQRALDFYSIHVTKESTHPVKPLAQIAGNRYASYPVGKALSDACMGTIASFLSKYQDIIIEHQKVVKGNQKRLESLRELAGKENLEYPSVTLPPQPHTKEGVDAYNEVIARVRMWVNLNLWQKLKLSRDDAKPLLRLKGFPSFPLVERQANEVDWWDMVCNVKKLINEKKEDGKVFWQNLAGYKRQEALRPYLSSEEDRKKGKKFARYQLGDLLLHLEKKHGEDWGKVYGEAWERIDKKVEGLSKHIKLEEERRSEDAQSKAALTDWLRAKASFVIEGLKEADKDEFCRCELKLQKWYGDLRGKPFAIEAENSILDISGFSKQYNCAFIWQKDGVKKLNLYLIINYFKGGKLRFKKIKPEAFEANRFYTVINKKSGEIVPMEVNFNFDDPNLIILPLAFGKRQGREFIWNDLLSLETGSLKLANGRVIEKTLYNRRTRQDEPALFVALTFERREVLDSSNIKPMNLIGVDRGENIPAVIALTDPEGCPLSRFKDSLGNPTHILRIGESYKEKQRTIQAKKEVEQRRAGGYSRKYASKAKNLADDMVRNTARDLLYYAVTQDAMLIFENLSRGFGRQGKRTFMAERQYTRMEDWLTAKLAYEGLPSKTYLSKTLAQYTSKTCSNCGFTITSADYDRVLEKLKKTATGWMTTINGKELKVEGQITYYNRYKRQNVVKDLSVELDRLSEESVNNDISSWTKGRSGEALSLLKKRFSHRPVQEKFVCLNCGFETHADEQAALNIARSWLFLRSQEYKKYQTNKTTGNTDKRAFVETWQSFYRKKLKEVWKPAV

SEQ ID NO: 42539 - protein, 978 aa, synthetic construct
  REGION 1..978: note = engineered CasX variant
QEIKRINKIRRRLVKDSNTKKAGKTGPMKTLLVRVMTPDLRERLENLRKKPENIPQPISNTSQANLNKLLTDYTEMKKAILHVYWEEFQKDPVGLMSRVAQPASKKIDQNKLKPEMDEKGNLTTAGFACSQCGQPLFVYKLEQVSEKGKAYTNYFGRCNVAEHEKLILLAQLKPEKDSDEAVTYSLGKFGQRALDFYSIHVTKESTHPVKPLAQIAGNRYASHPVGKALSDACMGTIASFLSKYQDIIIEHQKVVKGNQKRLESLRELAGKENLEYPSVTLPPQPHTKEGVDAYNEVIARVRMWVNLNLWQKLKLSRDDAKPLLRLKGFPSFPLVERQANEVDWWDMVCNVKKLINEKKEDGKVFWQNLAGYKRQEALRPYLSSEEDRKKGKKFARYQLGDLLLHLEKKHGEDWGKVYGEAWERIDKKVEGLSKHIKLEEERRSEDAQSKAALTDWLRAKASFVIEGLKEADKDEFCRCELKLQKWYGDLRGKPFAIEAENSILDISGFSKQYNCAFIWQKDGVKKLNLYLIINYFKGGKLRFKKIKPEAFEANRFYTVINKKSGEIVPMEVNFNFDDPNLIILPLAFGKRQGREFIWNDLLSLETGSLKLANGRVIEKTLYNRRTRQDEPALFVALTFERREVLDSSNIKPMNLIGVDRGENIPAVIALTDPEGCPLSRFKDSLGNPTHILRIGESYKEKQRTIQAKKEVEQRRAGGYSRKYASKAKNLADDMVRNTARDLLYYAVTQDAMLIFENLSRGFGRQGKRTFMAERQYTRMEDWLTAKLAYEGLPSKTYLSKTLAQYTSKTCSNCGFTITSADYDRVLEKLKKTATGWMTTINGKELKVEGQITYYNRYKRQNVVKDLSVELDRLSEESVNNDISSWTKGRSGEALSLLKKRFSHRPVQEKFVCLNCGFETHADEQAALNIARSWLFLRSQEYKKYQTNKTTGNTDKRAFVETWQSFYRKKLKEVWKPAV

SEQ ID NO: 42540 - protein, 978 aa, synthetic construct
  REGION 1..978: note = engineered CasX variant
QEIKRINKIRRRLVKDSNTKKAGKTGPMKTLLVRVMTPDLRERLENLRKKPENIPQPISNTSQANLNKLLTDYTEMKKAILHVYWEEFQKDPVGLMSRVAQPASKKIDQNKLKPEMDEKGNLTTAGFACSQCGQPLFVYKLEQVSEKGKAYTNYFGRCNVAEHEKLILLAQLKPEKDSDEAVTYSLGKFGQRALDFYSIHVTKESTHPVKPLAQIAGNRYASSPVGKALSDACMGTIASFLSKYQDIIIEHQKVVKGNQKRLESLRELAGKENLEYPSVTLPPQPHTKEGVDAYNEVIARVRMWVNLNLWQKLKLSRDDAKPLLRLKGFPSFPLVERQANEVDWWDMVCNVKKLINEKKEDGKVFWQNLAGYKRQEALRPYLSSEEDRKKGKKFARYQLGDLLLHLEKKHGEDWGKVYGEAWERIDKKVEGLSKHIKLEEERRSEDAQSKAALTDWLRAKASFVIEGLKEADKDEFCRCELKLQKWYGDLRGKPFAIEAENSILDISGFSKQYNCAFIWQKDGVKKLNLYLIINYFKGGKLRFKKIKPEAFEANRFYTVINKKSGEIVPMEVNFNFDDPNLIILPLAFGKRQGREFIWNDLLSLETGSLKLANGRVIEKTLYNRRTRQDEPALFVALTFERREVLDSSNIKPMNLIGVDRGENIPAVIALTDPEGCPLSRFKDSLGNPTHILRIGESYKEKQRTIQAKKEVEQRRAGGYSRKYASKAKNLADDMVRNTARDLLYYAVTQDAMLIFENLSRGFGRQGKRTFMAERQYTRMEDWLTAKLAYEGLPSKTYLSKTLAQYTSKTCSNCGFTITSADYDRVLEKLKKTATGWMTTINGKELKVEGQITYYNRYKRQNVVKDLSVELDRLSEESVNNDISSWTKGRSGEALSLLKKRFSHRPVQEKFVCLNCGFETHADEQAALNIARSWLFLRSQEYKKYQTNKTTGNTDKRAFVETWQSFYRKKLKEVWKPAV

SEQ ID NO: 42541 - protein, 978 aa, synthetic construct
  REGION 1..978: note = engineered CasX variant
QEIKRINKIRRRLVKDSNTKKAGKTGPMKTLLVRVMTPDLRERLENLRKKPENIPQPISNTSQANLNKLLTDYTEMKKAILHVYWEEFQKDPVGLMSRVAQPASKKIDQNKLKPEMDEKGNLTTAGFACSQCGQPLFVYKLEQVSEKGKAYTNYFGRCNVAEHEKLILLAQLKPEKDSDEAVTYSLGKFGQRALDFYSIHVTKESTHPVKPLAQIAGNRYASTPVGKALSDACMGTIASFLSKYQDIIIEHQKVVKGNQKRLESLRELAGKENLEYPSVTLPPQPHTKEGVDAYNEVIARVRMWVNLNLWQKLKLSRDDAKPLLRLKGFPSFPLVERQANEVDWWDMVCNVKKLINEKKEDGKVFWQNLAGYKRQEALRPYLSSEEDRKKGKKFARYQLGDLLLHLEKKHGEDWGKVYGEAWERIDKKVEGLSKHIKLEEERRSEDAQSKAALTDWLRAKASFVIEGLKEADKDEFCRCELKLQKWYGDLRGKPFAIEAENSILDISGFSKQYNCAFIWQKDGVKKLNLYLIINYFKGGKLRFKKIKPEAFEANRFYTVINKKSGEIVPMEVNFNFDDPNLIILPLAFGKRQGREFIWNDLLSLETGSLKLANGRVIEKTLYNRRTRQDEPALFVALTFERREVLDSSNIKPMNLIGVDRGENIPAVIALTDPEGCPLSRFKDSLGNPTHILRIGESYKEKQRTIQAKKEVEQRRAGGYSRKYASKAKNLADDMVRNTARDLLYYAVTQDAMLIFENLSRGFGRQGKRTFMAERQYTRMEDWLTAKLAYEGLPSKTYLSKTLAQYTSKTCSNCGFTITSADYDRVLEKLKKTATGWMTTINGKELKVEGQITYYNRYKRQNVVKDLSVELDRLSEESVNNDISSWTKGRSGEALSLLKKRFSHRPVQEKFVCLNCGFETHADEQAALNIARSWLFLRSQEYKKYQTNKTTGNTDKRAFVETWQSFYRKKLKEVWKPAV

SEQ ID NO: 42542 - protein, 978 aa, synthetic construct
  REGION 1..978: note = engineered CasX variant
QEIKRINKIRRRLVKDSNTKKAGKTGPMKTLLVRVMTPDLRERLENLRKKPENIPQPISNTSQANLNKLLTDYTEMKKAILHVYWEEFQKDPVGLMSRVAQPASKKIDQNKLKPEMDEKGNLTTAGFACSQCGQPLFVYKLEQVSEKGKAYTNYFGRCNVAEHEKLILLAQLKPEKDSDEAVTYSLGKFGQRALDFYSIHVTKESTHPVKPLAQIAGNRYASAPVGKALSDACMGTIASFLSKYQDIIIEHQKVVKGNQKRLESLRELAGKENLEYPSVTLPPQPHTKEGVDAYNEVIARVRMWVNLNLWQKLKLSRDDAKPLLRLKGFPSFPLVERQANEVDWWDMVCNVKKLINEKKEDGKVFWQNLAGYKRQEALRPYLSSEEDRKKGKKFARYQLGDLLLHLEKKHGEDWGKVYGEAWERIDKKVEGLSKHIKLEEERRSEDAQSKAALTDWLRAKASFVIEGLKEADKDEFCRCELKLQKWYGDLRGKPFAIEAENSILDISGFSKQYNCAFIWQKDGVKKLNLYLIINYFKGGKLRFKKIKPEAFEANRFYTVINKKSGEIVPMEVNFNFDDPNLIILPLAFGKRQGREFIWNDLLSLETGSLKLANGRVIEKTLYNRRTRQDEPALFVALTFERREVLDSSNIKPMNLIGVDRGENIPAVIALTDPEGCPLSRFKDSLGNPTHILRIGESYKEKQRTIQAKKEVEQRRAGGYSRKYASKAKNLADDMVRNTARDLLYYAVTQDAMLIFENLSRGFGRQGKRTFMAERQYTRMEDWLTAKLAYEGLPSKTYLSKTLAQYTSKTCSNCGFTITSADYDRVLEKLKKTATGWMTTINGKELKVEGQITYYNRYKRQNVVKDLSVELDRLSEESVNNDISSWTKGRSGEALSLLKKRFSHRPVQEKFVCLNCGFETHADEQAALNIARSWLFLRSQEYKKYQTNKTTGNTDKRAFVETWQSFYRKKLKEVWKPAV

SEQ ID NO: 42543 - protein, 978 aa, synthetic construct
  REGION 1..978: note = engineered CasX variant
QEIKRINKIRRRLVKDSNTKKAGKTGPMKTLLVRVMTPDLRERLENLRKKPENIPQPISNTSQANLNKLLTDYTEMKKAILHVYWEEFQKDPVGLMSRVAQPASKKIDQNKLKPEMDEKGNLTTAGFACSQCGQPLFVYKLEQVSEKGKAYTNYFGRCNVAEHEKLILLAQLKPEKDSDEAVTYSLGKFGQRALDFYSIHVTKESTHPVKPLAQIAGNRYASVPVGKALSDACMGTIASFLSKYQDIIIEHQKVVKGNQKRLESLRELAGKENLEYPSVTLPPQPHTKEGVDAYNEVIARVRMWVNLNLWQKLKLSRDDAKPLLRLKGFPSFPLVERQANEVDWWDMVCNVKKLINEKKEDGKVFWQNLAGYKRQEALRPYLSSEEDRKKGKKFARYQLGDLLLHLEKKHGEDWGKVYGEAWERIDKKVEGLSKHIKLEEERRSEDAQSKAALTDWLRAKASFVIEGLKEADKDEFCRCELKLQKWYGDLRGKPFAIEAENSILDISGFSKQYNCAFIWQKDGVKKLNLYLIINYFKGGKLRFKKIKPEAFEANRFYTVINKKSGEIVPMEVNFNFDDPNLIILPLAFGKRQGREFIWNDLLSLETGSLKLANGRVIEKTLYNRRTRQDEPALFVALTFERREVLDSSNIKPMNLIGVDRGENIPAVIALTDPEGCPLSRFKDSLGNPTHILRIGESYKEKQRTIQAKKEVEQRRAGGYSRKYASKAKNLADDMVRNTARDLLYYAVTQDAMLIFENLSRGFGRQGKRTFMAERQYTRMEDWLTAKLAYEGLPSKTYLSKTLAQYTSKTCSNCGFTITSADYDRVLEKLKKTATGWMTTINGKELKVEGQITYYNRYKRQNVVKDLSVELDRLSEESVNNDISSWTKGRSGEALSLLKKRFSHRPVQEKFVCLNCGFETHADEQAALNIARSWLFLRSQEYKKYQTNKTTGNTDKRAFVETWQSFYRKKLKEVWKPAV

SEQ ID NO: 42544 - protein, 978 aa, synthetic construct
  REGION 1..978: note = engineered CasX variant
QEIKRINKIRRRLVKDSNTKKAGKTGPMKTLLVRVMTPDLRERLENLRKKPENIPQPISNTSQANLNKLLTDYTEMKKAILHVYWEEFQKDPVGLMSRVAQPASKKIDQNKLKPEMDEKGNLTTAGFACSQCGQPLFVYKLEQVSEKGKAYTNYFGRCNVAEHEKLIKLAQLKPEKDSDEAVTYSLGKFGQRALDFYSIHVTKESTHPVKPLAQIAGNRYASGPVGKALSDACMGTIASFLSKYQDIIIEHQKVVKGNQKRLESLRELAGKENLEYPSVTLPPQPHTKEGVDAYNEVIARVRMWVNLNLWQKLKLSRDDAKPLLRLKGFPSFPLVERQANEVDWWDMVCNVKKLINEKKEDGKVFWQNLAGYKRQEALRPYLSSEEDRKKGKKFARYQLGDLLLHLEKKHGEDWGKVYGEAWERIDKKVEGLSKHIKLEEERRSEDAQSKAALTDWLRAKASFVIEGLKEADKDEFCRCELKLQKWYGDLRGKPFAIEAENSILDISGFSKQYNCAFIWQKDGVKKLNLYLIINYFKGGKLRFKKIKPEAFEANRFYTVINKKSGEIVPMEVNFNFDDPNLIILPLAFGKRQGREFIWNDLLSLETGSLKLANGRVIEKTLYNRRTRQDEPALFVALTFERREVLDSSNIKPMNLIGVDRGENIPAVIALTDPEGCPLSRFKDSLGNPTHILRIGESYKEKQRTIQAKKEVEQRRAGGYSRKYASKAKNLADDMVRNTARDLLYYAVTQDAMLIFENLSRGFGRQGKRTFMAERQYTRMEDWLTAKLAYEGLPSKTYLSKTLAQYTSKTCSNCGFTITSADYDRVLEKLKKTATGWMTTINGKELKVEGQITYYNRYKRQNVVKDLSVELDRLSEESVNNDISSWTKGRSGEALSLLKKRFSHRPVQEKFVCLNCGFETHADEQAALNIARSWLFLRSQEYKKYQTNKTTGNTDKRAFVETWQSFYRKKLKEVWKPAV

SEQ ID NO: 42545 - protein, 977 aa, synthetic construct
  REGION 1..977: note = engineered CasX variant
QEIKRINKIRRRLVKDSNTKKAGKTGPMKTLLVRVMTPDLRERLENLRKKPENIPQPISNTSQANLNKLLTDYTEMKKAILHVYWEEFQKDPVGLMSRVAQPASKKIDQNKLKPEMDEKGNLTTAGFACSQCGQPLFVYKLEQVSEKGKAYTNYFGRCNVAEHEKLILLAQLKPEKDSDEAVTYSLGKFGQRALDFYSIHVTKESTHPVKPLAQIAGNRYASPVGKALSDACMGTIASFLSKYQDIIIEHQKVVKGNQKRLESLRELAGKENLEYPSVTLPPQPHTKEGVDAYNEVIARVRMWVNLNLWQKLKLSRDDAKPLLRLKGFPSFPLVERQANEVDWWDMVCNVKKLINEKKEDGKVFWQNLAGYKRQEALRPYLSSEEDRKKGKKFARYQLGDLLLHLEKKHGEDWGKVYGEAWERIDKKVEGLSKHIKLEEERRSEDAQSKAALTDWLRAKASFVIEGLKEADKDEFCRCELKLQKWYGDLRGKPFAIEAENSILDISGFSKQYNCAFIWQKDGVKKLNLYLIINYFKGGKLRFKKIKPEAFEANRFYTVINKKSGEIVPMEVNFNFDDPNLIILPLAFGKRQGREFIWNDLLSLETGSLKLANGRVIEKTLYNRRTRQDEPALFVALTFERREVLDSSNIKPMNLIGVDRGENIPAVIALTDPEGCPLSRFKDSLGNPTHILRIGESYKEKQRTIQAKKEVEQRRAGGYSRKYASKAKNLADDMVRNTARDLLYYAVTQDAMLIFENLSRGFGRQGKRTFMAERQYTRMEDWLTAKLAYEGLPSKTYLSKTLAQYTSKTCSNCGFTITSADYDRVLEKLKKTATGWMTTINGKELKVEGQITYYNRYKRQNVVKDLSVELDRLSEESVNNDISSWTKGRSGEALSLLKKRFSHRPVQEKFVCLNCGFETHADEQAALNIARSWLFLRSQEYKKYQTNKTTGNTDKRAFVETWQSFYRKKLKEVWKPAV

SEQ ID NO: 42546 - protein, 978 aa, synthetic construct
  REGION 1..978: note = engineered CasX variant
QEIKRINKIRRRLVKDSNTKKAGKTGPMKTLLVRVMTPDLRERLENLRKKPENIPQPISNTSQANLNKLLTDYTEMKKAILHVYWEEFQKDPVGLMSRVAQPASKKIDQNKLKPEMDEKGNLTTAGFACSQCGQPLFVYKLEQVSEKGKAYTNYFGRCNVAEHEKLILLAQLKPEKDSDEAVTYSLGKFGQRALDFYSIHVTKESTHPVKPLAQIAGNRYASYPVGKALSDACMGTIASFLSKYQDIIIEHQKVVKGNQKRLESLRELAGKENLEYPSVTLPPQPHTKEGVDAYNEVIARVRMWVNLNLWQKLKLSRDDAKPLLRLKGFPSFPLVERQANEVDWWDMVCNVKKLINEKKEDGKVFWQNLAGYKRQEALRPYLSSEEDRKKGKKFARYQLGDLLLHLEKKHGEDWGKVYDEAWERIDKKVEGLSKHIKLEEERRSEDAQSKAALTDWLRAKASFVIEGKKEADKDEFCRCELKLQKWYGDLRGKPFAIEAENSILDISGFSKQYNCAFIWQKDGVKKLNLYLIINYFKGGKLRFKKIKPEAFEANRFYTVINKKSGEIVPMEVNFNFDDPNLIILPLAFGKRQGREFIWNDLLSLETGSLKLANGRVIEKTLYNRRTRQDEPALFVALTFERREVLDSSNIKPMNLIGVDRGENIPAVIALTDPEGCPLSRFKDSLGNPTHILRIGESYKEKQRTIQAKKEVEQRRAGGYSRKYASKAKNLADDMVRNTARDLLYYAVTQDAMLIFENLSRGFGRQGKRTFMAERQYTRMEDWLTAKLAYEGLPSKTYLSKTLAQYTSKTCSNCGFTITSADYDRVLEKLKKTATGWMTTINGKELKVEGQITYYNRYKRQNVVKDLSVELDRLSEESVNNDISSWTKGRSGEALSLLKKRFSHRPVQEKFVCLNCGFETHADEQAALNIARSWLFLRSQEYKKYQTNKTTGNTDKRAFVETWQSFYRKKLKEVWKPAV

SEQ ID NO: 42547 - protein, 978 aa, synthetic construct
  REGION 1..978: note = engineered CasX variant
QEIKRINKIRRRLVKDSNTKKAGKTGPMKTLLVRVMTPDLRERLENLRKKPENIPQPISNTSQANLNKLLTDYTEMKKAILHVYWEEFQKDPVGLMSRVAQPASKKIDQNKLKPEMDEKGNLTTAGFACSQCGQPLFVYKLEQVSEKGKAYTNYFGRCNVAEHEKLILLAQLKPEKDSDEAVTYSLGKFGQRALDFYSIHVTKESTHPVKPLAQIAGNRYASHPVGKALSDACMGTIASFLSKYQDIIIEHQKVVKGNQKRLESLRELAGKENLEYPSVTLPPQPHTKEGVDAYNEVIARVRMWVNLNLWQKLKLSRDDAKPLLRLKGFPSFPLVERQANEVDWWDMVCNVKKLINEKKEDGKVFWQNLAGYKRQEALRPYLSSEEDRKKGKKFARYQLGDLLLHLEKKHGEDWGKVYDEAWERIDKKVEGLSKHIKLEEERRSEDAQSKAALTDWLRAKASFVIEGKKEADKDEFCRCELKLQKWYGDLRGKPFAIEAENSILDISGFSKQYNCAFIWQKDGVKKLNLYLIINYFKGGKLRFKKIKPEAFEANRFYTVINKKSGEIVPMEVNFNFDDPNLIILPLAFGKRQGREFIWNDLLSLETGSLKLANGRVIEKTLYNRRTRQDEPALFVALTFERREVLDSSNIKPMNLIGVDRGENIPAVIALTDPEGCPLSRFKDSLGNPTHILRIGESYKEKQRTIQAKKEVEQRRAGGYSRKYASKAKNLADDMVRNTARDLLYYAVTQDAMLIFENLSRGFGRQGKRTFMAERQYTRMEDWLTAKLAYEGLPSKTYLSKTLAQYTSKTCSNCGFTITSADYDRVLEKLKKTATGWMTTINGKELKVEGQITYYNRYKRQNVVKDLSVELDRLSEESVNNDISSWTKGRSGEALSLLKKRFSHRPVQEKFVCLNCGFETHADEQAALNIARSWLFLRSQEYKKYQTNKTTGNTDKRAFVETWQSFYRKKLKEVWKPAV

SEQ ID NO: 42548 - protein, 978 aa, synthetic construct
  REGION 1..978: note = engineered CasX variant
QEIKRINKIRRRLVKDSNTKKAGKTGPMKTLLVRVMTPDLRERLENLRKKPENIPQPISNTSQANLNKLLTDYTEMKKAILHVYWEEFQKDPVGLMSRVAQPASKKIDQNKLKPEMDEKGNLTTAGFACSQCGQPLFVYKLEQVSEKGKAYTNYFGRCNVAEHEKLILLAQLKPEKDSDEAVTYSLGKFGQRALDFYSIHVTKESTHPVKPLAQIAGNRYASSPVGKALSDACMGTIASFLSKYQDIIIEHQKVVKGNQKRLESLRELAGKENLEYPSVTLPPQPHTKEGVDAYNEVIARVRMWVNLNLWQKLKLSRDDAKPLLRLKGFPSFPLVERQANEVDWWDMVCNVKKLINEKKEDGKVFWQNLAGYKRQEALRPYLSSEEDRKKGKKFARYQLGDLLLHLEKKHGEDWGKVYDEAWERIDKKVEGLSKHIKLEEERRSEDAQSKAALTDWLRAKASFVIEGKKEADKDEFCRCELKLQKWYGDLRGKPFAIEAENSILDISGFSKQYNCAFIWQKDGVKKLNLYLIINYFKGGKLRFKKIKPEAFEANRFYTVINKKSGEIVPMEVNFNFDDPNLIILPLAFGKRQGREFIWNDLLSLETGSLKLANGRVIEKTLYNRRTRQDEPALFVALTFERREVLDSSNIKPMNLIGVDRGENIPAVIALTDPEGCPLSRFKDSLGNPTHILRIGESYKEKQRTIQAKKEVEQRRAGGYSRKYASKAKNLADDMVRNTARDLLYYAVTQDAMLIFENLSRGFGRQGKRTFMAERQYTRMEDWLTAKLAYEGLPSKTYLSKTLAQYTSKTCSNCGFTITSADYDRVLEKLKKTATGWMTTINGKELKVEGQITYYNRYKRQNVVKDLSVELDRLSEESVNNDISSWTKGRSGEALSLLKKRFSHRPVQEKFVCLNCGFETHADEQAALNIARSWLFLRSQEYKKYQTNKTTGNTDKRAFVETWQSFYRKKLKEVWKPAV

SEQ ID NO: 42549 - protein, 978 aa, synthetic construct
  REGION 1..978: note = engineered CasX variant
QEIKRINKIRRRLVKDSNTKKAGKTGPMKTLLVRVMTPDLRERLENLRKKPENIPQPISNTSQANLNKLLTDYTEMKKAILHVYWEEFQKDPVGLMSRVAQPASKKIDQNKLKPEMDEKGNLTTAGFACSQCGQPLFVYKLEQVSEKGKAYTNYFGRCNVAEHEKLILLAQLKPEKDSDEAVTYSLGKFGQRALDFYSIHVTKESTHPVKPLAQIAGNRYASTPVGKALSDACMGTIASFLSKYQDIIIEHQKVVKGNQKRLESLRELAGKENLEYPSVTLPPQPHTKEGVDAYNEVIARVRMWVNLNLWQKLKLSRDDAKPLLRLKGFPSFPLVERQANEVDWWDMVCNVKKLINEKKEDGKVFWQNLAGYKRQEALRPYLSSEEDRKKGKKFARYQLGDLLLHLEKKHGEDWGKVYDEAWERIDKKVEGLSKHIKLEEERRSEDAQSKAALTDWLRAKASFVIEGKKEADKDEFCRCELKLQKWYGDLRGKPFAIEAENSILDISGFSKQYNCAFIWQKDGVKKLNLYLIINYFKGGKLRFKKIKPEAFEANRFYTVINKKSGEIVPMEVNFNFDDPNLIILPLAFGKRQGREFIWNDLLSLETGSLKLANGRVIEKTLYNRRTRQDEPALFVALTFERREVLDSSNIKPMNLIGVDRGENIPAVIALTDPEGCPLSRFKDSLGNPTHILRIGESYKEKQRTIQAKKEVEQRRAGGYSRKYASKAKNLADDMVRNTARDLLYYAVTQDAMLIFENLSRGFGRQGKRTFMAERQYTRMEDWLTAKLAYEGLPSKTYLSKTLAQYTSKTCSNCGFTITSADYDRVLEKLKKTATGWMTTINGKELKVEGQITYYNRYKRQNVVKDLSVELDRLSEESVNNDISSWTKGRSGEALSLLKKRFSHRPVQEKFVCLNCGFETHADEQAALNIARSWLFLRSQEYKKYQTNKTTGNTDKRAFVETWQSFYRKKLKEVWKPAV

SEQ ID NO: 42550 - protein, 978 aa, synthetic construct
  REGION 1..978: note = engineered CasX variant
QEIKRINKIRRRLVKDSNTKKAGKTGPMKTLLVRVMTPDLRERLENLRKKPENIPQPISNTSQANLNKLLTDYTEMKKAILHVYWEEFQKDPVGLMSRVAQPASKKIDQNKLKPEMDEKGNLTTAGFACSQCGQPLFVYKLEQVSEKGKAYTNYFGRCNVAEHEKLILLAQLKPEKDSDEAVTYSLGKFGQRALDFYSIHVTKESTHPVKPLAQIAGNRYASAPVGKALSDACMGTIASFLSKYQDIIIEHQKVVKGNQKRLESLRELAGKENLEYPSVTLPPQPHTKEGVDAYNEVIARVRMWVNLNLWQKLKLSRDDAKPLLRLKGFPSFPLVERQANEVDWWDMVCNVKKLINEKKEDGKVFWQNLAGYKRQEALRPYLSSEEDRKKGKKFARYQLGDLLLHLEKKHGEDWGKVYDEAWERIDKKVEGLSKHIKLEEERRSEDAQSKAALTDWLRAKASFVIEGKKEADKDEFCRCELKLQKWYGDLRGKPFAIEAENSILDISGFSKQYNCAFIWQKDGVKKLNLYLIINYFKGGKLRFKKIKPEAFEANRFYTVINKKSGEIVPMEVNFNFDDPNLIILPLAFGKRQGREFIWNDLLSLETGSLKLANGRVIEKTLYNRRTRQDEPALFVALTFERREVLDSSNIKPMNLIGVDRGENIPAVIALTDPEGCPLSRFKDSLGNPTHILRIGESYKEKQRTIQAKKEVEQRRAGGYSRKYASKAKNLADDMVRNTARDLLYYAVTQDAMLIFENLSRGFGRQGKRTFMAERQYTRMEDWLTAKLAYEGLPSKTYLSKTLAQYTSKTCSNCGFTITSADYDRVLEKLKKTATGWMTTINGKELKVEGQITYYNRYKRQNVVKDLSVELDRLSEESVNNDISSWTKGRSGEALSLLKKRFSHRPVQEKFVCLNCGFETHADEQAALNIARSWLFLRSQEYKKYQTNKTTGNTDKRAFVETWQSFYRKKLKEVWKPAV

SEQ ID NO: 42551 - protein, 978 aa, synthetic construct
  REGION 1..978: note = engineered CasX variant
QEIKRINKIRRRLVKDSNTKKAGKTGPMKTLLVRVMTPDLRERLENLRKKPENIPQPISNTSQANLNKLLTDYTEMKKAILHVYWEEFQKDPVGLMSRVAQPASKKIDQNKLKPEMDEKGNLTTAGFACSQCGQPLFVYKLEQVSEKGKAYTNYFGRCNVAEHEKLILLAQLKPEKDSDEAVTYSLGKFGQRALDFYSIHVTKESTHPVKPLAQIAGNRYASVPVGKALSDACMGTIASFLSKYQDIIIEHQKVVKGNQKRLESLRELAGKENLEYPSVTLPPQPHTKEGVDAYNEVIARVRMWVNLNLWQKLKLSRDDAKPLLRLKGFPSFPLVERQANEVDWWDMVCNVKKLINEKKEDGKVFWQNLAGYKRQEALRPYLSSEEDRKKGKKFARYQLGDLLLHLEKKHGEDWGKVYDEAWERIDKKVEGLSKHIKLEEERRSEDAQSKAALTDWLRAKASFVIEGKKEADKDEFCRCELKLQKWYGDLRGKPFAIEAENSILDISGFSKQYNCAFIWQKDGVKKLNLYLIINYFKGGKLRFKKIKPEAFEANRFYTVINKKSGEIVPMEVNFNFDDPNLIILPLAFGKRQGREFIWNDLLSLETGSLKLANGRVIEKTLYNRRTRQDEPALFVALTFERREVLDSSNIKPMNLIGVDRGENIPAVIALTDPEGCPLSRFKDSLGNPTHILRIGESYKEKQRTIQAKKEVEQRRAGGYSRKYASKAKNLADDMVRNTARDLLYYAVTQDAMLIFENLSRGFGRQGKRTFMAERQYTRMEDWLTAKLAYEGLPSKTYLSKTLAQYTSKTCSNCGFTITSADYDRVLEKLKKTATGWMTTINGKELKVEGQITYYNRYKRQNVVKDLSVELDRLSEESVNNDISSWTKGRSGEALSLLKKRFSHRPVQEKFVCLNCGFETHADEQAALNIARSWLFLRSQEYKKYQTNKTTGNTDKRAFVETWQSFYRKKLKEVWKPAV

SEQ ID NO: 42552 - protein, 978 aa, synthetic construct
  REGION 1..978: note = engineered CasX variant
QEIKRINKIRRRLVKDSNTKKAGKTGPMKTLLVRVMTPDLRERLENLRKKPENIPQPISNTSQANLNKLLTDYTEMKKAILHVYWEEFQKDPVGLMSRVAQPASKKIDQNKLKPEMDEKGNLTTAGFACSQCGQPLFVYKLEQVSEKGKAYTNYFGRCNVAEHEKLIKLAQLKPEKDSDEAVTYSLGKFGQRALDFYSIHVTKESTHPVKPLAQIAGNRYASGPVGKALSDACMGTIASFLSKYQDIIIEHQKVVKGNQKRLESLRELAGKENLEYPSVTLPPQPHTKEGVDAYNEVIARVRMWVNLNLWQKLKLSRDDAKPLLRLKGFPSFPLVERQANEVDWWDMVCNVKKLINEKKEDGKVFWQNLAGYKRQEALRPYLSSEEDRKKGKKFARYQLGDLLLHLEKKHGEDWGKVYDEAWERIDKKVEGLSKHIKLEEERRSEDAQSKAALTDWLRAKASFVIEGKKEADKDEFCRCELKLQKWYGDLRGKPFAIEAENSILDISGFSKQYNCAFIWQKDGVKKLNLYLIINYFKGGKLRFKKIKPEAFEANRFYTVINKKSGEIVPMEVNFNFDDPNLIILPLAFGKRQGREFIWNDLLSLETGSLKLANGRVIEKTLYNRRTRQDEPALFVALTFERREVLDSSNIKPMNLIGVDRGENIPAVIALTDPEGCPLSRFKDSLGNPTHILRIGESYKEKQRTIQAKKEVEQRRAGGYSRKYASKAKNLADDMVRNTARDLLYYAVTQDAMLIFENLSRGFGRQGKRTFMAERQYTRMEDWLTAKLAYEGLPSKTYLSKTLAQYTSKTCSNCGFTITSADYDRVLEKLKKTATGWMTTINGKELKVEGQITYYNRYKRQNVVKDLSVELDRLSEESVNNDISSWTKGRSGEALSLLKKRFSHRPVQEKFVCLNCGFETHADEQAALNIARSWLFLRSQEYKKYQTNKTTGNTDKRAFVETWQSFYRKKLKEVWKPAV

SEQ ID NO: 42553 - protein, 977 aa, synthetic construct
  REGION 1..977: note = engineered CasX variant
QEIKRINKIRRRLVKDSNTKKAGKTGPMKTLLVRVMTPDLRERLENLRKKPENIPQPISNTSQANLNKLLTDYTEMKKAILHVYWEEFQKDPVGLMSRVAQPASKKIDQNKLKPEMDEKGNLTTAGFACSQCGQPLFVYKLEQVSEKGKAYTNYFGRCNVAEHEKLILLAQLKPEKDSDEAVTYSLGKFGQRALDFYSIHVTKESTHPVKPLAQIAGNRYASPVGKALSDACMGTIASFLSKYQDIIIEHQKVVKGNQKRLESLRELAGKENLEYPSVTLPPQPHTKEGVDAYNEVIARVRMWVNLNLWQKLKLSRDDAKPLLRLKGFPSFPLVERQANEVDWWDMVCNVKKLINEKKEDGKVFWQNLAGYKRQEALRPYLSSEEDRKKGKKFARYQLGDLLLHLEKKHGEDWGKVYDEAWERIDKKVEGLSKHIKLEEERRSEDAQSKAALTDWLRAKASFVIEGKKEADKDEFCRCELKLQKWYGDLRGKPFAIEAENSILDISGFSKQYNCAFIWQKDGVKKLNLYLIINYFKGGKLRFKKIKPEAFEANRFYTVINKKSGEIVPMEVNFNFDDPNLIILPLAFGKRQGREFIWNDLLSLETGSLKLANGRVIEKTLYNRRTRQDEPALFVALTFERREVLDSSNIKPMNLIGVDRGENIPAVIALTDPEGCPLSRFKDSLGNPTHILRIGESYKEKQRTIQAKKEVEQRRAGGYSRKYASKAKNLADDMVRNTARDLLYYAVTQDAMLIFENLSRGFGRQGKRTFMAERQYTRMEDWLTAKLAYEGLPSKTYLSKTLAQYTSKTCSNCGFTITSADYDRVLEKLKKTATGWMTTINGKELKVEGQITYYNRYKRQNVVKDLSVELDRLSEESVNNDISSWTKGRSGEALSLLKKRFSHRPVQEKFVCLNCGFETHADEQAALNIARSWLFLRSQEYKKYQTNKTTGNTDKRAFVETWQSFYRKKLKEVWKPAV

SEQ ID NO: 42554 - protein, 978 aa, synthetic construct
  REGION 1..978: note = engineered CasX variant
QEIKRINKIRRRLVKDSNTKKAGKTGPMKTLLVRVMTPDLRERLENLRKKPENIPQPISNTSQANLNKLLTDYTEMKKAILHVYWEEFQKDPVGLMSRVAQPASKKIDQNKLKPEMDEKGNLTTAGFACSQCGQPLFVYKLEQVSEKGKAYTNYFGRCNVAEHEKLILLAQLKPEKDSDEAVTYSLGKFGQRALDFYSIHVTKESTHPVKPLAQIAGNRYASYPVGKALSDACMGTIASFLSKYQDIIIEHQKVVKGNQKRLESLRELAGKENLEYPSVTLPPQPHTKEGVDAYNEVIARVRMWVNLNLWQKLKLSRDDAKPLLRLKGFPSFPLVERQANEVDWWDMVCNVKKLINEKKEDGKVFWQNLAGYKRQEALRPYLSSEEDRKKGKKFARYQLGDLLLHLEKKHGEDWGKVYDEAWERIDKKVEGLSKHIKLEEERRSEDAQSKAALTDWLRAKASFVIEGSKEADKDEFCRCELKLQKWYGDLRGKPFAIEAENSILDISGFSKQYNCAFIWQKDGVKKLNLYLIINYFKGGKLRFKKIKPEAFEANRFYTVINKKSGEIVPMEVNFNFDDPNLIILPLAFGKRQGREFIWNDLLSLETGSLKLANGRVIEKTLYNRRTRQDEPALFVALTFERREVLDSSNIKPMNLIGVDRGENIPAVIALTDPEGCPLSRFKDSLGNPTHILRIGESYKEKQRTIQAKKEVEQRRAGGYSRKYASKAKNLADDMVRNTARDLLYYAVTQDAMLIFENLSRGFGRQGKRTFMAERQYTRMEDWLTAKLAYEGLPSKTYLSKTLAQYTSKTCSNCGFTITSADYDRVLEKLKKTATGWMTTINGKELKVEGQITYYNRYKRQNVVKDLSVELDRLSEESVNNDISSWTKGRSGEALSLLKKRFSHRPVQEKFVCLNCGFETHADEQAALNIARSWLFLRSQEYKKYQTNKTTGNTDKRAFVETWQSFYRKKLKEVWKPAV

SEQ ID NO: 42555 - protein, 978 aa, synthetic construct
  REGION 1..978: note = engineered CasX variant
QEIKRINKIRRRLVKDSNTKKAGKTGPMKTLLVRVMTPDLRERLENLRKKPENIPQPISNTSQANLNKLLTDYTEMKKAILHVYWEEFQKDPVGLMSRVAQPASKKIDQNKLKPEMDEKGNLTTAGFACSQCGQPLFVYKLEQVSEKGKAYTNYFGRCNVAEHEKLILLAQLKPEKDSDEAVTYSLGKFGQRALDFYSIHVTKESTHPVKPLAQIAGNRYASHPVGKALSDACMGTIASFLSKYQDIIIEHQKVVKGNQKRLESLRELAGKENLEYPSVTLPPQPHTKEGVDAYNEVIARVRMWVNLNLWQKLKLSRDDAKPLLRLKGFPSFPLVERQANEVDWWDMVCNVKKLINEKKEDGKVFWQNLAGYKRQEALRPYLSSEEDRKKGKKFARYQLGDLLLHLEKKHGEDWGKVYDEAWERIDKKVEGLSKHIKLEEERRSEDAQSKAALTDWLRAKASFVIEGSKEADKDEFCRCELKLQKWYGDLRGKPFAIEAENSILDISGFSKQYNCAFIWQKDGVKKLNLYLIINYFKGGKLRFKKIKPEAFEANRFYTVINKKSGEIVPMEVNFNFDDPNLIILPLAFGKRQGREFIWNDLLSLETGSLKLANGRVIEKTLYNRRTRQDEPALFVALTFERREVLDSSNIKPMNLIGVDRGENIPAVIALTDPEGCPLSRFKDSLGNPTHILRIGESYKEKQRTIQAKKEVEQRRAGGYSRKYASKAKNLADDMVRNTARDLLYYAVTQDAMLIFENLSRGFGRQGKRTFMAERQYTRMEDWLTAKLAYEGLPSKTYLSKTLAQYTSKTCSNCGFTITSADYDRVLEKLKKTATGWMTTINGKELKVEGQITYYNRYKRQNVVKDLSVELDRLSEESVNNDISSWTKGRSGEALSLLKKRFSHRPVQEKFVCLNCGFETHADEQAALNIARSWLFLRSQEYKKYQTNKTTGNTDKRAFVETWQSFYRKKLKEVWKPAV

SEQ ID NO: 42556 - protein, 978 aa, synthetic construct
  REGION 1..978: note = engineered CasX variant
QEIKRINKIRRRLVKDSNTKKAGKTGPMKTLLVRVMTPDLRERLENLRKKPENIPQPISNTSQANLNKLLTDYTEMKKAILHVYWEEFQKDPVGLMSRVAQPASKKIDQNKLKPEMDEKGNLTTAGFACSQCGQPLFVYKLEQVSEKGKAYTNYFGRCNVAEHEKLILLAQLKPEKDSDEAVTYSLGKFGQRALDFYSIHVTKESTHPVKPLAQIAGNRYASSPVGKALSDACMGTIASFLSKYQDIIIEHQKVVKGNQKRLESLRELAGKENLEYPSVTLPPQPHTKEGVDAYNEVIARVRMWVNLNLWQKLKLSRDDAKPLLRLKGFPSFPLVERQANEVDWWDMVCNVKKLINEKKEDGKVFWQNLAGYKRQEALRPYLSSEEDRKKGKKFARYQLGDLLLHLEKKHGEDWGKVYDEAWERIDKKVEGLSKHIKLEEERRSEDAQSKAALTDWLRAKASFVIEGSKEADKDEFCRCELKLQKWYGDLRGKPFAIEAENSILDISGFSKQYNCAFIWQKDGVKKLNLYLIINYFKGGKLRFKKIKPEAFEANRFYTVINKKSGEIVPMEVNFNFDDPNLIILPLAFGKRQGREFIWNDLLSLETGSLKLANGRVIEKTLYNRRTRQDEPALFVALTFERREVLDSSNIKPMNLIGVDRGENIPAVIALTDPEGCPLSRFKDSLGNPTHILRIGESYKEKQRTIQAKKEVEQRRAGGYSRKYASKAKNLADDMVRNTARDLLYYAVTQDAMLIFENLSRGFGRQGKRTFMAERQYTRMEDWLTAKLAYEGLPSKTYLSKTLAQYTSKTCSNCGFTITSADYDRVLEKLKKTATGWMTTINGKELKVEGQITYYNRYKRQNVVKDLSVELDRLSEESVNNDISSWTKGRSGEALSLLKKRFSHRPVQEKFVCLNCGFETHADEQAALNIARSWLFLRSQEYKKYQTNKTTGNTDKRAFVETWQSFYRKKLKEVWKPAV

SEQ ID NO: 42557 - protein, 978 aa, synthetic construct
  REGION 1..978: note = engineered CasX variant
QEIKRINKIRRRLVKDSNTKKAGKTGPMKTLLVRVMTPDLRERLENLRKKPENIPQPISNTSQANLNKLLTDYTEMKKAILHVYWEEFQKDPVGLMSRVAQPASKKIDQNKLKPEMDEKGNLTTAGFACSQCGQPLFVYKLEQVSEKGKAYTNYFGRCNVAEHEKLILLAQLKPEKDSDEAVTYSLGKFGQRALDFYSIHVTKESTHPVKPLAQIAGNRYASTPVGKALSDACMGTIASFLSKYQDIIIEHQKVVKGNQKRLESLRELAGKENLEYPSVTLPPQPHTKEGVDAYNEVIARVRMWVNLNLWQKLKLSRDDAKPLLRLKGFPSFPLVERQANEVDWWDMVCNVKKLINEKKEDGKVFWQNLAGYKRQEALRPYLSSEEDRKKGKKFARYQLGDLLLHLEKKHGEDWGKVYDEAWERIDKKVEGLSKHIKLEEERRSEDAQSKAALTDWLRAKASFVIEGSKEADKDEFCRCELKLQKWYGDLRGKPFAIEAENSILDISGFSKQYNCAFIWQKDGVKKLNLYLIINYFKGGKLRFKKIKPEAFEANRFYTVINKKSGEIVPMEVNFNFDDPNLIILPLAFGKRQGREFIWNDLLSLETGSLKLANGRVIEKTLYNRRTRQDEPALFVALTFERREVLDSSNIKPMNLIGVDRGENIPAVIALTDPEGCPLSRFKDSLGNPTHILRIGESYKEKQRTIQAKKEVEQRRAGGYSRKYASKAKNLADDMVRNTARDLLYYAVTQDAMLIFENLSRGFGRQGKRTFMAERQYTRMEDWLTAKLAYEGLPSKTYLSKTLAQYTSKTCSNCGFTITSADYDRVLEKLKKTATGWMTTINGKELKVEGQITYYNRYKRQNVVKDLSVELDRLSEESVNNDISSWTKGRSGEALSLLKKRFSHRPVQEKFVCLNCGFETHADEQAALNIARSWLFLRSQEYKKYQTNKTTGNTDKRAFVETWQSFYRKKLKEVWKPAV

SEQ ID NO: 42558 - protein, 978 aa, synthetic construct
  REGION 1..978: note = engineered CasX variant
QEIKRINKIRRRLVKDSNTKKAGKTGPMKTLLVRVMTPDLRERLENLRKKPENIPQPISNTSQANLNKLLTDYTEMKKAILHVYWEEFQKDPVGLMSRVAQPASKKIDQNKLKPEMDEKGNLTTAGFACSQCGQPLFVYKLEQVSEKGKAYTNYFGRCNVAEHEKLILLAQLKPEKDSDEAVTYSLGKFGQRALDFYSIHVTKESTHPVKPLAQIAGNRYASAPVGKALSDACMGTIASFLSKYQDIIIEHQKVVKGNQKRLESLRELAGKENLEYPSVTLPPQPHTKEGVDAYNEVIARVRMWVNLNLWQKLKLSRDDAKPLLRLKGFPSFPLVERQANEVDWWDMVCNVKKLINEKKEDGKVFWQNLAGYKRQEALRPYLSSEEDRKKGKKFARYQLGDLLLHLEKKHGEDWGKVYDEAWERIDKKVEGLSKHIKLEEERRSEDAQSKAALTDWLRAKASFVIEGSKEADKDEFCRCELKLQKWYGDLRGKPFAIEAENSILDISGFSKQYNCAFIWQKDGVKKLNLYLIINYFKGGKLRFKKIKPEAFEANRFYTVINKKSGEIVPMEVNFNFDDPNLIILPLAFGKRQGREFIWNDLLSLETGSLKLANGRVIEKTLYNRRTRQDEPALFVALTFERREVLDSSNIKPMNLIGVDRGENIPAVIALTDPEGCPLSRFKDSLGNPTHILRIGESYKEKQRTIQAKKEVEQRRAGGYSRKYASKAKNLADDMVRNTARDLLYYAVTQDAMLIFENLSRGFGRQGKRTFMAERQYTRMEDWLTAKLAYEGLPSKTYLSKTLAQYTSKTCSNCGFTITSADYDRVLEKLKKTATGWMTTINGKELKVEGQITYYNRYKRQNVVKDLSVELDRLSEESVNNDISSWTKGRSGEALSLLKKRFSHRPVQEKFVCLNCGFETHADEQAALNIARSWLFLRSQEYKKYQTNKTTGNTDKRAFVETWQSFYRKKLKEVWKPAV

SEQ ID NO: 42559 - protein, 978 aa, synthetic construct
  REGION 1..978: note = engineered CasX variant
QEIKRINKIRRRLVKDSNTKKAGKTGPMKTLLVRVMTPDLRERLENLRKKPENIPQPISNTSQANLNKLLTDYTEMKKAILHVYWEEFQKDPVGLMSRVAQPASKKIDQNKLKPEMDEKGNLTTAGFACSQCGQPLFVYKLEQVSEKGKAYTNYFGRCNVAEHEKLILLAQLKPEKDSDEAVTYSLGKFGQRALDFYSIHVTKESTHPVKPLAQIAGNRYASVPVGKALSDACMGTIASFLSKYQDIIIEHQKVVKGNQKRLESLRELAGKENLEYPSVTLPPQPHTKEGVDAYNEVIARVRMWVNLNLWQKLKLSRDDAKPLLRLKGFPSFPLVERQANEVDWWDMVCNVKKLINEKKEDGKVFWQNLAGYKRQEALRPYLSSEEDRKKGKKFARYQLGDLLLHLEKKHGEDWGKVYDEAWERIDKKVEGLSKHIKLEEERRSEDAQSKAALTDWLRAKASFVIEGSKEADKDEFCRCELKLQKWYGDLRGKPFAIEAENSILDISGFSKQYNCAFIWQKDGVKKLNLYLIINYFKGGKLRFKKIKPEAFEANRFYTVINKKSGEIVPMEVNFNFDDPNLIILPLAFGKRQGREFIWNDLLSLETGSLKLANGRVIEKTLYNRRTRQDEPALFVALTFERREVLDSSNIKPMNLIGVDRGENIPAVIALTDPEGCPLSRFKDSLGNPTHILRIGESYKEKQRTIQAKKEVEQRRAGGYSRKYASKAKNLADDMVRNTARDLLYYAVTQDAMLIFENLSRGFGRQGKRTFMAERQYTRMEDWLTAKLAYEGLPSKTYLSKTLAQYTSKTCSNCGFTITSADYDRVLEKLKKTATGWMTTINGKELKVEGQITYYNRYKRQNVVKDLSVELDRLSEESVNNDISSWTKGRSGEALSLLKKRFSHRPVQEKFVCLNCGFETHADEQAALNIARSWLFLRSQEYKKYQTNKTTGNTDKRAFVETWQSFYRKKLKEVWKPAV

SEQ ID NO: 42560 - protein, 978 aa, synthetic construct
  REGION 1..978: note = engineered CasX variant
QEIKRINKIRRRLVKDSNTKKAGKTGPMKTLLVRVMTPDLRERLENLRKKPENIPQPISNTSQANLNKLLTDYTEMKKAILHVYWEEFQKDPVGLMSRVAQPASKKIDQNKLKPEMDEKGNLTTAGFACSQCGQPLFVYKLEQVSEKGKAYTNYFGRCNVAEHEKLIKLAQLKPEKDSDEAVTYSLGKFGQRALDFYSIHVTKESTHPVKPLAQIAGNRYASGPVGKALSDACMGTIASFLSKYQDIIIEHQKVVKGNQKRLESLRELAGKENLEYPSVTLPPQPHTKEGVDAYNEVIARVRMWVNLNLWQKLKLSRDDAKPLLRLKGFPSFPLVERQANEVDWWDMVCNVKKLINEKKEDGKVFWQNLAGYKRQEALRPYLSSEEDRKKGKKFARYQLGDLLLHLEKKHGEDWGKVYDEAWERIDKKVEGLSKHIKLEEERRSEDAQSKAALTDWLRAKASFVIEGSKEADKDEFCRCELKLQKWYGDLRGKPFAIEAENSILDISGFSKQYNCAFIWQKDGVKKLNLYLIINYFKGGKLRFKKIKPEAFEANRFYTVINKKSGEIVPMEVNFNFDDPNLIILPLAFGKRQGREFIWNDLLSLETGSLKLANGRVIEKTLYNRRTRQDEPALFVALTFERREVLDSSNIKPMNLIGVDRGENIPAVIALTDPEGCPLSRFKDSLGNPTHILRIGESYKEKQRTIQAKKEVEQRRAGGYSRKYASKAKNLADDMVRNTARDLLYYAVTQDAMLIFENLSRGFGRQGKRTFMAERQYTRMEDWLTAKLAYEGLPSKTYLSKTLAQYTSKTCSNCGFTITSADYDRVLEKLKKTATGWMTTINGKELKVEGQITYYNRYKRQNVVKDLSVELDRLSEESVNNDISSWTKGRSGEALSLLKKRFSHRPVQEKFVCLNCGFETHADEQAALNIARSWLFLRSQEYKKYQTNKTTGNTDKRAFVETWQSFYRKKLKEVWKPAV

SEQ ID NO: 42561 - protein, 977 aa, synthetic construct
  REGION 1..977: note = engineered CasX variant
QEIKRINKIRRRLVKDSNTKKAGKTGPMKTLLVRVMTPDLRERLENLRKKPENIPQPISNTSQANLNKLLTDYTEMKKAILHVYWEEFQKDPVGLMSRVAQPASKKIDQNKLKPEMDEKGNLTTAGFACSQCGQPLFVYKLEQVSEKGKAYTNYFGRCNVAEHEKLILLAQLKPEKDSDEAVTYSLGKFGQRALDFYSIHVTKESTHPVKPLAQIAGNRYASPVGKALSDACMGTIASFLSKYQDIIIEHQKVVKGNQKRLESLRELAGKENLEYPSVTLPPQPHTKEGVDAYNEVIARVRMWVNLNLWQKLKLSRDDAKPLLRLKGFPSFPLVERQANEVDWWDMVCNVKKLINEKKEDGKVFWQNLAGYKRQEALRPYLSSEEDRKKGKKFARYQLGDLLLHLEKKHGEDWGKVYDEAWERIDKKVEGLSKHIKLEEERRSEDAQSKAALTDWLRAKASFVIEGSKEADKDEFCRCELKLQKWYGDLRGKPFAIEAENSILDISGFSKQYNCAFIWQKDGVKKLNLYLIINYFKGGKLRFKKIKPEAFEANRFYTVINKKSGEIVPMEVNFNFDDPNLIILPLAFGKRQGREFIWNDLLSLETGSLKLANGRVIEKTLYNRRTRQDEPALFVALTFERREVLDSSNIKPMNLIGVDRGENIPAVIALTDPEGCPLSRFKDSLGNPTHILRIGESYKEKQRTIQAKKEVEQRRAGGYSRKYASKAKNLADDMVRNTARDLLYYAVTQDAMLIFENLSRGFGRQGKRTFMAERQYTRMEDWLTAKLAYEGLPSKTYLSKTLAQYTSKTCSNCGFTITSADYDRVLEKLKKTATGWMTTINGKELKVEGQITYYNRYKRQNVVKDLSVELDRLSEESVNNDISSWTKGRSGEALSLLKKRFSHRPVQEKFVCLNCGFETHADEQAALNIARSWLFLRSQEYKKYQTNKTTGNTDKRAFVETWQSFYRKKLKEVWKPAV

SEQ ID NO: 42562 - protein, 979 aa, synthetic construct
  REGION 1..979: note = engineered CasX variant
QEIKRINKIRRRLVKDSNTKKAGKTGPMKTLLVRVMTPDLRERLENLRKKPENIPQPISNTSQANLNKLLTDYTEMKKAILHVYWEEFQKDPVGLMSRVAQPASKKIDQNKLKPEMDEKGNLTTAGFACSQCGQPLFVYKLEQVSEKGKAYTNYFGRCNVAEHEKLILLAQLKPEKDSDEAVTYSLGKFGQRALDFYSIHVTKESTHPVKPLAQIAGNRYASYPVGKALSDACMGTIASFLSKYQDIIIEHQKVVKGNQKRLESLRELAGKENLEYPSVTLPPQPHTKEGVDAYNEVIARVRMWVNLNLWQKLKLSRDDAKPLLRLKGFPSFPLVERQANEVDWWDMVCNVKKLINEKKEDGKVFWQNLAGYKRQEALRPYLSSEEDRKKGKKFARYQLGDLLLHLEKKHGEDWGKVYDEAWERIDKKVEGLSKHIKLEEERRSEDAQSKAALTDWLRAKASFVIEGLKEADDKDEFCRCELKLQKWYGDLRGKPFAIEAENSILDISGFSKQYNCAFIWQKDGVKKLNLYLIINYFKGGKLRFKKIKPEAFEANRFYTVINKKSGEIVPMEVNFNFDDPNLIILPLAFGKRQGREFIWNDLLSLETGSLKLANGRVIEKTLYNRRTRQDEPALFVALTFERREVLDSSNIKPMNLIGVDRGENIPAVIALTDPEGCPLSRFKDSLGNPTHILRIGESYKEKQRTIQAKKEVEQRRAGGYSRKYASKAKNLADDMVRNTARDLLYYAVTQDAMLIFENLSRGFGRQGKRTFMAERQYTRMEDWLTAKLAYEGLPSKTYLSKTLAQYTSKTCSNCGFTITSADYDRVLEKLKKTATGWMTTINGKELKVEGQITYYNRYKRQNVVKDLSVELDRLSEESVNNDISSWTKGRSGEALSLLKKRFSHRPVQEKFVCLNCGFETHADEQAALNIARSWLFLRSQEYKKYQTNKTTGNTDKRAFVETWQSFYRKKLKEVWKPAV

SEQ ID NO: 42563 - protein, 979 aa, synthetic construct
  REGION 1..979: note = engineered CasX variant
QEIKRINKIRRRLVKDSNTKKAGKTGPMKTLLVRVMTPDLRERLENLRKKPENIPQPISNTSQANLNKLLTDYTEMKKAILHVYWEEFQKDPVGLMSRVAQPASKKIDQNKLKPEMDEKGNLTTAGFACSQCGQPLFVYKLEQVSEKGKAYTNYFGRCNVAEHEKLILLAQLKPEKDSDEAVTYSLGKFGQRALDFYSIHVTKESTHPVKPLAQIAGNRYASHPVGKALSDACMGTIASFLSKYQDIIIEHQKVVKGNQKRLESLRELAGKENLEYPSVTLPPQPHTKEGVDAYNEVIARVRMWVNLNLWQKLKLSRDDAKPLLRLKGFPSFPLVERQANEVDWWDMVCNVKKLINEKKEDGKVFWQNLAGYKRQEALRPYLSSEEDRKKGKKFARYQLGDLLLHLEKKHGEDWGKVYDEAWERIDKKVEGLSKHIKLEEERRSEDAQSKAALTDWLRAKASFVIEGLKEADDKDEFCRCELKLQKWYGDLRGKPFAIEAENSILDISGFSKQYNCAFIWQKDGVKKLNLYLIINYFKGGKLRFKKIKPEAFEANRFYTVINKKSGEIVPMEVNFNFDDPNLIILPLAFGKRQGREFIWNDLLSLETGSLKLANGRVIEKTLYNRRTRQDEPALFVALTFERREVLDSSNIKPMNLIGVDRGENIPAVIALTDPEGCPLSRFKDSLGNPTHILRIGESYKEKQRTIQAKKEVEQRRAGGYSRKYASKAKNLADDMVRNTARDLLYYAVTQDAMLIFENLSRGFGRQGKRTFMAERQYTRMEDWLTAKLAYEGLPSKTYLSKTLAQYTSKTCSNCGFTITSADYDRVLEKLKKTATGWMTTINGKELKVEGQITYYNRYKRQNVVKDLSVELDRLSEESVNNDISSWTKGRSGEALSLLKKRFSHRPVQEKFVCLNCGFETHADEQAALNIARSWLFLRSQEYKKYQTNKTTGNTDKRAFVETWQSFYRKKLKEVWKPAV

SEQ ID NO: 42564 - protein, 979 aa, synthetic construct
  REGION 1..979: note = engineered CasX variant
QEIKRINKIRRRLVKDSNTKKAGKTGPMKTLLVRVMTPDLRERLENLRKKPENIPQPISNTSQANLNKLLTDYTEMKKAILHVYWEEFQKDPVGLMSRVAQPASKKIDQNKLKPEMDEKGNLTTAGFACSQCGQPLFVYKLEQVSEKGKAYTNYFGRCNVAEHEKLILLAQLKPEKDSDEAVTYSLGKFGQRALDFYSIHVTKESTHPVKPLAQIAGNRYASSPVGKALSDACMGTIASFLSKYQDIIIEHQKVVKGNQKRLESLRELAGKENLEYPSVTLPPQPHTKEGVDAYNEVIARVRMWVNLNLWQKLKLSRDDAKPLLRLKGFPSFPLVERQANEVDWWDMVCNVKKLINEKKEDGKVFWQNLAGYKRQEALRPYLSSEEDRKKGKKFARYQLGDLLLHLEKKHGEDWGKVYDEAWERIDKKVEGLSKHIKLEEERRSEDAQSKAALTDWLRAKASFVIEGLKEADDKDEFCRCELKLQKWYGDLRGKPFAIEAENSILDISGFSKQYNCAFIWQKDGVKKLNLYLIINYFKGGKLRFKKIKPEAFEANRFYTVINKKSGEIVPMEVNFNFDDPNLIILPLAFGKRQGREFIWNDLLSLETGSLKLANGRVIEKTLYNRRTRQDEPALFVALTFERREVLDSSNIKPMNLIGVDRGENIPAVIALTDPEGCPLSRFKDSLGNPTHILRIGESYKEKQRTIQAKKEVEQRRAGGYSRKYASKAKNLADDMVRNTARDLLYYAVTQDAMLIFENLSRGFGRQGKRTFMAERQYTRMEDWLTAKLAYEGLPSKTYLSKTLAQYTSKTCSNCGFTITSADYDRVLEKLKKTATGWMTTINGKELKVEGQITYYNRYKRQNVVKDLSVELDRLSEESVNNDISSWTKGRSGEALSLLKKRFSHRPVQEKFVCLNCGFETHADEQAALNIARSWLFLRSQEYKKYQTNKTTGNTDKRAFVETWQSFYRKKLKEVWKPAV

SEQ ID NO: 42565 - protein, 979 aa, synthetic construct
  REGION 1..979: note = engineered CasX variant
QEIKRINKIRRRLVKDSNTKKAGKTGPMKTLLVRVMTPDLRERLENLRKKPENIPQPISNTSQANLNKLLTDYTEMKKAILHVYWEEFQKDPVGLMSRVAQPASKKIDQNKLKPEMDEKGNLTTAGFACSQCGQPLFVYKLEQVSEKGKAYTNYFGRCNVAEHEKLILLAQLKPEKDSDEAVTYSLGKFGQRALDFYSIHVTKESTHPVKPLAQIAGNRYASTPVGKALSDACMGTIASFLSKYQDIIIEHQKVVKGNQKRLESLRELAGKENLEYPSVTLPPQPHTKEGVDAYNEVIARVRMWVNLNLWQKLKLSRDDAKPLLRLKGFPSFPLVERQANEVDWWDMVCNVKKLINEKKEDGKVFWQNLAGYKRQEALRPYLSSEEDRKKGKKFARYQLGDLLLHLEKKHGEDWGKVYDEAWERIDKKVEGLSKHIKLEEERRSEDAQSKAALTDWLRAKASFVIEGLKEADDKDEFCRCELKLQKWYGDLRGKPFAIEAENSILDISGFSKQYNCAFIWQKDGVKKLNLYLIINYFKGGKLRFKKIKPEAFEANRFYTVINKKSGEIVPMEVNFNFDDPNLIILPLAFGKRQGREFIWNDLLSLETGSLKLANGRVIEKTLYNRRTRQDEPALFVALTFERREVLDSSNIKPMNLIGVDRGENIPAVIALTDPEGCPLSRFKDSLGNPTHILRIGESYKEKQRTIQAKKEVEQRRAGGYSRKYASKAKNLADDMVRNTARDLLYYAVTQDAMLIFENLSRGFGRQGKRTFMAERQYTRMEDWLTAKLAYEGLPSKTYLSKTLAQYTSKTCSNCGFTITSADYDRVLEKLKKTATGWMTTINGKELKVEGQITYYNRYKRQNVVKDLSVELDRLSEESVNNDISSWTKGRSGEALSLLKKRFSHRPVQEKFVCLNCGFETHADEQAALNIARSWLFLRSQEYKKYQTNKTTGNTDKRAFVETWQSFYRKKLKEVWKPAV

SEQ ID NO: 42566 - protein, 979 aa, synthetic construct
  REGION 1..979: note = engineered CasX variant
QEIKRINKIRRRLVKDSNTKKAGKTGPMKTLLVRVMTPDLRERLENLRKKPENIPQPISNTSQANLNKLLTDYTEMKKAILHVYWEEFQKDPVGLMSRVAQPASKKIDQNKLKPEMDEKGNLTTAGFACSQCGQPLFVYKLEQVSEKGKAYTNYFGRCNVAEHEKLILLAQLKPEKDSDEAVTYSLGKFGQRALDFYSIHVTKESTHPVKPLAQIAGNRYASAPVGKALSDACMGTIASFLSKYQDIIIEHQKVVKGNQKRLESLRELAGKENLEYPSVTLPPQPHTKEGVDAYNEVIARVRMWVNLNLWQKLKLSRDDAKPLLRLKGFPSFPLVERQANEVDWWDMVCNVKKLINEKKEDGKVFWQNLAGYKRQEALRPYLSSEEDRKKGKKFARYQLGDLLLHLEKKHGEDWGKVYDEAWERIDKKVEGLSKHIKLEEERRSEDAQSKAALTDWLRAKASFVIEGLKEADDKDEFCRCELKLQKWYGDLRGKPFAIEAENSILDISGFSKQYNCAFIWQKDGVKKLNLYLIINYFKGGKLRFKKIKPEAFEANRFYTVINKKSGEIVPMEVNFNFDDPNLIILPLAFGKRQGREFIWNDLLSLETGSLKLANGRVIEKTLYNRRTRQDEPALFVALTFERREVLDSSNIKPMNLIGVDRGENIPAVIALTDPEGCPLSRFKDSLGNPTHILRIGESYKEKQRTIQAKKEVEQRRAGGYSRKYASKAKNLADDMVRNTARDLLYYAVTQDAMLIFENLSRGFGRQGKRTFMAERQYTRMEDWLTAKLAYEGLPSKTYLSKTLAQYTSKTCSNCGFTITSADYDRVLEKLKKTATGWMTTINGKELKVEGQITYYNRYKRQNVVKDLSVELDRLSEESVNNDISSWTKGRSGEALSLLKKRFSHRPVQEKFVCLNCGFETHADEQAALNIARSWLFLRSQEYKKYQTNKTTGNTDKRAFVETWQSFYRKKLKEVWKPAV

SEQ ID NO: 42567 - protein, 979 aa, synthetic construct
  REGION 1..979: note = engineered CasX variant
QEIKRINKIRRRLVKDSNTKKAGKTGPMKTLLVRVMTPDLRERLENLRKKPENIPQPISNTSQANLNKLLTDYTEMKKAILHVYWEEFQKDPVGLMSRVAQPASKKIDQNKLKPEMDEKGNLTTAGFACSQCGQPLFVYKLEQVSEKGKAYTNYFGRCNVAEHEKLILLAQLKPEKDSDEAVTYSLGKFGQRALDFYSIHVTKESTHPVKPLAQIAGNRYASVPVGKALSDACMGTIASFLSKYQDIIIEHQKVVKGNQKRLESLRELAGKENLEYPSVTLPPQPHTKEGVDAYNEVIARVRMWVNLNLWQKLKLSRDDAKPLLRLKGFPSFPLVERQANEVDWWDMVCNVKKLINEKKEDGKVFWQNLAGYKRQEALRPYLSSEEDRKKGKKFARYQLGDLLLHLEKKHGEDWGKVYDEAWERIDKKVEGLSKHIKLEEERRSEDAQSKAALTDWLRAKASFVIEGLKEADDKDEFCRCELKLQKWYGDLRGKPFAIEAENSILDISGFSKQYNCAFIWQKDGVKKLNLYLIINYFKGGKLRFKKIKPEAFEANRFYTVINKKSGEIVPMEVNFNFDDPNLIILPLAFGKRQGREFIWNDLLSLETGSLKLANGRVIEKTLYNRRTRQDEPALFVALTFERREVLDSSNIKPMNLIGVDRGENIPAVIALTDPEGCPLSRFKDSLGNPTHILRIGESYKEKQRTIQAKKEVEQRRAGGYSRKYASKAKNLADDMVRNTARDLLYYAVTQDAMLIFENLSRGFGRQGKRTFMAERQYTRMEDWLTAKLAYEGLPSKTYLSKTLAQYTSKTCSNCGFTITSADYDRVLEKLKKTATGWMTTINGKELKVEGQITYYNRYKRQNVVKDLSVELDRLSEESVNNDISSWTKGRSGEALSLLKKRFSHRPVQEKFVCLNCGFETHADEQAALNIARSWLFLRSQEYKKYQTNKTTGNTDKRAFVETWQSFYRKKLKEVWKPAV

SEQ ID NO: 42568 - protein, 979 aa, synthetic construct
  REGION 1..979: note = engineered CasX variant
QEIKRINKIRRRLVKDSNTKKAGKTGPMKTLLVRVMTPDLRERLENLRKKPENIPQPISNTSQANLNKLLTDYTEMKKAILHVYWEEFQKDPVGLMSRVAQPASKKIDQNKLKPEMDEKGNLTTAGFACSQCGQPLFVYKLEQVSEKGKAYTNYFGRCNVAEHEKLIKLAQLKPEKDSDEAVTYSLGKFGQRALDFYSIHVTKESTHPVKPLAQIAGNRYASGPVGKALSDACMGTIASFLSKYQDIIIEHQKVVKGNQKRLESLRELAGKENLEYPSVTLPPQPHTKEGVDAYNEVIARVRMWVNLNLWQKLKLSRDDAKPLLRLKGFPSFPLVERQANEVDWWDMVCNVKKLINEKKEDGKVFWQNLAGYKRQEALRPYLSSEEDRKKGKKFARYQLGDLLLHLEKKHGEDWGKVYDEAWERIDKKVEGLSKHIKLEEERRSEDAQSKAALTDWLRAKASFVIEGLKEADDKDEFCRCELKLQKWYGDLRGKPFAIEAENSILDISGFSKQYNCAFIWQKDGVKKLNLYLIINYFKGGKLRFKKIKPEAFEANRFYTVINKKSGEIVPMEVNFNFDDPNLIILPLAFGKRQGREFIWNDLLSLETGSLKLANGRVIEKTLYNRRTRQDEPALFVALTFERREVLDSSNIKPMNLIGVDRGENIPAVIALTDPEGCPLSRFKDSLGNPTHILRIGESYKEKQRTIQAKKEVEQRRAGGYSRKYASKAKNLADDMVRNTARDLLYYAVTQDAMLIFENLSRGFGRQGKRTFMAERQYTRMEDWLTAKLAYEGLPSKTYLSKTLAQYTSKTCSNCGFTITSADYDRVLEKLKKTATGWMTTINGKELKVEGQITYYNRYKRQNVVKDLSVELDRLSEESVNNDISSWTKGRSGEALSLLKKRFSHRPVQEKFVCLNCGFETHADEQAALNIARSWLFLRSQEYKKYQTNKTTGNTDKRAFVETWQSFYRKKLKEVWKPAV

SEQ ID NO: 42569 - protein, 978 aa, synthetic construct
  REGION 1..978: note = engineered CasX variant
QEIKRINKIRRRLVKDSNTKKAGKTGPMKTLLVRVMTPDLRERLENLRKKPENIPQPISNTSQANLNKLLTDYTEMKKAILHVYWEEFQKDPVGLMSRVAQPASKKIDQNKLKPEMDEKGNLTTAGFACSQCGQPLFVYKLEQVSEKGKAYTNYFGRCNVAEHEKLILLAQLKPEKDSDEAVTYSLGKFGQRALDFYSIHVTKESTHPVKPLAQIAGNRYASPVGKALSDACMGTIASFLSKYQDIIIEHQKVVKGNQKRLESLRELAGKENLEYPSVTLPPQPHTKEGVDAYNEVIARVRMWVNLNLWQKLKLSRDDAKPLLRLKGFPSFPLVERQANEVDWWDMVCNVKKLINEKKEDGKVFWQNLAGYKRQEALRPYLSSEEDRKKGKKFARYQLGDLLLHLEKKHGEDWGKVYDEAWERIDKKVEGLSKHIKLEEERRSEDAQSKAALTDWLRAKASFVIEGLKEADDKDEFCRCELKLQKWYGDLRGKPFAIEAENSILDISGFSKQYNCAFIWQKDGVKKLNLYLIINYFKGGKLRFKKIKPEAFEANRFYTVINKKSGEIVPMEVNFNFDDPNLIILPLAFGKRQGREFIWNDLLSLETGSLKLANGRVIEKTLYNRRTRQDEPALFVALTFERREVLDSSNIKPMNLIGVDRGENIPAVIALTDPEGCPLSRFKDSLGNPTHILRIGESYKEKQRTIQAKKEVEQRRAGGYSRKYASKAKNLADDMVRNTARDLLYYAVTQDAMLIFENLSRGFGRQGKRTFMAERQYTRMEDWLTAKLAYEGLPSKTYLSKTLAQYTSKTCSNCGFTITSADYDRVLEKLKKTATGWMTTINGKELKVEGQITYYNRYKRQNVVKDLSVELDRLSEESVNNDISSWTKGRSGEALSLLKKRFSHRPVQEKFVCLNCGFETHADEQAALNIARSWLFLRSQEYKKYQTNKTTGNTDKRAFVETWQSFYRKKLKEVWKPAV

SEQ ID NO: 42570 - protein, 979 aa, synthetic construct
  REGION 1..979: note = engineered CasX variant
QEIKRINKIRRRLVKDSNTKKAGKTGPMKTLLVRVMTPDLRERLENLRKKPENIPQPISNTSQANLNKLLTDYTEMKKAILHVYWEEFQKDPVGLMSRVAQPASKKIDQNKLKPEMDEKGNLTTAGFACSQCGQPLFVYKLEQVSEKGKAYTNYFGRCNVAEHEKLILLAQLKPEKDSDEAVTYSLGKFGQRALDFYSIHVTKESTHPVKPLAQIAGNRYASYPVGKALSDACMGTIASFLSKYQDIIIEHQKVVKGNQKRLESLRELAGKENLEYPSVTLPPQPHTKEGVDAYNEVIARVRMWVNLNLWQKLKLSRDDAKPLLRLKGFPSFPLVERQANEVDWWDMVCNVKKLINEKKEDGKVFWQNLAGYKRQEALRPYLSSEEDRKKGKKFARYQLGDLLLHLEKKHGEDWGKVYDEAWERIDKKVEGLSKHIKLEEERRSEDAQSKAALTDWLRAKASFVIEGLKEADKDEFCRCELKLQKWYGDLRGKPFAIEAENSILDISGFSKQYNCAFIWQKDGVKKLNLYLIINYFKGGKLRFKKIKPEAFEANRFYTVINKKSGEIVPMEVNFNFDDPNLIILPLAFGKRQGREFIWNDLLSLETGSLKLANGRVIEKTLYNRRTRQDEPALFVALTFERREVLDSSNIKPMNLIGVDRGENIPAVIALTDPEGCPLSRFKDSLGNPTHILRIGESYKEKQRTIQAKKEVEQRRAGGYSRKYASKAKNLADDMVRNTARDLLYYAVTQDAMLIFENLSRGFGRQGKRTFMAERQYTRMEDWLTAKLAYEGLPSKTYLSKTLAQYTSKTCSNCGFTITSADYDRVLEKLKKTATGWMTTINGKELKVEGQITYYNRYKRQNVVKDLSVELDRLSEESVNNDISSWTKGRSGNEALSLLKKRFSHRPVQEKFVCLNCGFETHADEQAALNIARSWLFLRSQEYKKYQTNKTTGNTDKRAFVETWQSFYRKKLKEVWKPAV

SEQ ID NO: 42571 - protein, 979 aa, synthetic construct
  REGION 1..979: note = engineered CasX variant
QEIKRINKIRRRLVKDSNTKKAGKTGPMKTLLVRVMTPDLRERLENLRKKPENIPQPISNTSQANLNKLLTDYTEMKKAILHVYWEEFQKDPVGLMSRVAQPASKKIDQNKLKPEMDEKGNLTTAGFACSQCGQPLFVYKLEQVSEKGKAYTNYFGRCNVAEHEKLILLAQLKPEKDSDEAVTYSLGKFGQRALDFYSIHVTKESTHPVKPLAQIAGNRYASHPVGKALSDACMGTIASFLSKYQDIIIEHQKVVKGNQKRLESLRELAGKENLEYPSVTLPPQPHTKEGVDAYNEVIARVRMWVNLNLWQKLKLSRDDAKPLLRLKGFPSFPLVERQANEVDWWDMVCNVKKLINEKKEDGKVFWQNLAGYKRQEALRPYLSSEEDRKKGKKFARYQLGDLLLHLEKKHGEDWGKVYDEAWERIDKKVEGLSKHIKLEEERRSEDAQSKAALTDWLRAKASFVIEGLKEADKDEFCRCELKLQKWYGDLRGKPFAIEAENSILDISGFSKQYNCAFIWQKDGVKKLNLYLIINYFKGGKLRFKKIKPEAFEANRFYTVINKKSGEIVPMEVNFNFDDPNLIILPLAFGKRQGREFIWNDLLSLETGSLKLANGRVIEKTLYNRRTRQDEPALFVALTFERREVLDSSNIKPMNLIGVDRGENIPAVIALTDPEGCPLSRFKDSLGNPTHILRIGESYKEKQRTIQAKKEVEQRRAGGYSRKYASKAKNLADDMVRNTARDLLYYAVTQDAMLIFENLSRGFGRQGKRTFMAERQYTRMEDWLTAKLAYEGLPSKTYLSKTLAQYTSKTCSNCGFTITSADYDRVLEKLKKTATGWMTTINGKELKVEGQITYYNRYKRQNVVKDLSVELDRLSEESVNNDISSWTKGRSGNEALSLLKKRFSHRPVQEKFVCLNCGFETHADEQAALNIARSWLFLRSQEYKKYQTNKTTGNTDKRAFVETWQSFYRKKLKEVWKPAV

SEQ ID NO: 42572 - protein, 979 aa, synthetic construct
  REGION 1..979: note = engineered CasX variant
QEIKRINKIRRRLVKDSNTKKAGKTGPMKTLLVRVMTPDLRERLENLRKKPENIPQPISNTSQANLNKLLTDYTEMKKAILHVYWEEFQKDPVGLMSRVAQPASKKIDQNKLKPEMDEKGNLTTAGFACSQCGQPLFVYKLEQVSEKGKAYTNYFGRCNVAEHEKLILLAQLKPEKDSDEAVTYSLGKFGQRALDFYSIHVTKESTHPVKPLAQIAGNRYASSPVGKALSDACMGTIASFLSKYQDIIIEHQKVVKGNQKRLESLRELAGKENLEYPSVTLPPQPHTKEGVDAYNEVIARVRMWVNLNLWQKLKLSRDDAKPLLRLKGFPSFPLVERQANEVDWWDMVCNVKKLINEKKEDGKVFWQNLAGYKRQEALRPYLSSEEDRKKGKKFARYQLGDLLLHLEKKHGEDWGKVYDEAWERIDKKVEGLSKHIKLEEERRSEDAQSKAALTDWLRAKASFVIEGLKEADKDEFCRCELKLQKWYGDLRGKPFAIEAENSILDISGFSKQYNCAFIWQKDGVKKLNLYLIINYFKGGKLRFKKIKPEAFEANRFYTVINKKSGEIVPMEVNFNFDDPNLIILPLAFGKRQGREFIWNDLLSLETGSLKLANGRVIEKTLYNRRTRQDEPALFVALTFERREVLDSSNIKPMNLIGVDRGENIPAVIALTDPEGCPLSRFKDSLGNPTHILRIGESYKEKQRTIQAKKEVEQRRAGGYSRKYASKAKNLADDMVRNTARDLLYYAVTQDAMLIFENLSRGFGRQGKRTFMAERQYTRMEDWLTAKLAYEGLPSKTYLSKTLAQYTSKTCSNCGFTITSADYDRVLEKLKKTATGWMTTINGKELKVEGQITYYNRYKRQNVVKDLSVELDRLSEESVNNDISSWTKGRSGNEALSLLKKRFSHRPVQEKFVCLNCGFETHADEQAALNIARSWLFLRSQEYKKYQTNKTTGNTDKRAFVETWQSFYRKKLKEVWKPAV

SEQ ID NO: 42573 - protein, 979 aa, synthetic construct
  REGION 1..979: note = engineered CasX variant
QEIKRINKIRRRLVKDSNTKKAGKTGPMKTLLVRVMTPDLRERLENLRKKPENIPQPISNTSQANLNKLLTDYTEMKKAILHVYWEEFQKDPVGLMSRVAQPASKKIDQNKLKPEMDEKGNLTTAGFACSQCGQPLFVYKLEQVSEKGKAYTNYFGRCNVAEHEKLILLAQLKPEKDSDEAVTYSLGKFGQRALDFYSIHVTKESTHPVKPLAQIAGNRYASTPVGKALSDACMGTIASFLSKYQDIIIEHQKVVKGNQKRLESLRELAGKENLEYPSVTLPPQPHTKEGVDAYNEVIARVRMWVNLNLWQKLKLSRDDAKPLLRLKGFPSFPLVERQANEVDWWDMVCNVKKLINEKKEDGKVFWQNLAGYKRQEALRPYLSSEEDRKKGKKFARYQLGDLLLHLEKKHGEDWGKVYDEAWERIDKKVEGLSKHIKLEEERRSEDAQSKAALTDWLRAKASFVIEGLKEADKDEFCRCELKLQKWYGDLRGKPFAIEAENSILDISGFSKQYNCAFIWQKDGVKKLNLYLIINYFKGGKLRFKKIKPEAFEANRFYTVINKKSGEIVPMEVNFNFDDPNLIILPLAFGKRQGREFIWNDLLSLETGSLKLANGRVIEKTLYNRRTRQDEPALFVALTFERREVLDSSNIKPMNLIGVDRGENIPAVIALTDPEGCPLSRFKDSLGNPTHILRIGESYKEKQRTIQAKKEVEQRRAGGYSRKYASKAKNLADDMVRNTARDLLYYAVTQDAMLIFENLSRGFGRQGKRTFMAERQYTRMEDWLTAKLAYEGLPSKTYLSKTLAQYTSKTCSNCGFTITSADYDRVLEKLKKTATGWMTTINGKELKVEGQITYYNRYKRQNVVKDLSVELDRLSEESVNNDISSWTKGRSGNEALSLLKKRFSHRPVQEKFVCLNCGFETHADEQAALNIARSWLFLRSQEYKKYQTNKTTGNTDKRAFVETWQSFYRKKLKEVWKPAV

SEQ ID NO: 42574 - protein, 979 aa, synthetic construct
  REGION 1..979: note = engineered CasX variant
QEIKRINKIRRRLVKDSNTKKAGKTGPMKTLLVRVMTPDLRERLENLRKKPENIPQPISNTSQANLNKLLTDYTEMKKAILHVYWEEFQKDPVGLMSRVAQPASKKIDQNKLKPEMDEKGNLTTAGFACSQCGQPLFVYKLEQVSEKGKAYTNYFGRCNVAEHEKLILLAQLKPEKDSDEAVTYSLGKFGQRALDFYSIHVTKESTHPVKPLAQIAGNRYASAPVGKALSDACMGTIASFLSKYQDIIIEHQKVVKGNQKRLESLRELAGKENLEYPSVTLPPQPHTKEGVDAYNEVIARVRMWVNLNLWQKLKLSRDDAKPLLRLKGFPSFPLVERQANEVDWWDMVCNVKKLINEKKEDGKVFWQNLAGYKRQEALRPYLSSEEDRKKGKKFARYQLGDLLLHLEKKHGEDWGKVYDEAWERIDKKVEGLSKHIKLEEERRSEDAQSKAALTDWLRAKASFVIEGLKEADKDEFCRCELKLQKWYGDLRGKPFAIEAENSILDISGFSKQYNCAFIWQKDGVKKLNLYLIINYFKGGKLRFKKIKPEAFEANRFYTVINKKSGEIVPMEVNFNFDDPNLIILPLAFGKRQGREFIWNDLLSLETGSLKLANGRVIEKTLYNRRTRQDEPALFVALTFERREVLDSSNIKPMNLIGVDRGENIPAVIALTDPEGCPLSRFKDSLGNPTHILRIGESYKEKQRTIQAKKEVEQRRAGGYSRKYASKAKNLADDMVRNTARDLLYYAVTQDAMLIFENLSRGFGRQGKRTFMAERQYTRMEDWLTAKLAYEGLPSKTYLSKTLAQYTSKTCSNCGFTITSADYDRVLEKLKKTATGWMTTINGKELKVEGQITYYNRYKRQNVVKDLSVELDRLSEESVNNDISSWTKGRSGNEALSLLKKRFSHRPVQEKFVCLNCGFETHADEQAALNIARSWLFLRSQEYKKYQTNKTTGNTDKRAFVETWQSFYRKKLKEVWKPAV

SEQ ID NO: 42575 - protein, 979 aa, synthetic construct
  REGION 1..979: note = engineered CasX variant
QEIKRINKIRRRLVKDSNTKKAGKTGPMKTLLVRVMTPDLRERLENLRKKPENIPQPISNTSQANLNKLLTDYTEMKKAILHVYWEEFQKDPVGLMSRVAQPASKKIDQNKLKPEMDEKGNLTTAGFACSQCGQPLFVYKLEQVSEKGKAYTNYFGRCNVAEHEKLILLAQLKPEKDSDEAVTYSLGKFGQRALDFYSIHVTKESTHPVKPLAQIAGNRYASVPVGKALSDACMGTIASFLSKYQDIIIEHQKVVKGNQKRLESLRELAGKENLEYPSVTLPPQPHTKEGVDAYNEVIARVRMWVNLNLWQKLKLSRDDAKPLLRLKGFPSFPLVERQANEVDWWDMVCNVKKLINEKKEDGKVFWQNLAGYKRQEALRPYLSSEEDRKKGKKFARYQLGDLLLHLEKKHGEDWGKVYDEAWERIDKKVEGLSKHIKLEEERRSEDAQSKAALTDWLRAKASFVIEGLKEADKDEFCRCELKLQKWYGDLRGKPFAIEAENSILDISGFSKQYNCAFIWQKDGVKKLNLYLIINYFKGGKLRFKKIKPEAFEANRFYTVINKKSGEIVPMEVNFNFDDPNLIILPLAFGKRQGREFIWNDLLSLETGSLKLANGRVIEKTLYNRRTRQDEPALFVALTFERREVLDSSNIKPMNLIGVDRGENIPAVIALTDPEGCPLSRFKDSLGNPTHILRIGESYKEKQRTIQAKKEVEQRRAGGYSRKYASKAKNLADDMVRNTARDLLYYAVTQDAMLIFENLSRGFGRQGKRTFMAERQYTRMEDWLTAKLAYEGLPSKTYLSKTLAQYTSKTCSNCGFTITSADYDRVLEKLKKTATGWMTTINGKELKVEGQITYYNRYKRQNVVKDLSVELDRLSEESVNNDISSWTKGRSGNEALSLLKKRFSHRPVQEKFVCLNCGFETHADEQAALNIARSWLFLRSQEYKKYQTNKTTGNTDKRAFVETWQSFYRKKLKEVWKPAV

SEQ ID NO: 42576 - protein, 979 aa, synthetic construct
  REGION 1..979: note = engineered CasX variant
QEIKRINKIRRRLVKDSNTKKAGKTGPMKTLLVRVMTPDLRERLENLRKKPENIPQPISNTSQANLNKLLTDYTEMKKAILHVYWEEFQKDPVGLMSRVAQPASKKIDQNKLKPEMDEKGNLTTAGFACSQCGQPLFVYKLEQVSEKGKAYTNYFGRCNVAEHEKLIKLAQLKPEKDSDEAVTYSLGKFGQRALDFYSIHVTKESTHPVKPLAQIAGNRYASGPVGKALSDACMGTIASFLSKYQDIIIEHQKVVKGNQKRLESLRELAGKENLEYPSVTLPPQPHTKEGVDAYNEVIARVRMWVNLNLWQKLKLSRDDAKPLLRLKGFPSFPLVERQANEVDWWDMVCNVKKLINEKKEDGKVFWQNLAGYKRQEALRPYLSSEEDRKKGKKFARYQLGDLLLHLEKKHGEDWGKVYDEAWERIDKKVEGLSKHIKLEEERRSEDAQSKAALTDWLRAKASFVIEGLKEADKDEFCRCELKLQKWYGDLRGKPFAIEAENSILDISGFSKQYNCAFIWQKDGVKKLNLYLIINYFKGGKLRFKKIKPEAFEANRFYTVINKKSGEIVPMEVNFNFDDPNLIILPLAFGKRQGREFIWNDLLSLETGSLKLANGRVIEKTLYNRRTRQDEPALFVALTFERREVLDSSNIKPMNLIGVDRGENIPAVIALTDPEGCPLSRFKDSLGNPTHILRIGESYKEKQRTIQAKKEVEQRRAGGYSRKYASKAKNLADDMVRNTARDLLYYAVTQDAMLIFENLSRGFGRQGKRTFMAERQYTRMEDWLTAKLAYEGLPSKTYLSKTLAQYTSKTCSNCGFTITSADYDRVLEKLKKTATGWMTTINGKELKVEGQITYYNRYKRQNVVKDLSVELDRLSEESVNNDISSWTKGRSGNEALSLLKKRFSHRPVQEKFVCLNCGFETHADEQAALNIARSWLFLRSQEYKKYQTNKTTGNTDKRAFVETWQSFYRKKLKEVWKPAV

SEQ ID NO: 42577 - protein, 978 aa, synthetic construct
  REGION 1..978: note = engineered CasX variant
QEIKRINKIRRRLVKDSNTKKAGKTGPMKTLLVRVMTPDLRERLENLRKKPENIPQPISNTSQANLNKLLTDYTEMKKAILHVYWEEFQKDPVGLMSRVAQPASKKIDQNKLKPEMDEKGNLTTAGFACSQCGQPLFVYKLEQVSEKGKAYTNYFGRCNVAEHEKLILLAQLKPEKDSDEAVTYSLGKFGQRALDFYSIHVTKESTHPVKPLAQIAGNRYASPVGKALSDACMGTIASFLSKYQDIIIEHQKVVKGNQKRLESLRELAGKENLEYPSVTLPPQPHTKEGVDAYNEVIARVRMWVNLNLWQKLKLSRDDAKPLLRLKGFPSFPLVERQANEVDWWDMVCNVKKLINEKKEDGKVFWQNLAGYKRQEALRPYLSSEEDRKKGKKFARYQLGDLLLHLEKKHGEDWGKVYDEAWERIDKKVEGLSKHIKLEEERRSEDAQSKAALTDWLRAKASFVIEGLKEADKDEFCRCELKLQKWYGDLRGKPFAIEAENSILDISGFSKQYNCAFIWQKDGVKKLNLYLIINYFKGGKLRFKKIKPEAFEANRFYTVINKKSGEIVPMEVNFNFDDPNLIILPLAFGKRQGREFIWNDLLSLETGSLKLANGRVIEKTLYNRRTRQDEPALFVALTFERREVLDSSNIKPMNLIGVDRGENIPAVIALTDPEGCPLSRFKDSLGNPTHILRIGESYKEKQRTIQAKKEVEQRRAGGYSRKYASKAKNLADDMVRNTARDLLYYAVTQDAMLIFENLSRGFGRQGKRTFMAERQYTRMEDWLTAKLAYEGLPSKTYLSKTLAQYTSKTCSNCGFTITSADYDRVLEKLKKTATGWMTTINGKELKVEGQITYYNRYKRQNVVKDLSVELDRLSEESVNNDISSWTKGRSGNEALSLLKKRFSHRPVQEKFVCLNCGFETHADEQAALNIARSWLFLRSQEYKKYQTNKTTGNTDKRAFVETWQSFYRKKLKEVWKPAV

SEQ ID NO: 42578 - protein, 978 aa, synthetic construct
  REGION 1..978: note = engineered CasX variant
QEIKRINKIRRRLVKDSNTKKAGKTGPMKTLLVRVMTPDLRERLENLRKKPENIPQPISNTSQANLNKLLTDYTEMKKAILHVYWEEFQKDPVGLMSRVAQPASKKIDQNKLKPEMDEKGNLTTAGFACSQCGQPLFVYKLEQVSEKGKAYTNYFGRCNVAEHEKLILLAQLKPEKDSDEAVTYSLGKFGQRALDFYSIHVTKESTHPVKPLAQIAGNRYASYPVGKALSDACMGTIASFLSKYQDIIIEHQKVVKGNQKRLESLRELAGKENLEYPSVTLPPQPHTKEGVDAYNEVIARVRMWVNLNLWQKLKLSRDDAKPLLRLKGFPSFPLVERQANEVDWWDMVCNVKKLINEKKEDGKVFWQNLAGYKRQEALRPYLSSEEDRQKGKKFARYQLGDLLLHLEKKHGEDWGKVYDEAWERIDKKVEGLSKHIKLEEERRSEDAQSKAALTDWLRAKASFVIEGLKEADKDEFCRCELKLQKWYGDLRGKPFAIEAENSILDISGFSKQYNCAFIWQKDGVKKLNLYLIINYFKGGKLRFKKIKPEAFEANRFYTVINKKSGEIVPMEVNFNFDDPNLIILPLAFGKRQGREFIWNDLLSLETGSLKLANGRVIEKTLYNRRTRQDEPALFVALTFERREVLDSSNIKPMNLIGVDRGENIPAVIALTDPEGCPLSRFKDSLGNPTHILRIGESYKEKQRTIQAKKEVEQRRAGGYSRKYASKAKNLADDMVRNTARDLLYYAVTQDAMLIFENLSRGFGRQGKRTFMAERQYTRMEDWLTAKLAYEGLPSKTYLSKTLAQYTSKTCSNCGFTITSADYDRVLEKLKKTATGWMTTINGKELKVEGQITYYNRYKRQNVVKDLSVELDRLSEESVNNDISSWTKGRSGEALSLLKKRFSHRPVQEKFVCLNCGFETHADEQAALNIARSWLFLRSQEYKKYQTNKTTGNTDKRAFVETWQSFYRKKLKEVWKPAV

SEQ ID NO: 42579 - protein, 978 aa, synthetic construct
  REGION 1..978: note = engineered CasX variant
QEIKRINKIRRRLVKDSNTKKAGKTGPMKTLLVRVMTPDLRERLENLRKKPENIPQPISNTSQANLNKLLTDYTEMKKAILHVYWEEFQKDPVGLMSRVAQPASKKIDQNKLKPEMDEKGNLTTAGFACSQCGQPLFVYKLEQVSEKGKAYTNYFGRCNVAEHEKLILLAQLKPEKDSDEAVTYSLGKFGQRALDFYSIHVTKESTHPVKPLAQIAGNRYASHPVGKALSDACMGTIASFLSKYQDIIIEHQKVVKGNQKRLESLRELAGKENLEYPSVTLPPQPHTKEGVDAYNEVIARVRMWVNLNLWQKLKLSRDDAKPLLRLKGFPSFPLVERQANEVDWWDMVCNVKKLINEKKEDGKVFWQNLAGYKRQEALRPYLSSEEDRQKGKKFARYQLGDLLLHLEKKHGEDWGKVYDEAWERIDKKVEGLSKHIKLEEERRSEDAQSKAALTDWLRAKASFVIEGLKEADKDEFCRCELKLQKWYGDLRGKPFAIEAENSILDISGFSKQYNCAFIWQKDGVKKLNLYLIINYFKGGKLRFKKIKPEAFEANRFYTVINKKSGEIVPMEVNFNFDDPNLIILPLAFGKRQGREFIWNDLLSLETGSLKLANGRVIEKTLYNRRTRQDEPALFVALTFERREVLDSSNIKPMNLIGVDRGENIPAVIALTDPEGCPLSRFKDSLGNPTHILRIGESYKEKQRTIQAKKEVEQRRAGGYSRKYASKAKNLADDMVRNTARDLLYYAVTQDAMLIFENLSRGFGRQGKRTFMAERQYTRMEDWLTAKLAYEGLPSKTYLSKTLAQYTSKTCSNCGFTITSADYDRVLEKLKKTATGWMTTINGKELKVEGQITYYNRYKRQNVVKDLSVELDRLSEESVNNDISSWTKGRSGEALSLLKKRFSHRPVQEKFVCLNCGFETHADEQAALNIARSWLFLRSQEYKKYQTNKTTGNTDKRAFVETWQSFYRKKLKEVWKPAV

SEQ ID NO: 42580 - protein, 978 aa, synthetic construct
  REGION 1..978: note = engineered CasX variant
QEIKRINKIRRRLVKDSNTKKAGKTGPMKTLLVRVMTPDLRERLENLRKKPENIPQPISNTSQANLNKLLTDYTEMKKAILHVYWEEFQKDPVGLMSRVAQPASKKIDQNKLKPEMDEKGNLTTAGFACSQCGQPLFVYKLEQVSEKGKAYTNYFGRCNVAEHEKLILLAQLKPEKDSDEAVTYSLGKFGQRALDFYSIHVTKESTHPVKPLAQIAGNRYASSPVGKALSDACMGTIASFLSKYQDIIIEHQKVVKGNQKRLESLRELAGKENLEYPSVTLPPQPHTKEGVDAYNEVIARVRMWVNLNLWQKLKLSRDDAKPLLRLKGFPSFPLVERQANEVDWWDMVCNVKKLINEKKEDGKVFWQNLAGYKRQEALRPYLSSEEDRQKGKKFARYQLGDLLLHLEKKHGEDWGKVYDEAWERIDKKVEGLSKHIKLEEERRSEDAQSKAALTDWLRAKASFVIEGLKEADKDEFCRCELKLQKWYGDLRGKPFAIEAENSILDISGFSKQYNCAFIWQKDGVKKLNLYLIINYFKGGKLRFKKIKPEAFEANRFYTVINKKSGEIVPMEVNFNFDDPNLIILPLAFGKRQGREFIWNDLLSLETGSLKLANGRVIEKTLYNRRTRQDEPALFVALTFERREVLDSSNIKPMNLIGVDRGENIPAVIALTDPEGCPLSRFKDSLGNPTHILRIGESYKEKQRTIQAKKEVEQRRAGGYSRKYASKAKNLADDMVRNTARDLLYYAVTQDAMLIFENLSRGFGRQGKRTFMAERQYTRMEDWLTAKLAYEGLPSKTYLSKTLAQYTSKTCSNCGFTITSADYDRVLEKLKKTATGWMTTINGKELKVEGQITYYNRYKRQNVVKDLSVELDRLSEESVNNDISSWTKGRSGEALSLLKKRFSHRPVQEKFVCLNCGFETHADEQAALNIARSWLFLRSQEYKKYQTNKTTGNTDKRAFVETWQSFYRKKLKEVWKPAV

SEQ ID NO: 42581 - protein, 978 aa, synthetic construct
  REGION 1..978: note = engineered CasX variant
QEIKRINKIRRRLVKDSNTKKAGKTGPMKTLLVRVMTPDLRERLENLRKKPENIPQPISNTSQANLNKLLTDYTEMKKAILHVYWEEFQKDPVGLMSRVAQPASKKIDQNKLKPEMDEKGNLTTAGFACSQCGQPLFVYKLEQVSEKGKAYTNYFGRCNVAEHEKLILLAQLKPEKDSDEAVTYSLGKFGQRALDFYSIHVTKESTHPVKPLAQIAGNRYASTPVGKALSDACMGTIASFLSKYQDIIIEHQKVVKGNQKRLESLRELAGKENLEYPSVTLPPQPHTKEGVDAYNEVIARVRMWVNLNLWQKLKLSRDDAKPLLRLKGFPSFPLVERQANEVDWWDMVCNVKKLINEKKEDGKVFWQNLAGYKRQEALRPYLSSEEDRQKGKKFARYQLGDLLLHLEKKHGEDWGKVYDEAWERIDKKVEGLSKHIKLEEERRSEDAQSKAALTDWLRAKASFVIEGLKEADKDEFCRCELKLQKWYGDLRGKPFAIEAENSILDISGFSKQYNCAFIWQKDGVKKLNLYLIINYFKGGKLRFKKIKPEAFEANRFYTVINKKSGEIVPMEVNFNFDDPNLIILPLAFGKRQGREFIWNDLLSLETGSLKLANGRVIEKTLYNRRTRQDEPALFVALTFERREVLDSSNIKPMNLIGVDRGENIPAVIALTDPEGCPLSRFKDSLGNPTHILRIGESYKEKQRTIQAKKEVEQRRAGGYSRKYASKAKNLADDMVRNTARDLLYYAVTQDAMLIFENLSRGFGRQGKRTFMAERQYTRMEDWLTAKLAYEGLPSKTYLSKTLAQYTSKTCSNCGFTITSADYDRVLEKLKKTATGWMTTINGKELKVEGQITYYNRYKRQNVVKDLSVELDRLSEESVNNDISSWTKGRSGEALSLLKKRFSHRPVQEKFVCLNCGFETHADEQAALNIARSWLFLRSQEYKKYQTNKTTGNTDKRAFVETWQSFYRKKLKEVWKPAV

SEQ ID NO: 42582 - protein, 978 aa, synthetic construct
  REGION 1..978: note = engineered CasX variant
QEIKRINKIRRRLVKDSNTKKAGKTGPMKTLLVRVMTPDLRERLENLRKKPENIPQPISNTSQANLNKLLTDYTEMKKAILHVYWEEFQKDPVGLMSRVAQPASKKIDQNKLKPEMDEKGNLTTAGFACSQCGQPLFVYKLEQVSEKGKAYTNYFGRCNVAEHEKLILLAQLKPEKDSDEAVTYSLGKFGQRALDFYSIHVTKESTHPVKPLAQIAGNRYASAPVGKALSDACMGTIASFLSKYQDIIIEHQKVVKGNQKRLESLRELAGKENLEYPSVTLPPQPHTKEGVDAYNEVIARVRMWVNLNLWQKLKLSRDDAKPLLRLKGFPSFPLVERQANEVDWWDMVCNVKKLINEKKEDGKVFWQNLAGYKRQEALRPYLSSEEDRQKGKKFARYQLGDLLLHLEKKHGEDWGKVYDEAWERIDKKVEGLSKHIKLEEERRSEDAQSKAALTDWLRAKASFVIEGLKEADKDEFCRCELKLQKWYGDLRGKPFAIEAENSILDISGFSKQYNCAFIWQKDGVKKLNLYLIINYFKGGKLRFKKIKPEAFEANRFYTVINKKSGEIVPMEVNFNFDDPNLIILPLAFGKRQGREFIWNDLLSLETGSLKLANGRVIEKTLYNRRTRQDEPALFVALTFERREVLDSSNIKPMNLIGVDRGENIPAVIALTDPEGCPLSRFKDSLGNPTHILRIGESYKEKQRTIQAKKEVEQRRAGGYSRKYASKAKNLADDMVRNTARDLLYYAVTQDAMLIFENLSRGFGRQGKRTFMAERQYTRMEDWLTAKLAYEGLPSKTYLSKTLAQYTSKTCSNCGFTITSADYDRVLEKLKKTATGWMTTINGKELKVEGQITYYNRYKRQNVVKDLSVELDRLSEESVNNDISSWTKGRSGEALSLLKKRFSHRPVQEKFVCLNCGFETHADEQAALNIARSWLFLRSQEYKKYQTNKTTGNTDKRAFVETWQSFYRKKLKEVWKPAV

SEQ ID NO: 42583 - protein, 978 aa, synthetic construct
  REGION 1..978: note = engineered CasX variant
QEIKRINKIRRRLVKDSNTKKAGKTGPMKTLLVRVMTPDLRERLENLRKKPENIPQPISNTSQANLNKLLTDYTEMKKAILHVYWEEFQKDPVGLMSRVAQPASKKIDQNKLKPEMDEKGNLTTAGFACSQCGQPLFVYKLEQVSEKGKAYTNYFGRCNVAEHEKLILLAQLKPEKDSDEAVTYSLGKFGQRALDFYSIHVTKESTHPVKPLAQIAGNRYASVPVGKALSDACMGTIASFLSKYQDIIIEHQKVVKGNQKRLESLRELAGKENLEYPSVTLPPQPHTKEGVDAYNEVIARVRMWVNLNLWQKLKLSRDDAKPLLRLKGFPSFPLVERQANEVDWWDMVCNVKKLINEKKEDGKVFWQNLAGYKRQEALRPYLSSEEDRQKGKKFARYQLGDLLLHLEKKHGEDWGKVYDEAWERIDKKVEGLSKHIKLEEERRSEDAQSKAALTDWLRAKASFVIEGLKEADKDEFCRCELKLQKWYGDLRGKPFAIEAENSILDISGFSKQYNCAFIWQKDGVKKLNLYLIINYFKGGKLRFKKIKPEAFEANRFYTVINKKSGEIVPMEVNFNFDDPNLIILPLAFGKRQGREFIWNDLLSLETGSLKLANGRVIEKTLYNRRTRQDEPALFVALTFERREVLDSSNIKPMNLIGVDRGENIPAVIALTDPEGCPLSRFKDSLGNPTHILRIGESYKEKQRTIQAKKEVEQRRAGGYSRKYASKAKNLADDMVRNTARDLLYYAVTQDAMLIFENLSRGFGRQGKRTFMAERQYTRMEDWLTAKLAYEGLPSKTYLSKTLAQYTSKTCSNCGFTITSADYDRVLEKLKKTATGWMTTINGKELKVEGQITYYNRYKRQNVVKDLSVELDRLSEESVNNDISSWTKGRSGEALSLLKKRFSHRPVQEKFVCLNCGFETHADEQAALNIARSWLFLRSQEYKKYQTNKTTGNTDKRAFVETWQSFYRKKLKEVWKPAV

SEQ ID NO: 42584 - protein, 978 aa, synthetic construct
  REGION 1..978: note = engineered CasX variant
QEIKRINKIRRRLVKDSNTKKAGKTGPMKTLLVRVMTPDLRERLENLRKKPENIPQPISNTSQANLNKLLTDYTEMKKAILHVYWEEFQKDPVGLMSRVAQPASKKIDQNKLKPEMDEKGNLTTAGFACSQCGQPLFVYKLEQVSEKGKAYTNYFGRCNVAEHEKLIKLAQLKPEKDSDEAVTYSLGKFGQRALDFYSIHVTKESTHPVKPLAQIAGNRYASGPVGKALSDACMGTIASFLSKYQDIIIEHQKVVKGNQKRLESLRELAGKENLEYPSVTLPPQPHTKEGVDAYNEVIARVRMWVNLNLWQKLKLSRDDAKPLLRLKGFPSFPLVERQANEVDWWDMVCNVKKLINEKKEDGKVFWQNLAGYKRQEALRPYLSSEEDRQKGKKFARYQLGDLLLHLEKKHGEDWGKVYDEAWERIDKKVEGLSKHIKLEEERRSEDAQSKAALTDWLRAKASFVIEGLKEADKDEFCRCELKLQKWYGDLRGKPFAIEAENSILDISGFSKQYNCAFIWQKDGVKKLNLYLIINYFKGGKLRFKKIKPEAFEANRFYTVINKKSGEIVPMEVNFNFDDPNLIILPLAFGKRQGREFIWNDLLSLETGSLKLANGRVIEKTLYNRRTRQDEPALFVALTFERREVLDSSNIKPMNLIGVDRGENIPAVIALTDPEGCPLSRFKDSLGNPTHILRIGESYKEKQRTIQAKKEVEQRRAGGYSRKYASKAKNLADDMVRNTARDLLYYAVTQDAMLIFENLSRGFGRQGKRTFMAERQYTRMEDWLTAKLAYEGLPSKTYLSKTLAQYTSKTCSNCGFTITSADYDRVLEKLKKTATGWMTTINGKELKVEGQITYYNRYKRQNVVKDLSVELDRLSEESVNNDISSWTKGRSGEALSLLKKRFSHRPVQEKFVCLNCGFETHADEQAALNIARSWLFLRSQEYKKYQTNKTTGNTDKRAFVETWQSFYRKKLKEVWKPAV

SEQ ID NO: 42585 - protein, 977 aa, synthetic construct
  REGION 1..977: note = engineered CasX variant
QEIKRINKIRRRLVKDSNTKKAGKTGPMKTLLVRVMTPDLRERLENLRKKPENIPQPISNTSQANLNKLLTDYTEMKKAILHVYWEEFQKDPVGLMSRVAQPASKKIDQNKLKPEMDEKGNLTTAGFACSQCGQPLFVYKLEQVSEKGKAYTNYFGRCNVAEHEKLILLAQLKPEKDSDEAVTYSLGKFGQRALDFYSIHVTKESTHPVKPLAQIAGNRYASPVGKALSDACMGTIASFLSKYQDIIIEHQKVVKGNQKRLESLRELAGKENLEYPSVTLPPQPHTKEGVDAYNEVIARVRMWVNLNLWQKLKLSRDDAKPLLRLKGFPSFPLVERQANEVDWWDMVCNVKKLINEKKEDGKVFWQNLAGYKRQEALRPYLSSEEDRQKGKKFARYQLGDLLLHLEKKHGEDWGKVYDEAWERIDKKVEGLSKHIKLEEERRSEDAQSKAALTDWLRAKASFVIEGLKEADKDEFCRCELKLQKWYGDLRGKPFAIEAENSILDISGFSKQYNCAFIWQKDGVKKLNLYLIINYFKGGKLRFKKIKPEAFEANRFYTVINKKSGEIVPMEVNFNFDDPNLIILPLAFGKRQGREFIWNDLLSLETGSLKLANGRVIEKTLYNRRTRQDEPALFVALTFERREVLDSSNIKPMNLIGVDRGENIPAVIALTDPEGCPLSRFKDSLGNPTHILRIGESYKEKQRTIQAKKEVEQRRAGGYSRKYASKAKNLADDMVRNTARDLLYYAVTQDAMLIFENLSRGFGRQGKRTFMAERQYTRMEDWLTAKLAYEGLPSKTYLSKTLAQYTSKTCSNCGFTITSADYDRVLEKLKKTATGWMTTINGKELKVEGQITYYNRYKRQNVVKDLSVELDRLSEESVNNDISSWTKGRSGEALSLLKKRFSHRPVQEKFVCLNCGFETHADEQAALNIARSWLFLRSQEYKKYQTNKTTGNTDKRAFVETWQSFYRKKLKEVWKPAV

SEQ ID NO: 42586 - protein, 978 aa, synthetic construct
  REGION 1..978: note = engineered CasX variant
QEIKRINKIRRRLVKDSNTKKAGKTGPMKTLLVRVMTPDLRERLENLRKKPENIPQPISNTSQANLNKLLTDYTEMKKAILHVYWEEFQKDPVGLMSRVAQPASKKIDQNKLKPEMDEKGNLTTAGFACSQCGQPLFVYKLEQVSEKGKAYTNYFGRCNVAEHEKLILLAQLKPEKDSDEAVTYSLGKFGQRALDFYSIHVTKESTHPVKPLAQIAGNRYASYPVGKALSDACMGTIASFLSKYQDIIIEHQKVVKGNQKRLESLRELAGKENLEYPSVTLPPQPHTKEGVDAYNEVIARVRMWVNLNLWQKLKLSRDDAKPLLRLKGFPSFPLVERQANEVDWWDMVCNVKKLINEKKEDGKVFWQNLAGYKRQEALRPYLSSEEDRKKGKKFARYQLGDLLLHLEKKHGEDWGKVYDEAWERIDKKVEGLSKHIKLEEERRSEDAQSKAALTDWLRAKASFVIEGLKEADKDEFCRCELKLQKWYGDLRGKPFAIEAENSILDISGFSKQYNCAFIWQKDGVKKLNLYLIINYFKGGKLRFKKIKPEAFEANRFYTVINKKSGEIVPMEVNFNFDDPNLIILPLAFGKRQGREFIWNDLLSLETGSLKLANGRVIEKTLYNRRTRQDEPALFVALTFERREVLDSSNIKPMNLIGVDRGENIPAVIALTDPEGCPLSRFKDSLGNPTHILRIGESYKEKQRTIQAKKEVEQRRAGGYSRKYASKAKNLADDMVRNTARDLLYYAVTQDAMLIFENLSRGFGRQGKRTFMAERQYTRMEDWLTAKLAYEGLPSQTYLSKTLAQYTSKTCSNCGFTITSADYDRVLEKLKKTATGWMTTINGKELKVEGQITYYNRYKRQNVVKDLSVELDRLSEESVNNDISSWTKGRSGEALSLLKKRFSHRPVQEKFVCLNCGFETHADEQAALNIARSWLFLRSQEYKKYQTNKTTGNTDKRAFVETWQSFYRKKLKEVWKPAV

SEQ ID NO: 42587 - protein, 978 aa, synthetic construct
  REGION 1..978: note = engineered CasX variant
QEIKRINKIRRRLVKDSNTKKAGKTGPMKTLLVRVMTPDLRERLENLRKKPENIPQPISNTSQANLNKLLTDYTEMKKAILHVYWEEFQKDPVGLMSRVAQPASKKIDQNKLKPEMDEKGNLTTAGFACSQCGQPLFVYKLEQVSEKGKAYTNYFGRCNVAEHEKLILLAQLKPEKDSDEAVTYSLGKFGQRALDFYSIHVTKESTHPVKPLAQIAGNRYASHPVGKALSDACMGTIASFLSKYQDIIIEHQKVVKGNQKRLESLRELAGKENLEYPSVTLPPQPHTKEGVDAYNEVIARVRMWVNLNLWQKLKLSRDDAKPLLRLKGFPSFPLVERQANEVDWWDMVCNVKKLINEKKEDGKVFWQNLAGYKRQEALRPYLSSEEDRKKGKKFARYQLGDLLLHLEKKHGEDWGKVYDEAWERIDKKVEGLSKHIKLEEERRSEDAQSKAALTDWLRAKASFVIEGLKEADKDEFCRCELKLQKWYGDLRGKPFAIEAENSILDISGFSKQYNCAFIWQKDGVKKLNLYLIINYFKGGKLRFKKIKPEAFEANRFYTVINKKSGEIVPMEVNFNFDDPNLIILPLAFGKRQGREFIWNDLLSLETGSLKLANGRVIEKTLYNRRTRQDEPALFVALTFERREVLDSSNIKPMNLIGVDRGENIPAVIALTDPEGCPLSRFKDSLGNPTHILRIGESYKEKQRTIQAKKEVEQRRAGGYSRKYASKAKNLADDMVRNTARDLLYYAVTQDAMLIFENLSRGFGRQGKRTFMAERQYTRMEDWLTAKLAYEGLPSQTYLSKTLAQYTSKTCSNCGFTITSADYDRVLEKLKKTATGWMTTINGKELKVEGQITYYNRYKRQNVVKDLSVELDRLSEESVNNDISSWTKGRSGEALSLLKKRFSHRPVQEKFVCLNCGFETHADEQAALNIARSWLFLRSQEYKKYQTNKTTGNTDKRAFVETWQSFYRKKLKEVWKPAV

SEQ ID NO: 42588 - protein, 978 aa, synthetic construct
  REGION 1..978: note = engineered CasX variant
QEIKRINKIRRRLVKDSNTKKAGKTGPMKTLLVRVMTPDLRERLENLRKKPENIPQPISNTSQANLNKLLTDYTEMKKAILHVYWEEFQKDPVGLMSRVAQPASKKIDQNKLKPEMDEKGNLTTAGFACSQCGQPLFVYKLEQVSEKGKAYTNYFGRCNVAEHEKLILLAQLKPEKDSDEAVTYSLGKFGQRALDFYSIHVTKESTHPVKPLAQIAGNRYASSPVGKALSDACMGTIASFLSKYQDIIIEHQKVVKGNQKRLESLRELAGKENLEYPSVTLPPQPHTKEGVDAYNEVIARVRMWVNLNLWQKLKLSRDDAKPLLRLKGFPSFPLVERQANEVDWWDMVCNVKKLINEKKEDGKVFWQNLAGYKRQEALRPYLSSEEDRKKGKKFARYQLGDLLLHLEKKHGEDWGKVYDEAWERIDKKVEGLSKHIKLEEERRSEDAQSKAALTDWLRAKASFVIEGLKEADKDEFCRCELKLQKWYGDLRGKPFAIEAENSILDISGFSKQYNCAFIWQKDGVKKLNLYLIINYFKGGKLRFKKIKPEAFEANRFYTVINKKSGEIVPMEVNFNFDDPNLIILPLAFGKRQGREFIWNDLLSLETGSLKLANGRVIEKTLYNRRTRQDEPALFVALTFERREVLDSSNIKPMNLIGVDRGENIPAVIALTDPEGCPLSRFKDSLGNPTHILRIGESYKEKQRTIQAKKEVEQRRAGGYSRKYASKAKNLADDMVRNTARDLLYYAVTQDAMLIFENLSRGFGRQGKRTFMAERQYTRMEDWLTAKLAYEGLPSQTYLSKTLAQYTSKTCSNCGFTITSADYDRVLEKLKKTATGWMTTINGKELKVEGQITYYNRYKRQNVVKDLSVELDRLSEESVNNDISSWTKGRSGEALSLLKKRFSHRPVQEKFVCLNCGFETHADEQAALNIARSWLFLRSQEYKKYQTNKTTGNTDKRAFVETWQSFYRKKLKEVWKPAV

SEQ ID NO: 42589 - protein, 978 aa, synthetic construct
  REGION 1..978: note = engineered CasX variant
QEIKRINKIRRRLVKDSNTKKAGKTGPMKTLLVRVMTPDLRERLENLRKKPENIPQPISNTSQANLNKLLTDYTEMKKAILHVYWEEFQKDPVGLMSRVAQPASKKIDQNKLKPEMDEKGNLTTAGFACSQCGQPLFVYKLEQVSEKGKAYTNYFGRCNVAEHEKLILLAQLKPEKDSDEAVTYSLGKFGQRALDFYSIHVTKESTHPVKPLAQIAGNRYASTPVGKALSDACMGTIASFLSKYQDIIIEHQKVVKGNQKRLESLRELAGKENLEYPSVTLPPQPHTKEGVDAYNEVIARVRMWVNLNLWQKLKLSRDDAKPLLRLKGFPSFPLVERQANEVDWWDMVCNVKKLINEKKEDGKVFWQNLAGYKRQEALRPYLSSEEDRKKGKKFARYQLGDLLLHLEKKHGEDWGKVYDEAWERIDKKVEGLSKHIKLEEERRSEDAQSKAALTDWLRAKASFVIEGLKEADKDEFCRCELKLQKWYGDLRGKPFAIEAENSILDISGFSKQYNCAFIWQKDGVKKLNLYLIINYFKGGKLRFKKIKPEAFEANRFYTVINKKSGEIVPMEVNFNFDDPNLIILPLAFGKRQGREFIWNDLLSLETGSLKLANGRVIEKTLYNRRTRQDEPALFVALTFERREVLDSSNIKPMNLIGVDRGENIPAVIALTDPEGCPLSRFKDSLGNPTHILRIGESYKEKQRTIQAKKEVEQRRAGGYSRKYASKAKNLADDMVRNTARDLLYYAVTQDAMLIFENLSRGFGRQGKRTFMAERQYTRMEDWLTAKLAYEGLPSQTYLSKTLAQYTSKTCSNCGFTITSADYDRVLEKLKKTATGWMTTINGKELKVEGQITYYNRYKRQNVVKDLSVELDRLSEESVNNDISSWTKGRSGEALSLLKKRFSHRPVQEKFVCLNCGFETHADEQAALNIARSWLFLRSQEYKKYQTNKTTGNTDKRAFVETWQSFYRKKLKEVWKPAV

SEQ ID NO: 42590 - protein, 978 aa, synthetic construct
  REGION 1..978: note = engineered CasX variant
QEIKRINKIRRRLVKDSNTKKAGKTGPMKTLLVRVMTPDLRERLENLRKKPENIPQPISNTSQANLNKLLTDYTEMKKAILHVYWEEFQKDPVGLMSRVAQPASKKIDQNKLKPEMDEKGNLTTAGFACSQCGQPLFVYKLEQVSEKGKAYTNYFGRCNVAEHEKLILLAQLKPEKDSDEAVTYSLGKFGQRALDFYSIHVTKESTHPVKPLAQIAGNRYASAPVGKALSDACMGTIASFLSKYQDIIIEHQKVVKGNQKRLESLRELAGKENLEYPSVTLPPQPHTKEGVDAYNEVIARVRMWVNLNLWQKLKLSRDDAKPLLRLKGFPSFPLVERQANEVDWWDMVCNVKKLINEKKEDGKVFWQNLAGYKRQEALRPYLSSEEDRKKGKKFARYQLGDLLLHLEKKHGEDWGKVYDEAWERIDKKVEGLSKHIKLEEERRSEDAQSKAALTDWLRAKASFVIEGLKEADKDEFCRCELKLQKWYGDLRGKPFAIEAENSILDISGFSKQYNCAFIWQKDGVKKLNLYLIINYFKGGKLRFKKIKPEAFEANRFYTVINKKSGEIVPMEVNFNFDDPNLIILPLAFGKRQGREFIWNDLLSLETGSLKLANGRVIEKTLYNRRTRQDEPALFVALTFERREVLDSSNIKPMNLIGVDRGENIPAVIALTDPEGCPLSRFKDSLGNPTHILRIGESYKEKQRTIQAKKEVEQRRAGGYSRKYASKAKNLADDMVRNTARDLLYYAVTQDAMLIFENLSRGFGRQGKRTFMAERQYTRMEDWLTAKLAYEGLPSQTYLSKTLAQYTSKTCSNCGFTITSADYDRVLEKLKKTATGWMTTINGKELKVEGQITYYNRYKRQNVVKDLSVELDRLSEESVNNDISSWTKGRSGEALSLLKKRFSHRPVQEKFVCLNCGFETHADEQAALNIARSWLFLRSQEYKKYQTNKTTGNTDKRAFVETWQSFYRKKLKEVWKPAV

SEQ ID NO: 42591 - protein, 978 aa, synthetic construct
  REGION 1..978: note = engineered CasX variant
QEIKRINKIRRRLVKDSNTKKAGKTGPMKTLLVRVMTPDLRERLENLRKKPENIPQPISNTSQANLNKLLTDYTEMKKAILHVYWEEFQKDPVGLMSRVAQPASKKIDQNKLKPEMDEKGNLTTAGFACSQCGQPLFVYKLEQVSEKGKAYTNYFGRCNVAEHEKLILLAQLKPEKDSDEAVTYSLGKFGQRALDFYSIHVTKESTHPVKPLAQIAGNRYASVPVGKALSDACMGTIASFLSKYQDIIIEHQKVVKGNQKRLESLRELAGKENLEYPSVTLPPQPHTKEGVDAYNEVIARVRMWVNLNLWQKLKLSRDDAKPLLRLKGFPSFPLVERQANEVDWWDMVCNVKKLINEKKEDGKVFWQNLAGYKRQEALRPYLSSEEDRKKGKKFARYQLGDLLLHLEKKHGEDWGKVYDEAWERIDKKVEGLSKHIKLEEERRSEDAQSKAALTDWLRAKASFVIEGLKEADKDEFCRCELKLQKWYGDLRGKPFAIEAENSILDISGFSKQYNCAFIWQKDGVKKLNLYLIINYFKGGKLRFKKIKPEAFEANRFYTVINKKSGEIVPMEVNFNFDDPNLIILPLAFGKRQGREFIWNDLLSLETGSLKLANGRVIEKTLYNRRTRQDEPALFVALTFERREVLDSSNIKPMNLIGVDRGENIPAVIALTDPEGCPLSRFKDSLGNPTHILRIGESYKEKQRTIQAKKEVEQRRAGGYSRKYASKAKNLADDMVRNTARDLLYYAVTQDAMLIFENLSRGFGRQGKRTFMAERQYTRMEDWLTAKLAYEGLPSQTYLSKTLAQYTSKTCSNCGFTITSADYDRVLEKLKKTATGWMTTINGKELKVEGQITYYNRYKRQNVVKDLSVELDRLSEESVNNDISSWTKGRSGEALSLLKKRFSHRPVQEKFVCLNCGFETHADEQAALNIARSWLFLRSQEYKKYQTNKTTGNTDKRAFVETWQSFYRKKLKEVWKPAV

SEQ ID NO: 42592 - protein, 978 aa, synthetic construct
  REGION 1..978: note = engineered CasX variant
QEIKRINKIRRRLVKDSNTKKAGKTGPMKTLLVRVMTPDLRERLENLRKKPENIPQPISNTSQANLNKLLTDYTEMKKAILHVYWEEFQKDPVGLMSRVAQPASKKIDQNKLKPEMDEKGNLTTAGFACSQCGQPLFVYKLEQVSEKGKAYTNYFGRCNVAEHEKLIKLAQLKPEKDSDEAVTYSLGKFGQRALDFYSIHVTKESTHPVKPLAQIAGNRYASGPVGKALSDACMGTIASFLSKYQDIIIEHQKVVKGNQKRLESLRELAGKENLEYPSVTLPPQPHTKEGVDAYNEVIARVRMWVNLNLWQKLKLSRDDAKPLLRLKGFPSFPLVERQANEVDWWDMVCNVKKLINEKKEDGKVFWQNLAGYKRQEALRPYLSSEEDRKKGKKFARYQLGDLLLHLEKKHGEDWGKVYDEAWERIDKKVEGLSKHIKLEEERRSEDAQSKAALTDWLRAKASFVIEGLKEADKDEFCRCELKLQKWYGDLRGKPFAIEAENSILDISGFSKQYNCAFIWQKDGVKKLNLYLIINYFKGGKLRFKKIKPEAFEANRFYTVINKKSGEIVPMEVNFNFDDPNLIILPLAFGKRQGREFIWNDLLSLETGSLKLANGRVIEKTLYNRRTRQDEPALFVALTFERREVLDSSNIKPMNLIGVDRGENIPAVIALTDPEGCPLSRFKDSLGNPTHILRIGESYKEKQRTIQAKKEVEQRRAGGYSRKYASKAKNLADDMVRNTARDLLYYAVTQDAMLIFENLSRGFGRQGKRTFMAERQYTRMEDWLTAKLAYEGLPSQTYLSKTLAQYTSKTCSNCGFTITSADYDRVLEKLKKTATGWMTTINGKELKVEGQITYYNRYKRQNVVKDLSVELDRLSEESVNNDISSWTKGRSGEALSLLKKRFSHRPVQEKFVCLNCGFETHADEQAALNIARSWLFLRSQEYKKYQTNKTTGNTDKRAFVETWQSFYRKKLKEVWKPAV

SEQ ID NO: 42593 - protein, 977 aa, synthetic construct
  REGION 1..977: note = engineered CasX variant
QEIKRINKIRRRLVKDSNTKKAGKTGPMKTLLVRVMTPDLRERLENLRKKPENIPQPISNTSQANLNKLLTDYTEMKKAILHVYWEEFQKDPVGLMSRVAQPASKKIDQNKLKPEMDEKGNLTTAGFACSQCGQPLFVYKLEQVSEKGKAYTNYFGRCNVAEHEKLILLAQLKPEKDSDEAVTYSLGKFGQRALDFYSIHVTKESTHPVKPLAQIAGNRYASPVGKALSDACMGTIASFLSKYQDIIIEHQKVVKGNQKRLESLRELAGKENLEYPSVTLPPQPHTKEGVDAYNEVIARVRMWVNLNLWQKLKLSRDDAKPLLRLKGFPSFPLVERQANEVDWWDMVCNVKKLINEKKEDGKVFWQNLAGYKRQEALRPYLSSEEDRKKGKKFARYQLGDLLLHLEKKHGEDWGKVYDEAWERIDKKVEGLSKHIKLEEERRSEDAQSKAALTDWLRAKASFVIEGLKEADKDEFCRCELKLQKWYGDLRGKPFAIEAENSILDISGFSKQYNCAFIWQKDGVKKLNLYLIINYFKGGKLRFKKIKPEAFEANRFYTVINKKSGEIVPMEVNFNFDDPNLIILPLAFGKRQGREFIWNDLLSLETGSLKLANGRVIEKTLYNRRTRQDEPALFVALTFERREVLDSSNIKPMNLIGVDRGENIPAVIALTDPEGCPLSRFKDSLGNPTHILRIGESYKEKQRTIQAKKEVEQRRAGGYSRKYASKAKNLADDMVRNTARDLLYYAVTQDAMLIFENLSRGFGRQGKRTFMAERQYTRMEDWLTAKLAYEGLPSQTYLSKTLAQYTSKTCSNCGFTITSADYDRVLEKLKKTATGWMTTINGKELKVEGQITYYNRYKRQNVVKDLSVELDRLSEESVNNDISSWTKGRSGEALSLLKKRFSHRPVQEKFVCLNCGFETHADEQAALNIARSWLFLRSQEYKKYQTNKTTGNTDKRAFVETWQSFYRKKLKEVWKPAV

SEQ ID NO: 42594 - protein, 978 aa, synthetic construct
  REGION 1..978: note = engineered CasX variant
QEIKRINKIRRRLVKDSNTKKAGKTGPMKTLLVRVMTPDLRERLENLRKKPENIPQPISNTSQANLNKLLTDYTEMKKAILHVYWEEFQKDPVGLMSRVAQPASKKIDQNKLKPEMDEKGNLTTAGFACSQCGQPLFVYKLEQVSEKGKAYTNYFGRCNVAEHEKLILLAQLKPEKDSDEAVTYSLGKFGQRALDFYSIHVTKESTHPVKPLAQIAGNRYASYPVGKALSDACMGTIASFLSKYQDIIIEHQKVVKGNQKRLESLRELAGKENLEYPSVTLPPQPHTKEGVDAYNEVIARVRMWVNLNLWQKLKLSRDDAKPLLRLKGFPSFPLVERQANEVDWWDMVCNVKKLINEKKEDGKVFWQNLAGYKRQEALRPYLSSEEDRKKGKKFARYQLGDLLLHLEKKHGEDWGKVYDEAWERIDKKVEGLSKHIKLEEERRSEDAQSKAALTDWLRAKASFVIEGLKEADKDEFCRCELKLQKWYGDLRGKPFAIEAENSILDISGFSKQYNCAFIWQKDGVKKLNLYLIINYFKGGKLRFKKIKPEAFEANRFYTVINKKSGEIVPMEVNFNFDDPNLIILPLAFGKRQGREFIWNDLLSLETGSLKLANGRVIEKTLYNRRTRQDEPALFVALTFERREVLDSSNIKPMNLIGVDRGENIPAVIALTDPEGCPLSRFKDSLGNPTHILRIGESYKEKQRTIQAKKEVEQRRAGGYSRKYASKAKNLADDMVRNTARDLLYYAVTQDAMLIFENLSRGFGRQGKRTFMAERQYTRMEDWLTAKLAYNGLPSKTYLSKTLAQYTSKTCSNCGFTITSADYDRVLEKLKKTATGWMTTINGKELKVEGQITYYNRYKRQNVVKDLSVELDRLSEESVNNDISSWTKGRSGEALSLLKKRFSHRPVQEKFVCLNCGFETHADEQAALNIARSWLFLRSQEYKKYQTNKTTGNTDKRAFVETWQSFYRKKLKEVWKPAV

SEQ ID NO: 42595 - protein, 978 aa, synthetic construct
  REGION 1..978: note = engineered CasX variant
QEIKRINKIRRRLVKDSNTKKAGKTGPMKTLLVRVMTPDLRERLENLRKKPENIPQPISNTSQANLNKLLTDYTEMKKAILHVYWEEFQKDPVGLMSRVAQPASKKIDQNKLKPEMDEKGNLTTAGFACSQCGQPLFVYKLEQVSEKGKAYTNYFGRCNVAEHEKLILLAQLKPEKDSDEAVTYSLGKFGQRALDFYSIHVTKESTHPVKPLAQIAGNRYASHPVGKALSDACMGTIASFLSKYQDIIIEHQKVVKGNQKRLESLRELAGKENLEYPSVTLPPQPHTKEGVDAYNEVIARVRMWVNLNLWQKLKLSRDDAKPLLRLKGFPSFPLVERQANEVDWWDMVCNVKKLINEKKEDGKVFWQNLAGYKRQEALRPYLSSEEDRKKGKKFARYQLGDLLLHLEKKHGEDWGKVYDEAWERIDKKVEGLSKHIKLEEERRSEDAQSKAALTDWLRAKASFVIEGLKEADKDEFCRCELKLQKWYGDLRGKPFAIEAENSILDISGFSKQYNCAFIWQKDGVKKLNLYLIINYFKGGKLRFKKIKPEAFEANRFYTVINKKSGEIVPMEVNFNFDDPNLIILPLAFGKRQGREFIWNDLLSLETGSLKLANGRVIEKTLYNRRTRQDEPALFVALTFERREVLDSSNIKPMNLIGVDRGENIPAVIALTDPEGCPLSRFKDSLGNPTHILRIGESYKEKQRTIQAKKEVEQRRAGGYSRKYASKAKNLADDMVRNTARDLLYYAVTQDAMLIFENLSRGFGRQGKRTFMAERQYTRMEDWLTAKLAYNGLPSKTYLSKTLAQYTSKTCSNCGFTITSADYDRVLEKLKKTATGWMTTINGKELKVEGQITYYNRYKRQNVVKDLSVELDRLSEESVNNDISSWTKGRSGEALSLLKKRFSHRPVQEKFVCLNCGFETHADEQAALNIARSWLFLRSQEYKKYQTNKTTGNTDKRAFVETWQSFYRKKLKEVWKPAV

SEQ ID NO: 42596 - protein, 978 aa, synthetic construct
  REGION 1..978: note = engineered CasX variant
QEIKRINKIRRRLVKDSNTKKAGKTGPMKTLLVRVMTPDLRERLENLRKKPENIPQPISNTSQANLNKLLTDYTEMKKAILHVYWEEFQKDPVGLMSRVAQPASKKIDQNKLKPEMDEKGNLTTAGFACSQCGQPLFVYKLEQVSEKGKAYTNYFGRCNVAEHEKLILLAQLKPEKDSDEAVTYSLGKFGQRALDFYSIHVTKESTHPVKPLAQIAGNRYASSPVGKALSDACMGTIASFLSKYQDIIIEHQKVVKGNQKRLESLRELAGKENLEYPSVTLPPQPHTKEGVDAYNEVIARVRMWVNLNLWQKLKLSRDDAKPLLRLKGFPSFPLVERQANEVDWWDMVCNVKKLINEKKEDGKVFWQNLAGYKRQEALRPYLSSEEDRKKGKKFARYQLGDLLLHLEKKHGEDWGKVYDEAWERIDKKVEGLSKHIKLEEERRSEDAQSKAALTDWLRAKASFVIEGLKEADKDEFCRCELKLQKWYGDLRGKPFAIEAENSILDISGFSKQYNCAFIWQKDGVKKLNLYLIINYFKGGKLRFKKIKPEAFEANRFYTVINKKSGEIVPMEVNFNFDDPNLIILPLAFGKRQGREFIWNDLLSLETGSLKLANGRVIEKTLYNRRTRQDEPALFVALTFERREVLDSSNIKPMNLIGVDRGENIPAVIALTDPEGCPLSRFKDSLGNPTHILRIGESYKEKQRTIQAKKEVEQRRAGGYSRKYASKAKNLADDMVRNTARDLLYYAVTQDAMLIFENLSRGFGRQGKRTFMAERQYTRMEDWLTAKLAYNGLPSKTYLSKTLAQYTSKTCSNCGFTITSADYDRVLEKLKKTATGWMTTINGKELKVEGQITYYNRYKRQNVVKDLSVELDRLSEESVNNDISSWTKGRSGEALSLLKKRFSHRPVQEKFVCLNCGFETHADEQAALNIARSWLFLRSQEYKKYQTNKTTGNTDKRAFVETWQSFYRKKLKEVWKPAV

SEQ ID NO: 42597 - protein, 978 aa, synthetic construct
  REGION 1..978: note = engineered CasX variant
QEIKRINKIRRRLVKDSNTKKAGKTGPMKTLLVRVMTPDLRERLENLRKKPENIPQPISNTSQANLNKLLTDYTEMKKAILHVYWEEFQKDPVGLMSRVAQPASKKIDQNKLKPEMDEKGNLTTAGFACSQCGQPLFVYKLEQVSEKGKAYTNYFGRCNVAEHEKLILLAQLKPEKDSDEAVTYSLGKFGQRALDFYSIHVTKESTHPVKPLAQIAGNRYASTPVGKALSDACMGTIASFLSKYQDIIIEHQKVVKGNQKRLESLRELAGKENLEYPSVTLPPQPHTKEGVDAYNEVIARVRMWVNLNLWQKLKLSRDDAKPLLRLKGFPSFPLVERQANEVDWWDMVCNVKKLINEKKEDGKVFWQNLAGYKRQEALRPYLSSEEDRKKGKKFARYQLGDLLLHLEKKHGEDWGKVYDEAWERIDKKVEGLSKHIKLEEERRSEDAQSKAALTDWLRAKASFVIEGLKEADKDEFCRCELKLQKWYGDLRGKPFAIEAENSILDISGFSKQYNCAFIWQKDGVKKLNLYLIINYFKGGKLRFKKIKPEAFEANRFYTVINKKSGEIVPMEVNFNFDDPNLIILPLAFGKRQGREFIWNDLLSLETGSLKLANGRVIEKTLYNRRTRQDEPALFVALTFERREVLDSSNIKPMNLIGVDRGENIPAVIALTDPEGCPLSRFKDSLGNPTHILRIGESYKEKQRTIQAKKEVEQRRAGGYSRKYASKAKNLADDMVRNTARDLLYYAVTQDAMLIFENLSRGFGRQGKRTFMAERQYTRMEDWLTAKLAYNGLPSKTYLSKTLAQYTSKTCSNCGFTITSADYDRVLEKLKKTATGWMTTINGKELKVEGQITYYNRYKRQNVVKDLSVELDRLSEESVNNDISSWTKGRSGEALSLLKKRFSHRPVQEKFVCLNCGFETHADEQAALNIARSWLFLRSQEYKKYQTNKTTGNTDKRAFVETWQSFYRKKLKEVWKPAV

SEQ ID NO: 42598 - protein, 978 aa, synthetic construct
  REGION 1..978: note = engineered CasX variant
QEIKRINKIRRRLVKDSNTKKAGKTGPMKTLLVRVMTPDLRERLENLRKKPENIPQPISNTSQANLNKLLTDYTEMKKAILHVYWEEFQKDPVGLMSRVAQPASKKIDQNKLKPEMDEKGNLTTAGFACSQCGQPLFVYKLEQVSEKGKAYTNYFGRCNVAEHEKLILLAQLKPEKDSDEAVTYSLGKFGQRALDFYSIHVTKESTHPVKPLAQIAGNRYASAPVGKALSDACMGTIASFLSKYQDIIIEHQKVVKGNQKRLESLRELAGKENLEYPSVTLPPQPHTKEGVDAYNEVIARVRMWVNLNLWQKLKLSRDDAKPLLRLKGFPSFPLVERQANEVDWWDMVCNVKKLINEKKEDGKVFWQNLAGYKRQEALRPYLSSEEDRKKGKKFARYQLGDLLLHLEKKHGEDWGKVYDEAWERIDKKVEGLSKHIKLEEERRSEDAQSKAALTDWLRAKASFVIEGLKEADKDEFCRCELKLQKWYGDLRGKPFAIEAENSILDISGFSKQYNCAFIWQKDGVKKLNLYLIINYFKGGKLRFKKIKPEAFEANRFYTVINKKSGEIVPMEVNFNFDDPNLIILPLAFGKRQGREFIWNDLLSLETGSLKLANGRVIEKTLYNRRTRQDEPALFVALTFERREVLDSSNIKPMNLIGVDRGENIPAVIALTDPEGCPLSRFKDSLGNPTHILRIGESYKEKQRTIQAKKEVEQRRAGGYSRKYASKAKNLADDMVRNTARDLLYYAVTQDAMLIFENLSRGFGRQGKRTFMAERQYTRMEDWLTAKLAYNGLPSKTYLSKTLAQYTSKTCSNCGFTITSADYDRVLEKLKKTATGWMTTINGKELKVEGQITYYNRYKRQNVVKDLSVELDRLSEESVNNDISSWTKGRSGEALSLLKKRFSHRPVQEKFVCLNCGFETHADEQAALNIARSWLFLRSQEYKKYQTNKTTGNTDKRAFVETWQSFYRKKLKEVWKPAV

SEQ ID NO: 42599 - protein, 978 aa, synthetic construct
  REGION 1..978: note = engineered CasX variant
QEIKRINKIRRRLVKDSNTKKAGKTGPMKTLLVRVMTPDLRERLENLRKKPENIPQPISNTSQANLNKLLTDYTEMKKAILHVYWEEFQKDPVGLMSRVAQPASKKIDQNKLKPEMDEKGNLTTAGFACSQCGQPLFVYKLEQVSEKGKAYTNYFGRCNVAEHEKLILLAQLKPEKDSDEAVTYSLGKFGQRALDFYSIHVTKESTHPVKPLAQIAGNRYASVPVGKALSDACMGTIASFLSKYQDIIIEHQKVVKGNQKRLESLRELAGKENLEYPSVTLPPQPHTKEGVDAYNEVIARVRMWVNLNLWQKLKLSRDDAKPLLRLKGFPSFPLVERQANEVDWWDMVCNVKKLINEKKEDGKVFWQNLAGYKRQEALRPYLSSEEDRKKGKKFARYQLGDLLLHLEKKHGEDWGKVYDEAWERIDKKVEGLSKHIKLEEERRSEDAQSKAALTDWLRAKASFVIEGLKEADKDEFCRCELKLQKWYGDLRGKPFAIEAENSILDISGFSKQYNCAFIWQKDGVKKLNLYLIINYFKGGKLRFKKIKPEAFEANRFYTVINKKSGEIVPMEVNFNFDDPNLIILPLAFGKRQGREFIWNDLLSLETGSLKLANGRVIEKTLYNRRTRQDEPALFVALTFERREVLDSSNIKPMNLIGVDRGENIPAVIALTDPEGCPLSRFKDSLGNPTHILRIGESYKEKQRTIQAKKEVEQRRAGGYSRKYASKAKNLADDMVRNTARDLLYYAVTQDAMLIFENLSRGFGRQGKRTFMAERQYTRMEDWLTAKLAYNGLPSKTYLSKTLAQYTSKTCSNCGFTITSADYDRVLEKLKKTATGWMTTINGKELKVEGQITYYNRYKRQNVVKDLSVELDRLSEESVNNDISSWTKGRSGEALSLLKKRFSHRPVQEKFVCLNCGFETHADEQAALNIARSWLFLRSQEYKKYQTNKTTGNTDKRAFVETWQSFYRKKLKEVWKPAV

SEQ ID NO: 42600 - protein, 978 aa, synthetic construct
  REGION 1..978: note = engineered CasX variant
QEIKRINKIRRRLVKDSNTKKAGKTGPMKTLLVRVMTPDLRERLENLRKKPENIPQPISNTSQANLNKLLTDYTEMKKAILHVYWEEFQKDPVGLMSRVAQPASKKIDQNKLKPEMDEKGNLTTAGFACSQCGQPLFVYKLEQVSEKGKAYTNYFGRCNVAEHEKLIKLAQLKPEKDSDEAVTYSLGKFGQRALDFYSIHVTKESTHPVKPLAQIAGNRYASGPVGKALSDACMGTIASFLSKYQDIIIEHQKVVKGNQKRLESLRELAGKENLEYPSVTLPPQPHTKEGVDAYNEVIARVRMWVNLNLWQKLKLSRDDAKPLLRLKGFPSFPLVERQANEVDWWDMVCNVKKLINEKKEDGKVFWQNLAGYKRQEALRPYLSSEEDRKKGKKFARYQLGDLLLHLEKKHGEDWGKVYDEAWERIDKKVEGLSKHIKLEEERRSEDAQSKAALTDWLRAKASFVIEGLKEADKDEFCRCELKLQKWYGDLRGKPFAIEAENSILDISGFSKQYNCAFIWQKDGVKKLNLYLIINYFKGGKLRFKKIKPEAFEANRFYTVINKKSGEIVPMEVNFNFDDPNLIILPLAFGKRQGREFIWNDLLSLETGSLKLANGRVIEKTLYNRRTRQDEPALFVALTFERREVLDSSNIKPMNLIGVDRGENIPAVIALTDPEGCPLSRFKDSLGNPTHILRIGESYKEKQRTIQAKKEVEQRRAGGYSRKYASKAKNLADDMVRNTARDLLYYAVTQDAMLIFENLSRGFGRQGKRTFMAERQYTRMEDWLTAKLAYNGLPSKTYLSKTLAQYTSKTCSNCGFTITSADYDRVLEKLKKTATGWMTTINGKELKVEGQITYYNRYKRQNVVKDLSVELDRLSEESVNNDISSWTKGRSGEALSLLKKRFSHRPVQEKFVCLNCGFETHADEQAALNIARSWLFLRSQEYKKYQTNKTTGNTDKRAFVETWQSFYRKKLKEVWKPAV

SEQ ID NO: 42601 - protein, 977 aa, synthetic construct
  REGION 1..977: note = engineered CasX variant
QEIKRINKIRRRLVKDSNTKKAGKTGPMKTLLVRVMTPDLRERLENLRKKPENIPQPISNTSQANLNKLLTDYTEMKKAILHVYWEEFQKDPVGLMSRVAQPASKKIDQNKLKPEMDEKGNLTTAGFACSQCGQPLFVYKLEQVSEKGKAYTNYFGRCNVAEHEKLILLAQLKPEKDSDEAVTYSLGKFGQRALDFYSIHVTKESTHPVKPLAQIAGNRYASPVGKALSDACMGTIASFLSKYQDIIIEHQKVVKGNQKRLESLRELAGKENLEYPSVTLPPQPHTKEGVDAYNEVIARVRMWVNLNLWQKLKLSRDDAKPLLRLKGFPSFPLVERQANEVDWWDMVCNVKKLINEKKEDGKVFWQNLAGYKRQEALRPYLSSEEDRKKGKKFARYQLGDLLLHLEKKHGEDWGKVYDEAWERIDKKVEGLSKHIKLEEERRSEDAQSKAALTDWLRAKASFVIEGLKEADKDEFCRCELKLQKWYGDLRGKPFAIEAENSILDISGFSKQYNCAFIWQKDGVKKLNLYLIINYFKGGKLRFKKIKPEAFEANRFYTVINKKSGEIVPMEVNFNFDDPNLIILPLAFGKRQGREFIWNDLLSLETGSLKLANGRVIEKTLYNRRTRQDEPALFVALTFERREVLDSSNIKPMNLIGVDRGENIPAVIALTDPEGCPLSRFKDSLGNPTHILRIGESYKEKQRTIQAKKEVEQRRAGGYSRKYASKAKNLADDMVRNTARDLLYYAVTQDAMLIFENLSRGFGRQGKRTFMAERQYTRMEDWLTAKLAYNGLPSKTYLSKTLAQYTSKTCSNCGFTITSADYDRVLEKLKKTATGWMTTINGKELKVEGQITYYNRYKRQNVVKDLSVELDRLSEESVNNDISSWTKGRSGEALSLLKKRFSHRPVQEKFVCLNCGFETHADEQAALNIARSWLFLRSQEYKKYQTNKTTGNTDKRAFVETWQSFYRKKLKEVWKPAV

SEQ ID NO: 42602 - protein, 978 aa, synthetic construct
  REGION 1..978: note = engineered CasX variant
QEIKRINKIRRRLVKDSNTKKAGKTGPMKTLLVRVMTPDLRERLENLRKKPENIPQPISNTSQANLNKLLTDYTEMKKAILHVYWEEFQKDPVGLMSRVAQPASKKIDQNKLKPEMDEKGNLTTAGFACSQCGQPLFVYKLEQVSEKGKAYTNYFGRCNVAEHEKLIQLAQLKPEKDSDEAVTYSLGKFGQRALDFYSIHVTKESTHPVKPLAQIAGNRYASYPVGKALSDACMGTIASFLSKYQDIIIEHQKVVKGNQKRLESLRELAGKENLEYPSVTLPPQPHTKEGVDAYNEVIARVRMWVNLNLWQKLKLSRDDAKPLLRLKGFPSFPLVERQANEVDWWDMVCNVKKLINEKKEDGKVFWQNLAGYKRQEALRPYLSSEEDRKKGKKFARYQLGDLLLHLEKKHGEDWGKVYDEAWERIDKKVEGLSKHIKLEEERRSEDAQSKAALTDWLRAKASFVIEGLKEADKDEFCRCELKLQKWYGDLRGKPFAIEAENSILDISGFSKQYNCAFIWQKDGVKKLNLYLIINYFKGGKLRFKKIKPEAFEANRFYTVINKKSGEIVPMEVNFNFDDPNLIILPLAFGKRQGREFIWNDLLSLETGSLKLANGRVIEKTLYNRRTRQDEPALFVALTFERREVLDSSNIKPMNLIGVDRGENIPAVIALTDPEGCPLSRFKDSLGNPTHILRIGESYKEKQRTIQAKKEVEQRRAGGYSRKYASKAKNLADDMVRNTARDLLYYAVTQDAMLIFENLSRGFGRQGKRTFMAERQYTRMEDWLTAKLAYEGLPSKTYLSKTLAQYTSKTCSNCGFTITSADYDRVLEKLKKTATGWMTTINGKELKVEGQITYYNRYKRQNVVKDLSVELDRLSEESVNNDISSWTKGRSGEALSLLKKRFSHRPVQEKFVCLNCGFETHADEQAALNIARSWLFLRSQEYKKYQTNKTTGNTDKRAFVETWQSFYRKKLKEVWKPAV

SEQ ID NO: 42603 - protein, 978 aa, synthetic construct
  REGION 1..978: note = engineered CasX variant
QEIKRINKIRRRLVKDSNTKKAGKTGPMKTLLVRVMTPDLRERLENLRKKPENIPQPISNTSQANLNKLLTDYTEMKKAILHVYWEEFQKDPVGLMSRVAQPASKKIDQNKLKPEMDEKGNLTTAGFACSQCGQPLFVYKLEQVSEKGKAYTNYFGRCNVAEHEKLIQLAQLKPEKDSDEAVTYSLGKFGQRALDFYSIHVTKESTHPVKPLAQIAGNRYASHPVGKALSDACMGTIASFLSKYQDIIIEHQKVVKGNQKRLESLRELAGKENLEYPSVTLPPQPHTKEGVDAYNEVIARVRMWVNLNLWQKLKLSRDDAKPLLRLKGFPSFPLVERQANEVDWWDMVCNVKKLINEKKEDGKVFWQNLAGYKRQEALRPYLSSEEDRKKGKKFARYQLGDLLLHLEKKHGEDWGKVYDEAWERIDKKVEGLSKHIKLEEERRSEDAQSKAALTDWLRAKASFVIEGLKEADKDEFCRCELKLQKWYGDLRGKPFAIEAENSILDISGFSKQYNCAFIWQKDGVKKLNLYLIINYFKGGKLRFKKIKPEAFEANRFYTVINKKSGEIVPMEVNFNFDDPNLIILPLAFGKRQGREFIWNDLLSLETGSLKLANGRVIEKTLYNRRTRQDEPALFVALTFERREVLDSSNIKPMNLIGVDRGENIPAVIALTDPEGCPLSRFKDSLGNPTHILRIGESYKEKQRTIQAKKEVEQRRAGGYSRKYASKAKNLADDMVRNTARDLLYYAVTQDAMLIFENLSRGFGRQGKRTFMAERQYTRMEDWLTAKLAYEGLPSKTYLSKTLAQYTSKTCSNCGFTITSADYDRVLEKLKKTATGWMTTINGKELKVEGQITYYNRYKRQNVVKDLSVELDRLSEESVNNDISSWTKGRSGEALSLLKKRFSHRPVQEKFVCLNCGFETHADEQAALNIARSWLFLRSQEYKKYQTNKTTGNTDKRAFVETWQSFYRKKLKEVWKPAV

SEQ ID NO: 42604 - protein, 978 aa, synthetic construct
  REGION 1..978: note = engineered CasX variant
QEIKRINKIRRRLVKDSNTKKAGKTGPMKTLLVRVMTPDLRERLENLRKKPENIPQPISNTSQANLNKLLTDYTEMKKAILHVYWEEFQKDPVGLMSRVAQPASKKIDQNKLKPEMDEKGNLTTAGFACSQCGQPLFVYKLEQVSEKGKAYTNYFGRCNVAEHEKLIQLAQLKPEKDSDEAVTYSLGKFGQRALDFYSIHVTKESTHPVKPLAQIAGNRYASSPVGKALSDACMGTIASFLSKYQDIIIEHQKVVKGNQKRLESLRELAGKENLEYPSVTLPPQPHTKEGVDAYNEVIARVRMWVNLNLWQKLKLSRDDAKPLLRLKGFPSFPLVERQANEVDWWDMVCNVKKLINEKKEDGKVFWQNLAGYKRQEALRPYLSSEEDRKKGKKFARYQLGDLLLHLEKKHGEDWGKVYDEAWERIDKKVEGLSKHIKLEEERRSEDAQSKAALTDWLRAKASFVIEGLKEADKDEFCRCELKLQKWYGDLRGKPFAIEAENSILDISGFSKQYNCAFIWQKDGVKKLNLYLIINYFKGGKLRFKKIKPEAFEANRFYTVINKKSGEIVPMEVNFNFDDPNLIILPLAFGKRQGREFIWNDLLSLETGSLKLANGRVIEKTLYNRRTRQDEPALFVALTFERREVLDSSNIKPMNLIGVDRGENIPAVIALTDPEGCPLSRFKDSLGNPTHILRIGESYKEKQRTIQAKKEVEQRRAGGYSRKYASKAKNLADDMVRNTARDLLYYAVTQDAMLIFENLSRGFGRQGKRTFMAERQYTRMEDWLTAKLAYEGLPSKTYLSKTLAQYTSKTCSNCGFTITSADYDRVLEKLKKTATGWMTTINGKELKVEGQITYYNRYKRQNVVKDLSVELDRLSEESVNNDISSWTKGRSGEALSLLKKRFSHRPVQEKFVCLNCGFETHADEQAALNIARSWLFLRSQEYKKYQTNKTTGNTDKRAFVETWQSFYRKKLKEVWKPAV

SEQ ID NO: 42605 - protein, 978 aa, synthetic construct
  REGION 1..978: note = engineered CasX variant
QEIKRINKIRRRLVKDSNTKKAGKTGPMKTLLVRVMTPDLRERLENLRKKPENIPQPISNTSQANLNKLLTDYTEMKKAILHVYWEEFQKDPVGLMSRVAQPASKKIDQNKLKPEMDEKGNLTTAGFACSQCGQPLFVYKLEQVSEKGKAYTNYFGRCNVAEHEKLIQLAQLKPEKDSDEAVTYSLGKFGQRALDFYSIHVTKESTHPVKPLAQIAGNRYASTPVGKALSDACMGTIASFLSKYQDIIIEHQKVVKGNQKRLESLRELAGKENLEYPSVTLPPQPHTKEGVDAYNEVIARVRMWVNLNLWQKLKLSRDDAKPLLRLKGFPSFPLVERQANEVDWWDMVCNVKKLINEKKEDGKVFWQNLAGYKRQEALRPYLSSEEDRKKGKKFARYQLGDLLLHLEKKHGEDWGKVYDEAWERIDKKVEGLSKHIKLEEERRSEDAQSKAALTDWLRAKASFVIEGLKEADKDEFCRCELKLQKWYGDLRGKPFAIEAENSILDISGFSKQYNCAFIWQKDGVKKLNLYLIINYFKGGKLRFKKIKPEAFEANRFYTVINKKSGEIVPMEVNFNFDDPNLIILPLAFGKRQGREFIWNDLLSLETGSLKLANGRVIEKTLYNRRTRQDEPALFVALTFERREVLDSSNIKPMNLIGVDRGENIPAVIALTDPEGCPLSRFKDSLGNPTHILRIGESYKEKQRTIQAKKEVEQRRAGGYSRKYASKAKNLADDMVRNTARDLLYYAVTQDAMLIFENLSRGFGRQGKRTFMAERQYTRMEDWLTAKLAYEGLPSKTYLSKTLAQYTSKTCSNCGFTITSADYDRVLEKLKKTATGWMTTINGKELKVEGQITYYNRYKRQNVVKDLSVELDRLSEESVNNDISSWTKGRSGEALSLLKKRFSHRPVQEKFVCLNCGFETHADEQAALNIARSWLFLRSQEYKKYQTNKTTGNTDKRAFVETWQSFYRKKLKEVWKPAV

SEQ ID NO: 42606 - protein, 978 aa, synthetic construct
  REGION 1..978: note = engineered CasX variant
QEIKRINKIRRRLVKDSNTKKAGKTGPMKTLLVRVMTPDLRERLENLRKKPENIPQPISNTSQANLNKLLTDYTEMKKAILHVYWEEFQKDPVGLMSRVAQPASKKIDQNKLKPEMDEKGNLTTAGFACSQCGQPLFVYKLEQVSEKGKAYTNYFGRCNVAEHEKLIQLAQLKPEKDSDEAVTYSLGKFGQRALDFYSIHVTKESTHPVKPLAQIAGNRYASAPVGKALSDACMGTIASFLSKYQDIIIEHQKVVKGNQKRLESLRELAGKENLEYPSVTLPPQPHTKEGVDAYNEVIARVRMWVNLNLWQKLKLSRDDAKPLLRLKGFPSFPLVERQANEVDWWDMVCNVKKLINEKKEDGKVFWQNLAGYKRQEALRPYLSSEEDRKKGKKFARYQLGDLLLHLEKKHGEDWGKVYDEAWERIDKKVEGLSKHIKLEEERRSEDAQSKAALTDWLRAKASFVIEGLKEADKDEFCRCELKLQKWYGDLRGKPFAIEAENSILDISGFSKQYNCAFIWQKDGVKKLNLYLIINYFKGGKLRFKKIKPEAFEANRFYTVINKKSGEIVPMEVNFNFDDPNLIILPLAFGKRQGREFIWNDLLSLETGSLKLANGRVIEKTLYNRRTRQDEPALFVALTFERREVLDSSNIKPMNLIGVDRGENIPAVIALTDPEGCPLSRFKDSLGNPTHILRIGESYKEKQRTIQAKKEVEQRRAGGYSRKYASKAKNLADDMVRNTARDLLYYAVTQDAMLIFENLSRGFGRQGKRTFMAERQYTRMEDWLTAKLAYEGLPSKTYLSKTLAQYTSKTCSNCGFTITSADYDRVLEKLKKTATGWMTTINGKELKVEGQITYYNRYKRQNVVKDLSVELDRLSEESVNNDISSWTKGRSGEALSLLKKRFSHRPVQEKFVCLNCGFETHADEQAALNIARSWLFLRSQEYKKYQTNKTTGNTDKRAFVETWQSFYRKKLKEVWKPAV

SEQ ID NO: 42607 - protein, 978 aa, synthetic construct
  REGION 1..978: note = engineered CasX variant
QEIKRINKIRRRLVKDSNTKKAGKTGPMKTLLVRVMTPDLRERLENLRKKPENIPQPISNTSQANLNKLLTDYTEMKKAILHVYWEEFQKDPVGLMSRVAQPASKKIDQNKLKPEMDEKGNLTTAGFACSQCGQPLFVYKLEQVSEKGKAYTNYFGRCNVAEHEKLIQLAQLKPEKDSDEAVTYSLGKFGQRALDFYSIHVTKESTHPVKPLAQIAGNRYASVPVGKALSDACMGTIASFLSKYQDIIIEHQKVVKGNQKRLESLRELAGKENLEYPSVTLPPQPHTKEGVDAYNEVIARVRMWVNLNLWQKLKLSRDDAKPLLRLKGFPSFPLVERQANEVDWWDMVCNVKKLINEKKEDGKVFWQNLAGYKRQEALRPYLSSEEDRKKGKKFARYQLGDLLLHLEKKHGEDWGKVYDEAWERIDKKVEGLSKHIKLEEERRSEDAQSKAALTDWLRAKASFVIEGLKEADKDEFCRCELKLQKWYGDLRGKPFAIEAENSILDISGFSKQYNCAFIWQKDGVKKLNLYLIINYFKGGKLRFKKIKPEAFEANRFYTVINKKSGEIVPMEVNFNFDDPNLIILPLAFGKRQGREFIWNDLLSLETGSLKLANGRVIEKTLYNRRTRQDEPALFVALTFERREVLDSSNIKPMNLIGVDRGENIPAVIALTDPEGCPLSRFKDSLGNPTHILRIGESYKEKQRTIQAKKEVEQRRAGGYSRKYASKAKNLADDMVRNTARDLLYYAVTQDAMLIFENLSRGFGRQGKRTFMAERQYTRMEDWLTAKLAYEGLPSKTYLSKTLAQYTSKTCSNCGFTITSADYDRVLEKLKKTATGWMTTINGKELKVEGQITYYNRYKRQNVVKDLSVELDRLSEESVNNDISSWTKGRSGEALSLLKKRFSHRPVQEKFVCLNCGFETHADEQAALNIARSWLFLRSQEYKKYQTNKTTGNTDKRAFVETWQSFYRKKLKEVWKPAV

SEQ ID NO: 42608 - protein, 979 aa, synthetic construct
  REGION 1..979: note = engineered CasX variant
QEIKRINKIRRRLVKDSNTKKAGKTGPMKTLLVRVMTPDLRERLENLRKKPENIPQPISNTSQANLNKLLTDYTEMKKAILHVYWEEFQKDPVGLMSRVAQPASKKIDQNKLKPEMDEKGNLTTAGFACSQCGQPLFVYKLEQVSEKGKAYTNYFGRCNVAEHEKLIQKLAQLKPEKDSDEAVTYSLGKFGQRALDFYSIHVTKESTHPVKPLAQIAGNRYASGPVGKALSDACMGTIASFLSKYQDIIIEHQKVVKGNQKRLESLRELAGKENLEYPSVTLPPQPHTKEGVDAYNEVIARVRMWVNLNLWQKLKLSRDDAKPLLRLKGFPSFPLVERQANEVDWWDMVCNVKKLINEKKEDGKVFWQNLAGYKRQEALRPYLSSEEDRKKGKKFARYQLGDLLLHLEKKHGEDWGKVYDEAWERIDKKVEGLSKHIKLEEERRSEDAQSKAALTDWLRAKASFVIEGLKEADKDEFCRCELKLQKWYGDLRGKPFAIEAENSILDISGFSKQYNCAFIWQKDGVKKLNLYLIINYFKGGKLRFKKIKPEAFEANRFYTVINKKSGEIVPMEVNFNFDDPNLIILPLAFGKRQGREFIWNDLLSLETGSLKLANGRVIEKTLYNRRTRQDEPALFVALTFERREVLDSSNIKPMNLIGVDRGENIPAVIALTDPEGCPLSRFKDSLGNPTHILRIGESYKEKQRTIQAKKEVEQRRAGGYSRKYASKAKNLADDMVRNTARDLLYYAVTQDAMLIFENLSRGFGRQGKRTFMAERQYTRMEDWLTAKLAYEGLPSKTYLSKTLAQYTSKTCSNCGFTITSADYDRVLEKLKKTATGWMTTINGKELKVEGQITYYNRYKRQNVVKDLSVELDRLSEESVNNDISSWTKGRSGEALSLLKKRFSHRPVQEKFVCLNCGFETHADEQAALNIARSWLFLRSQEYKKYQTNKTTGNTDKRAFVETWQSFYRKKLKEVWKPAV

SEQ ID NO: 42609 - protein, 977 aa, synthetic construct
  REGION 1..977: note = engineered CasX variant
QEIKRINKIRRRLVKDSNTKKAGKTGPMKTLLVRVMTPDLRERLENLRKKPENIPQPISNTSQANLNKLLTDYTEMKKAILHVYWEEFQKDPVGLMSRVAQPASKKIDQNKLKPEMDEKGNLTTAGFACSQCGQPLFVYKLEQVSEKGKAYTNYFGRCNVAEHEKLIQLAQLKPEKDSDEAVTYSLGKFGQRALDFYSIHVTKESTHPVKPLAQIAGNRYASPVGKALSDACMGTIASFLSKYQDIIIEHQKVVKGNQKRLESLRELAGKENLEYPSVTLPPQPHTKEGVDAYNEVIARVRMWVNLNLWQKLKLSRDDAKPLLRLKGFPSFPLVERQANEVDWWDMVCNVKKLINEKKEDGKVFWQNLAGYKRQEALRPYLSSEEDRKKGKKFARYQLGDLLLHLEKKHGEDWGKVYDEAWERIDKKVEGLSKHIKLEEERRSEDAQSKAALTDWLRAKASFVIEGLKEADKDEFCRCELKLQKWYGDLRGKPFAIEAENSILDISGFSKQYNCAFIWQKDGVKKLNLYLIINYFKGGKLRFKKIKPEAFEANRFYTVINKKSGEIVPMEVNFNFDDPNLIILPLAFGKRQGREFIWNDLLSLETGSLKLANGRVIEKTLYNRRTRQDEPALFVALTFERREVLDSSNIKPMNLIGVDRGENIPAVIALTDPEGCPLSRFKDSLGNPTHILRIGESYKEKQRTIQAKKEVEQRRAGGYSRKYASKAKNLADDMVRNTARDLLYYAVTQDAMLIFENLSRGFGRQGKRTFMAERQYTRMEDWLTAKLAYEGLPSKTYLSKTLAQYTSKTCSNCGFTITSADYDRVLEKLKKTATGWMTTINGKELKVEGQITYYNRYKRQNVVKDLSVELDRLSEESVNNDISSWTKGRSGEALSLLKKRFSHRPVQEKFVCLNCGFETHADEQAALNIARSWLFLRSQEYKKYQTNKTTGNTDKRAFVETWQSFYRKKLKEVWKPAV

SEQ ID NO: 42610 - protein, 978 aa, synthetic construct
  REGION 1..978: note = engineered CasX variant
QEIKRINKIRRRLVKDSNTKKAGKTGPMKTLLVRVMTPDLRERLENLRKKPENIPQPISNTSQANLNKLLTDYTEMKKAILHVYWEEFQKDPVGLMSRVAQPASKKIDQNKLKPEMDEKGNLTTAGFACSQCGQPLFVYKLEQVSEKGKAYTNYFGRCNVAEHEKLILLAQLKPEKDSDEAVTYSLGKFGQRALDFYSIHVTKESTHPVKPLAQIAGNRYASYPVGKALSDACMGTIASFLSKYQDIIIEHQKVVKGNQKRLESLRELAGKENLEYPSVTLPPQPHTKEGVDAYNEVIARVRMWVNLNLWQKLKLSRDDAKPLLRLKGFPSFPLVERQANEVDWWDMVCNVKKLINEKKEDGKVFWQNLAIYKRQEALRPYLSSEEDRKKGKKFARYQLGDLLLHLEKKHGEDWGKVYDEAWERIDKKVEGLSKHIKLEEERRSEDAQSKAALTDWLRAKASFVIEGLKEADKDEFCRCELKLQKWYGDLRGKPFAIEAENSILDISGFSKQYNCAFIWQKDGVKKLNLYLIINYFKGGKLRFKKIKPEAFEANRFYTVINKKSGEIVPMEVNFNFDDPNLIILPLAFGKRQGREFIWNDLLSLETGSLKLANGRVIEKTLYNRRTRQDEPALFVALTFERREVLDSSNIKPMNLIGVDRGENIPAVIALTDPEGCPLSRFKDSLGNPTHILRIGESYKEKQRTIQAKKEVEQRRAGGYSRKYASKAKNLADDMVRNTARDLLYYAVTQDAMLIFENLSRGFGRQGKRTFMAERQYTRMEDWLTAKLAYEGLPSKTYLSKTLAQYTSKTCSNCGFTITSADYDRVLEKLKKTATGWMTTINGKELKVEGQITYYNRYKRQNVVKDLSVELDRLSEESVNNDISSWTKGRSGEALSLLKKRFSHRPVQEKFVCLNCGFETHADEQAALNIARSWLFLRSQEYKKYQTNKTTGNTDKRAFVETWQSFYRKKLKEVWKPAV

SEQ ID NO: 42611 - protein, 978 aa, synthetic construct
  REGION 1..978: note = engineered CasX variant
QEIKRINKIRRRLVKDSNTKKAGKTGPMKTLLVRVMTPDLRERLENLRKKPENIPQPISNTSQANLNKLLTDYTEMKKAILHVYWEEFQKDPVGLMSRVAQPASKKIDQNKLKPEMDEKGNLTTAGFACSQCGQPLFVYKLEQVSEKGKAYTNYFGRCNVAEHEKLILLAQLKPEKDSDEAVTYSLGKFGQRALDFYSIHVTKESTHPVKPLAQIAGNRYASHPVGKALSDACMGTIASFLSKYQDIIIEHQKVVKGNQKRLESLRELAGKENLEYPSVTLPPQPHTKEGVDAYNEVIARVRMWVNLNLWQKLKLSRDDAKPLLRLKGFPSFPLVERQANEVDWWDMVCNVKKLINEKKEDGKVFWQNLAIYKRQEALRPYLSSEEDRKKGKKFARYQLGDLLLHLEKKHGEDWGKVYDEAWERIDKKVEGLSKHIKLEEERRSEDAQSKAALTDWLRAKASFVIEGLKEADKDEFCRCELKLQKWYGDLRGKPFAIEAENSILDISGFSKQYNCAFIWQKDGVKKLNLYLIINYFKGGKLRFKKIKPEAFEANRFYTVINKKSGEIVPMEVNFNFDDPNLIILPLAFGKRQGREFIWNDLLSLETGSLKLANGRVIEKTLYNRRTRQDEPALFVALTFERREVLDSSNIKPMNLIGVDRGENIPAVIALTDPEGCPLSRFKDSLGNPTHILRIGESYKEKQRTIQAKKEVEQRRAGGYSRKYASKAKNLADDMVRNTARDLLYYAVTQDAMLIFENLSRGFGRQGKRTFMAERQYTRMEDWLTAKLAYEGLPSKTYLSKTLAQYTSKTCSNCGFTITSADYDRVLEKLKKTATGWMTTINGKELKVEGQITYYNRYKRQNVVKDLSVELDRLSEESVNNDISSWTKGRSGEALSLLKKRFSHRPVQEKFVCLNCGFETHADEQAALNIARSWLFLRSQEYKKYQTNKTTGNTDKRAFVETWQSFYRKKLKEVWKPAV

SEQ ID NO: 42612 - protein, 978 aa, synthetic construct
  REGION 1..978: note = engineered CasX variant
QEIKRINKIRRRLVKDSNTKKAGKTGPMKTLLVRVMTPDLRERLENLRKKPENIPQPISNTSQANLNKLLTDYTEMKKAILHVYWEEFQKDPVGLMSRVAQPASKKIDQNKLKPEMDEKGNLTTAGFACSQCGQPLFVYKLEQVSEKGKAYTNYFGRCNVAEHEKLILLAQLKPEKDSDEAVTYSLGKFGQRALDFYSIHVTKESTHPVKPLAQIAGNRYASSPVGKALSDACMGTIASFLSKYQDIIIEHQKVVKGNQKRLESLRELAGKENLEYPSVTLPPQPHTKEGVDAYNEVIARVRMWVNLNLWQKLKLSRDDAKPLLRLKGFPSFPLVERQANEVDWWDMVCNVKKLINEKKEDGKVFWQNLAIYKRQEALRPYLSSEEDRKKGKKFARYQLGDLLLHLEKKHGEDWGKVYDEAWERIDKKVEGLSKHIKLEEERRSEDAQSKAALTDWLRAKASFVIEGLKEADKDEFCRCELKLQKWYGDLRGKPFAIEAENSILDISGFSKQYNCAFIWQKDGVKKLNLYLIINYFKGGKLRFKKIKPEAFEANRFYTVINKKSGEIVPMEVNFNFDDPNLIILPLAFGKRQGREFIWNDLLSLETGSLKLANGRVIEKTLYNRRTRQDEPALFVALTFERREVLDSSNIKPMNLIGVDRGENIPAVIALTDPEGCPLSRFKDSLGNPTHILRIGESYKEKQRTIQAKKEVEQRRAGGYSRKYASKAKNLADDMVRNTARDLLYYAVTQDAMLIFENLSRGFGRQGKRTFMAERQYTRMEDWLTAKLAYEGLPSKTYLSKTLAQYTSKTCSNCGFTITSADYDRVLEKLKKTATGWMTTINGKELKVEGQITYYNRYKRQNVVKDLSVELDRLSEESVNNDISSWTKGRSGEALSLLKKRFSHRPVQEKFVCLNCGFETHADEQAALNIARSWLFLRSQEYKKYQTNKTTGNTDKRAFVETWQSFYRKKLKEVWKPAV

SEQ ID NO: 42613 - protein, 978 aa, synthetic construct
  REGION 1..978: note = engineered CasX variant
QEIKRINKIRRRLVKDSNTKKAGKTGPMKTLLVRVMTPDLRERLENLRKKPENIPQPISNTSQANLNKLLTDYTEMKKAILHVYWEEFQKDPVGLMSRVAQPASKKIDQNKLKPEMDEKGNLTTAGFACSQCGQPLFVYKLEQVSEKGKAYTNYFGRCNVAEHEKLILLAQLKPEKDSDEAVTYSLGKFGQRALDFYSIHVTKESTHPVKPLAQIAGNRYASTPVGKALSDACMGTIASFLSKYQDIIIEHQKVVKGNQKRLESLRELAGKENLEYPSVTLPPQPHTKEGVDAYNEVIARVRMWVNLNLWQKLKLSRDDAKPLLRLKGFPSFPLVERQANEVDWWDMVCNVKKLINEKKEDGKVFWQNLAIYKRQEALRPYLSSEEDRKKGKKFARYQLGDLLLHLEKKHGEDWGKVYDEAWERIDKKVEGLSKHIKLEEERRSEDAQSKAALTDWLRAKASFVIEGLKEADKDEFCRCELKLQKWYGDLRGKPFAIEAENSILDISGFSKQYNCAFIWQKDGVKKLNLYLIINYFKGGKLRFKKIKPEAFEANRFYTVINKKSGEIVPMEVNFNFDDPNLIILPLAFGKRQGREFIWNDLLSLETGSLKLANGRVIEKTLYNRRTRQDEPALFVALTFERREVLDSSNIKPMNLIGVDRGENIPAVIALTDPEGCPLSRFKDSLGNPTHILRIGESYKEKQRTIQAKKEVEQRRAGGYSRKYASKAKNLADDMVRNTARDLLYYAVTQDAMLIFENLSRGFGRQGKRTFMAERQYTRMEDWLTAKLAYEGLPSKTYLSKTLAQYTSKTCSNCGFTITSADYDRVLEKLKKTATGWMTTINGKELKVEGQITYYNRYKRQNVVKDLSVELDRLSEESVNNDISSWTKGRSGEALSLLKKRFSHRPVQEKFVCLNCGFETHADEQAALNIARSWLFLRSQEYKKYQTNKTTGNTDKRAFVETWQSFYRKKLKEVWKPAV

SEQ ID NO: 42614 - protein, 978 aa, synthetic construct
  REGION 1..978: note = engineered CasX variant
QEIKRINKIRRRLVKDSNTKKAGKTGPMKTLLVRVMTPDLRERLENLRKKPENIPQPISNTSQANLNKLLTDYTEMKKAILHVYWEEFQKDPVGLMSRVAQPASKKIDQNKLKPEMDEKGNLTTAGFACSQCGQPLFVYKLEQVSEKGKAYTNYFGRCNVAEHEKLILLAQLKPEKDSDEAVTYSLGKFGQRALDFYSIHVTKESTHPVKPLAQIAGNRYASAPVGKALSDACMGTIASFLSKYQDIIIEHQKVVKGNQKRLESLRELAGKENLEYPSVTLPPQPHTKEGVDAYNEVIARVRMWVNLNLWQKLKLSRDDAKPLLRLKGFPSFPLVERQANEVDWWDMVCNVKKLINEKKEDGKVFWQNLAIYKRQEALRPYLSSEEDRKKGKKFARYQLGDLLLHLEKKHGEDWGKVYDEAWERIDKKVEGLSKHIKLEEERRSEDAQSKAALTDWLRAKASFVIEGLKEADKDEFCRCELKLQKWYGDLRGKPFAIEAENSILDISGFSKQYNCAFIWQKDGVKKLNLYLIINYFKGGKLRFKKIKPEAFEANRFYTVINKKSGEIVPMEVNFNFDDPNLIILPLAFGKRQGREFIWNDLLSLETGSLKLANGRVIEKTLYNRRTRQDEPALFVALTFERREVLDSSNIKPMNLIGVDRGENIPAVIALTDPEGCPLSRFKDSLGNPTHILRIGESYKEKQRTIQAKKEVEQRRAGGYSRKYASKAKNLADDMVRNTARDLLYYAVTQDAMLIFENLSRGFGRQGKRTFMAERQYTRMEDWLTAKLAYEGLPSKTYLSKTLAQYTSKTCSNCGFTITSADYDRVLEKLKKTATGWMTTINGKELKVEGQITYYNRYKRQNVVKDLSVELDRLSEESVNNDISSWTKGRSGEALSLLKKRFSHRPVQEKFVCLNCGFETHADEQAALNIARSWLFLRSQEYKKYQTNKTTGNTDKRAFVETWQSFYRKKLKEVWKPAV

SEQ ID NO: 42615 - protein, 978 aa, synthetic construct
  REGION 1..978: note = engineered CasX variant
QEIKRINKIRRRLVKDSNTKKAGKTGPMKTLLVRVMTPDLRERLENLRKKPENIPQPISNTSQANLNKLLTDYTEMKKAILHVYWEEFQKDPVGLMSRVAQPASKKIDQNKLKPEMDEKGNLTTAGFACSQCGQPLFVYKLEQVSEKGKAYTNYFGRCNVAEHEKLILLAQLKPEKDSDEAVTYSLGKFGQRALDFYSIHVTKESTHPVKPLAQIAGNRYASVPVGKALSDACMGTIASFLSKYQDIIIEHQKVVKGNQKRLESLRELAGKENLEYPSVTLPPQPHTKEGVDAYNEVIARVRMWVNLNLWQKLKLSRDDAKPLLRLKGFPSFPLVERQANEVDWWDMVCNVKKLINEKKEDGKVFWQNLAIYKRQEALRPYLSSEEDRKKGKKFARYQLGDLLLHLEKKHGEDWGKVYDEAWERIDKKVEGLSKHIKLEEERRSEDAQSKAALTDWLRAKASFVIEGLKEADKDEFCRCELKLQKWYGDLRGKPFAIEAENSILDISGFSKQYNCAFIWQKDGVKKLNLYLIINYFKGGKLRFKKIKPEAFEANRFYTVINKKSGEIVPMEVNFNFDDPNLIILPLAFGKRQGREFIWNDLLSLETGSLKLANGRVIEKTLYNRRTRQDEPALFVALTFERREVLDSSNIKPMNLIGVDRGENIPAVIALTDPEGCPLSRFKDSLGNPTHILRIGESYKEKQRTIQAKKEVEQRRAGGYSRKYASKAKNLADDMVRNTARDLLYYAVTQDAMLIFENLSRGFGRQGKRTFMAERQYTRMEDWLTAKLAYEGLPSKTYLSKTLAQYTSKTCSNCGFTITSADYDRVLEKLKKTATGWMTTINGKELKVEGQITYYNRYKRQNVVKDLSVELDRLSEESVNNDISSWTKGRSGEALSLLKKRFSHRPVQEKFVCLNCGFETHADEQAALNIARSWLFLRSQEYKKYQTNKTTGNTDKRAFVETWQSFYRKKLKEVWKPAV

SEQ ID NO: 42616 - protein, 978 aa, synthetic construct
  REGION 1..978: note = engineered CasX variant
QEIKRINKIRRRLVKDSNTKKAGKTGPMKTLLVRVMTPDLRERLENLRKKPENIPQPISNTSQANLNKLLTDYTEMKKAILHVYWEEFQKDPVGLMSRVAQPASKKIDQNKLKPEMDEKGNLTTAGFACSQCGQPLFVYKLEQVSEKGKAYTNYFGRCNVAEHEKLIKLAQLKPEKDSDEAVTYSLGKFGQRALDFYSIHVTKESTHPVKPLAQIAGNRYASGPVGKALSDACMGTIASFLSKYQDIIIEHQKVVKGNQKRLESLRELAGKENLEYPSVTLPPQPHTKEGVDAYNEVIARVRMWVNLNLWQKLKLSRDDAKPLLRLKGFPSFPLVERQANEVDWWDMVCNVKKLINEKKEDGKVFWQNLAIYKRQEALRPYLSSEEDRKKGKKFARYQLGDLLLHLEKKHGEDWGKVYDEAWERIDKKVEGLSKHIKLEEERRSEDAQSKAALTDWLRAKASFVIEGLKEADKDEFCRCELKLQKWYGDLRGKPFAIEAENSILDISGFSKQYNCAFIWQKDGVKKLNLYLIINYFKGGKLRFKKIKPEAFEANRFYTVINKKSGEIVPMEVNFNFDDPNLIILPLAFGKRQGREFIWNDLLSLETGSLKLANGRVIEKTLYNRRTRQDEPALFVALTFERREVLDSSNIKPMNLIGVDRGENIPAVIALTDPEGCPLSRFKDSLGNPTHILRIGESYKEKQRTIQAKKEVEQRRAGGYSRKYASKAKNLADDMVRNTARDLLYYAVTQDAMLIFENLSRGFGRQGKRTFMAERQYTRMEDWLTAKLAYEGLPSKTYLSKTLAQYTSKTCSNCGFTITSADYDRVLEKLKKTATGWMTTINGKELKVEGQITYYNRYKRQNVVKDLSVELDRLSEESVNNDISSWTKGRSGEALSLLKKRFSHRPVQEKFVCLNCGFETHADEQAALNIARSWLFLRSQEYKKYQTNKTTGNTDKRAFVETWQSFYRKKLKEVWKPAV

SEQ ID NO: 42617 - protein, 977 aa, synthetic construct
  REGION 1..977: note = engineered CasX variant
QEIKRINKIRRRLVKDSNTKKAGKTGPMKTLLVRVMTPDLRERLENLRKKPENIPQPISNTSQANLNKLLTDYTEMKKAILHVYWEEFQKDPVGLMSRVAQPASKKIDQNKLKPEMDEKGNLTTAGFACSQCGQPLFVYKLEQVSEKGKAYTNYFGRCNVAEHEKLILLAQLKPEKDSDEAVTYSLGKFGQRALDFYSIHVTKESTHPVKPLAQIAGNRYASPVGKALSDACMGTIASFLSKYQDIIIEHQKVVKGNQKRLESLRELAGKENLEYPSVTLPPQPHTKEGVDAYNEVIARVRMWVNLNLWQKLKLSRDDAKPLLRLKGFPSFPLVERQANEVDWWDMVCNVKKLINEKKEDGKVFWQNLAIYKRQEALRPYLSSEEDRKKGKKFARYQLGDLLLHLEKKHGEDWGKVYDEAWERIDKKVEGLSKHIKLEEERRSEDAQSKAALTDWLRAKASFVIEGLKEADKDEFCRCELKLQKWYGDLRGKPFAIEAENSILDISGFSKQYNCAFIWQKDGVKKLNLYLIINYFKGGKLRFKKIKPEAFEANRFYTVINKKSGEIVPMEVNFNFDDPNLIILPLAFGKRQGREFIWNDLLSLETGSLKLANGRVIEKTLYNRRTRQDEPALFVALTFERREVLDSSNIKPMNLIGVDRGENIPAVIALTDPEGCPLSRFKDSLGNPTHILRIGESYKEKQRTIQAKKEVEQRRAGGYSRKYASKAKNLADDMVRNTARDLLYYAVTQDAMLIFENLSRGFGRQGKRTFMAERQYTRMEDWLTAKLAYEGLPSKTYLSKTLAQYTSKTCSNCGFTITSADYDRVLEKLKKTATGWMTTINGKELKVEGQITYYNRYKRQNVVKDLSVELDRLSEESVNNDISSWTKGRSGEALSLLKKRFSHRPVQEKFVCLNCGFETHADEQAALNIARSWLFLRSQEYKKYQTNKTTGNTDKRAFVETWQSFYRKKLKEVWKPAV

SEQ ID NO: 42618 - protein, 978 aa, synthetic construct
  REGION 1..978: note = engineered CasX variant
QEIKRINKIRRRLVKDSNTKKAGKTGPMKTLLVRVMTPDLRERLENLRKKPENIPQPISNTSQANLNKLLTDYTEMKKAILHVYWEEFQKDPVGLMSRVAQPASKKIDQNKLKPEMDEKGNLTTAGFACSQCGQPLFVYKLEQVSEKGKAYTNYFGRCNVAEHEKLILLAQLKPEKDSDEAVTYSLGKFGQRALDFYSIHVTKESTHPVKPLAQIAGNRYASYPVGKALSDACMGTIASFLSKYQDIIIEHQKVVKGNQKRLESLRELAGKENLEYPSVTLPPQPHTKEGVDAYNEVIARVRMWVNLNLWQKLKLSRDDAKPLLRLKGFPSFPLVERQANEVDWWDMVCNVKKLINEKKEDGKVFWQNLAGYKRQEALRPYLSSEEDREKGKKFARYQLGDLLLHLEKKHGEDWGKVYDEAWERIDKKVEGLSKHIKLEEERRSEDAQSKAALTDWLRAKASFVIEGLKEADKDEFCRCELKLQKWYGDLRGKPFAIEAENSILDISGFSKQYNCAFIWQKDGVKKLNLYLIINYFKGGKLRFKKIKPEAFEANRFYTVINKKSGEIVPMEVNFNFDDPNLIILPLAFGKRQGREFIWNDLLSLETGSLKLANGRVIEKTLYNRRTRQDEPALFVALTFERREVLDSSNIKPMNLIGVDRGENIPAVIALTDPEGCPLSRFKDSLGNPTHILRIGESYKEKQRTIQAKKEVEQRRAGGYSRKYASKAKNLADDMVRNTARDLLYYAVTQDAMLIFENLSRGFGRQGKRTFMAERQYTRMEDWLTAKLAYEGLPSKTYLSKTLAQYTSKTCSNCGFTITSADYDRVLEKLKKTATGWMTTINGKELKVEGQITYYNRYKRQNVVKDLSVELDRLSEESVNNDISSWTKGRSGEALSLLKKRFSHRPVQEKFVCLNCGFETHADEQAALNIARSWLFLRSQEYKKYQTNKTTGNTDKRAFVETWQSFYRKKLKEVWKPAV

SEQ ID NO: 42619 - protein, 978 aa, synthetic construct
  REGION 1..978: note = engineered CasX variant
QEIKRINKIRRRLVKDSNTKKAGKTGPMKTLLVRVMTPDLRERLENLRKKPENIPQPISNTSQANLNKLLTDYTEMKKAILHVYWEEFQKDPVGLMSRVAQPASKKIDQNKLKPEMDEKGNLTTAGFACSQCGQPLFVYKLEQVSEKGKAYTNYFGRCNVAEHEKLILLAQLKPEKDSDEAVTYSLGKFGQRALDFYSIHVTKESTHPVKPLAQIAGNRYASHPVGKALSDACMGTIASFLSKYQDIIIEHQKVVKGNQKRLESLRELAGKENLEYPSVTLPPQPHTKEGVDAYNEVIARVRMWVNLNLWQKLKLSRDDAKPLLRLKGFPSFPLVERQANEVDWWDMVCNVKKLINEKKEDGKVFWQNLAGYKRQEALRPYLSSEEDREKGKKFARYQLGDLLLHLEKKHGEDWGKVYDEAWERIDKKVEGLSKHIKLEEERRSEDAQSKAALTDWLRAKASFVIEGLKEADKDEFCRCELKLQKWYGDLRGKPFAIEAENSILDISGFSKQYNCAFIWQKDGVKKLNLYLIINYFKGGKLRFKKIKPEAFEANRFYTVINKKSGEIVPMEVNFNFDDPNLIILPLAFGKRQGREFIWNDLLSLETGSLKLANGRVIEKTLYNRRTRQDEPALFVALTFERREVLDSSNIKPMNLIGVDRGENIPAVIALTDPEGCPLSRFKDSLGNPTHILRIGESYKEKQRTIQAKKEVEQRRAGGYSRKYASKAKNLADDMVRNTARDLLYYAVTQDAMLIFENLSRGFGRQGKRTFMAERQYTRMEDWLTAKLAYEGLPSKTYLSKTLAQYTSKTCSNCGFTITSADYDRVLEKLKKTATGWMTTINGKELKVEGQITYYNRYKRQNVVKDLSVELDRLSEESVNNDISSWTKGRSGEALSLLKKRFSHRPVQEKFVCLNCGFETHADEQAALNIARSWLFLRSQEYKKYQTNKTTGNTDKRAFVETWQSFYRKKLKEVWKPAV

SEQ ID NO: 42620 - protein, 978 aa, synthetic construct
  REGION 1..978: note = engineered CasX variant
QEIKRINKIRRRLVKDSNTKKAGKTGPMKTLLVRVMTPDLRERLENLRKKPENIPQPISNTSQANLNKLLTDYTEMKKAILHVYWEEFQKDPVGLMSRVAQPASKKIDQNKLKPEMDEKGNLTTAGFACSQCGQPLFVYKLEQVSEKGKAYTNYFGRCNVAEHEKLILLAQLKPEKDSDEAVTYSLGKFGQRALDFYSIHVTKESTHPVKPLAQIAGNRYASSPVGKALSDACMGTIASFLSKYQDIIIEHQKVVKGNQKRLESLRELAGKENLEYPSVTLPPQPHTKEGVDAYNEVIARVRMWVNLNLWQKLKLSRDDAKPLLRLKGFPSFPLVERQANEVDWWDMVCNVKKLINEKKEDGKVFWQNLAGYKRQEALRPYLSSEEDREKGKKFARYQLGDLLLHLEKKHGEDWGKVYDEAWERIDKKVEGLSKHIKLEEERRSEDAQSKAALTDWLRAKASFVIEGLKEADKDEFCRCELKLQKWYGDLRGKPFAIEAENSILDISGFSKQYNCAFIWQKDGVKKLNLYLIINYFKGGKLRFKKIKPEAFEANRFYTVINKKSGEIVPMEVNFNFDDPNLIILPLAFGKRQGREFIWNDLLSLETGSLKLANGRVIEKTLYNRRTRQDEPALFVALTFERREVLDSSNIKPMNLIGVDRGENIPAVIALTDPEGCPLSRFKDSLGNPTHILRIGESYKEKQRTIQAKKEVEQRRAGGYSRKYASKAKNLADDMVRNTARDLLYYAVTQDAMLIFENLSRGFGRQGKRTFMAERQYTRMEDWLTAKLAYEGLPSKTYLSKTLAQYTSKTCSNCGFTITSADYDRVLEKLKKTATGWMTTINGKELKVEGQITYYNRYKRQNVVKDLSVELDRLSEESVNNDISSWTKGRSGEALSLLKKRFSHRPVQEKFVCLNCGFETHADEQAALNIARSWLFLRSQEYKKYQTNKTTGNTDKRAFVETWQSFYRKKLKEVWKPAV

SEQ ID NO: 42621 - protein, 978 aa, synthetic construct
  REGION 1..978: note = engineered CasX variant
QEIKRINKIRRRLVKDSNTKKAGKTGPMKTLLVRVMTPDLRERLENLRKKPENIPQPISNTSQANLNKLLTDYTEMKKAILHVYWEEFQKDPVGLMSRVAQPASKKIDQNKLKPEMDEKGNLTTAGFACSQCGQPLFVYKLEQVSEKGKAYTNYFGRCNVAEHEKLILLAQLKPEKDSDEAVTYSLGKFGQRALDFYSIHVTKESTHPVKPLAQIAGNRYASTPVGKALSDACMGTIASFLSKYQDIIIEHQKVVKGNQKRLESLRELAGKENLEYPSVTLPPQPHTKEGVDAYNEVIARVRMWVNLNLWQKLKLSRDDAKPLLRLKGFPSFPLVERQANEVDWWDMVCNVKKLINEKKEDGKVFWQNLAGYKRQEALRPYLSSEEDREKGKKFARYQLGDLLLHLEKKHGEDWGKVYDEAWERIDKKVEGLSKHIKLEEERRSEDAQSKAALTDWLRAKASFVIEGLKEADKDEFCRCELKLQKWYGDLRGKPFAIEAENSILDISGFSKQYNCAFIWQKDGVKKLNLYLIINYFKGGKLRFKKIKPEAFEANRFYTVINKKSGEIVPMEVNFNFDDPNLIILPLAFGKRQGREFIWNDLLSLETGSLKLANGRVIEKTLYNRRTRQDEPALFVALTFERREVLDSSNIKPMNLIGVDRGENIPAVIALTDPEGCPLSRFKDSLGNPTHILRIGESYKEKQRTIQAKKEVEQRRAGGYSRKYASKAKNLADDMVRNTARDLLYYAVTQDAMLIFENLSRGFGRQGKRTFMAERQYTRMEDWLTAKLAYEGLPSKTYLSKTLAQYTSKTCSNCGFTITSADYDRVLEKLKKTATGWMTTINGKELKVEGQITYYNRYKRQNVVKDLSVELDRLSEESVNNDISSWTKGRSGEALSLLKKRFSHRPVQEKFVCLNCGFETHADEQAALNIARSWLFLRSQEYKKYQTNKTTGNTDKRAFVETWQSFYRKKLKEVWKPAV

SEQ ID NO: 42622 - protein, 978 aa, synthetic construct
  REGION 1..978: note = engineered CasX variant
QEIKRINKIRRRLVKDSNTKKAGKTGPMKTLLVRVMTPDLRERLENLRKKPENIPQPISNTSQANLNKLLTDYTEMKKAILHVYWEEFQKDPVGLMSRVAQPASKKIDQNKLKPEMDEKGNLTTAGFACSQCGQPLFVYKLEQVSEKGKAYTNYFGRCNVAEHEKLILLAQLKPEKDSDEAVTYSLGKFGQRALDFYSIHVTKESTHPVKPLAQIAGNRYASAPVGKALSDACMGTIASFLSKYQDIIIEHQKVVKGNQKRLESLRELAGKENLEYPSVTLPPQPHTKEGVDAYNEVIARVRMWVNLNLWQKLKLSRDDAKPLLRLKGFPSFPLVERQANEVDWWDMVCNVKKLINEKKEDGKVFWQNLAGYKRQEALRPYLSSEEDREKGKKFARYQLGDLLLHLEKKHGEDWGKVYDEAWERIDKKVEGLSKHIKLEEERRSEDAQSKAALTDWLRAKASFVIEGLKEADKDEFCRCELKLQKWYGDLRGKPFAIEAENSILDISGFSKQYNCAFIWQKDGVKKLNLYLIINYFKGGKLRFKKIKPEAFEANRFYTVINKKSGEIVPMEVNFNFDDPNLIILPLAFGKRQGREFIWNDLLSLETGSLKLANGRVIEKTLYNRRTRQDEPALFVALTFERREVLDSSNIKPMNLIGVDRGENIPAVIALTDPEGCPLSRFKDSLGNPTHILRIGESYKEKQRTIQAKKEVEQRRAGGYSRKYASKAKNLADDMVRNTARDLLYYAVTQDAMLIFENLSRGFGRQGKRTFMAERQYTRMEDWLTAKLAYEGLPSKTYLSKTLAQYTSKTCSNCGFTITSADYDRVLEKLKKTATGWMTTINGKELKVEGQITYYNRYKRQNVVKDLSVELDRLSEESVNNDISSWTKGRSGEALSLLKKRFSHRPVQEKFVCLNCGFETHADEQAALNIARSWLFLRSQEYKKYQTNKTTGNTDKRAFVETWQSFYRKKLKEVWKPAV

SEQ ID NO: 42623 - protein, 978 aa, synthetic construct
  REGION 1..978: note = engineered CasX variant
QEIKRINKIRRRLVKDSNTKKAGKTGPMKTLLVRVMTPDLRERLENLRKKPENIPQPISNTSQANLNKLLTDYTEMKKAILHVYWEEFQKDPVGLMSRVAQPASKKIDQNKLKPEMDEKGNLTTAGFACSQCGQPLFVYKLEQVSEKGKAYTNYFGRCNVAEHEKLILLAQLKPEKDSDEAVTYSLGKFGQRALDFYSIHVTKESTHPVKPLAQIAGNRYASVPVGKALSDACMGTIASFLSKYQDIIIEHQKVVKGNQKRLESLRELAGKENLEYPSVTLPPQPHTKEGVDAYNEVIARVRMWVNLNLWQKLKLSRDDAKPLLRLKGFPSFPLVERQANEVDWWDMVCNVKKLINEKKEDGKVFWQNLAGYKRQEALRPYLSSEEDREKGKKFARYQLGDLLLHLEKKHGEDWGKVYDEAWERIDKKVEGLSKHIKLEEERRSEDAQSKAALTDWLRAKASFVIEGLKEADKDEFCRCELKLQKWYGDLRGKPFAIEAENSILDISGFSKQYNCAFIWQKDGVKKLNLYLIINYFKGGKLRFKKIKPEAFEANRFYTVINKKSGEIVPMEVNFNFDDPNLIILPLAFGKRQGREFIWNDLLSLETGSLKLANGRVIEKTLYNRRTRQDEPALFVALTFERREVLDSSNIKPMNLIGVDRGENIPAVIALTDPEGCPLSRFKDSLGNPTHILRIGESYKEKQRTIQAKKEVEQRRAGGYSRKYASKAKNLADDMVRNTARDLLYYAVTQDAMLIFENLSRGFGRQGKRTFMAERQYTRMEDWLTAKLAYEGLPSKTYLSKTLAQYTSKTCSNCGFTITSADYDRVLEKLKKTATGWMTTINGKELKVEGQITYYNRYKRQNVVKDLSVELDRLSEESVNNDISSWTKGRSGEALSLLKKRFSHRPVQEKFVCLNCGFETHADEQAALNIARSWLFLRSQEYKKYQTNKTTGNTDKRAFVETWQSFYRKKLKEVWKPAV

SEQ ID NO: 42624 - protein, 978 aa, synthetic construct
  REGION 1..978: note = engineered CasX variant
QEIKRINKIRRRLVKDSNTKKAGKTGPMKTLLVRVMTPDLRERLENLRKKPENIPQPISNTSQANLNKLLTDYTEMKKAILHVYWEEFQKDPVGLMSRVAQPASKKIDQNKLKPEMDEKGNLTTAGFACSQCGQPLFVYKLEQVSEKGKAYTNYFGRCNVAEHEKLIKLAQLKPEKDSDEAVTYSLGKFGQRALDFYSIHVTKESTHPVKPLAQIAGNRYASGPVGKALSDACMGTIASFLSKYQDIIIEHQKVVKGNQKRLESLRELAGKENLEYPSVTLPPQPHTKEGVDAYNEVIARVRMWVNLNLWQKLKLSRDDAKPLLRLKGFPSFPLVERQANEVDWWDMVCNVKKLINEKKEDGKVFWQNLAGYKRQEALRPYLSSEEDREKGKKFARYQLGDLLLHLEKKHGEDWGKVYDEAWERIDKKVEGLSKHIKLEEERRSEDAQSKAALTDWLRAKASFVIEGLKEADKDEFCRCELKLQKWYGDLRGKPFAIEAENSILDISGFSKQYNCAFIWQKDGVKKLNLYLIINYFKGGKLRFKKIKPEAFEANRFYTVINKKSGEIVPMEVNFNFDDPNLIILPLAFGKRQGREFIWNDLLSLETGSLKLANGRVIEKTLYNRRTRQDEPALFVALTFERREVLDSSNIKPMNLIGVDRGENIPAVIALTDPEGCPLSRFKDSLGNPTHILRIGESYKEKQRTIQAKKEVEQRRAGGYSRKYASKAKNLADDMVRNTARDLLYYAVTQDAMLIFENLSRGFGRQGKRTFMAERQYTRMEDWLTAKLAYEGLPSKTYLSKTLAQYTSKTCSNCGFTITSADYDRVLEKLKKTATGWMTTINGKELKVEGQITYYNRYKRQNVVKDLSVELDRLSEESVNNDISSWTKGRSGEALSLLKKRFSHRPVQEKFVCLNCGFETHADEQAALNIARSWLFLRSQEYKKYQTNKTTGNTDKRAFVETWQSFYRKKLKEVWKPAV

SEQ ID NO: 42625 - protein, 977 aa, synthetic construct
  REGION 1..977: note = engineered CasX variant
QEIKRINKIRRRLVKDSNTKKAGKTGPMKTLLVRVMTPDLRERLENLRKKPENIPQPISNTSQANLNKLLTDYTEMKKAILHVYWEEFQKDPVGLMSRVAQPASKKIDQNKLKPEMDEKGNLTTAGFACSQCGQPLFVYKLEQVSEKGKAYTNYFGRCNVAEHEKLILLAQLKPEKDSDEAVTYSLGKFGQRALDFYSIHVTKESTHPVKPLAQIAGNRYASPVGKALSDACMGTIASFLSKYQDIIIEHQKVVKGNQKRLESLRELAGKENLEYPSVTLPPQPHTKEGVDAYNEVIARVRMWVNLNLWQKLKLSRDDAKPLLRLKGFPSFPLVERQANEVDWWDMVCNVKKLINEKKEDGKVFWQNLAGYKRQEALRPYLSSEEDREKGKKFARYQLGDLLLHLEKKHGEDWGKVYDEAWERIDKKVEGLSKHIKLEEERRSEDAQSKAALTDWLRAKASFVIEGLKEADKDEFCRCELKLQKWYGDLRGKPFAIEAENSILDISGFSKQYNCAFIWQKDGVKKLNLYLIINYFKGGKLRFKKIKPEAFEANRFYTVINKKSGEIVPMEVNFNFDDPNLIILPLAFGKRQGREFIWNDLLSLETGSLKLANGRVIEKTLYNRRTRQDEPALFVALTFERREVLDSSNIKPMNLIGVDRGENIPAVIALTDPEGCPLSRFKDSLGNPTHILRIGESYKEKQRTIQAKKEVEQRRAGGYSRKYASKAKNLADDMVRNTARDLLYYAVTQDAMLIFENLSRGFGRQGKRTFMAERQYTRMEDWLTAKLAYEGLPSKTYLSKTLAQYTSKTCSNCGFTITSADYDRVLEKLKKTATGWMTTINGKELKVEGQITYYNRYKRQNVVKDLSVELDRLSEESVNNDISSWTKGRSGEALSLLKKRFSHRPVQEKFVCLNCGFETHADEQAALNIARSWLFLRSQEYKKYQTNKTTGNTDKRAFVETWQSFYRKKLKEVWKPAV

SEQ ID NO: 42626 - protein, 978 aa, synthetic construct
  REGION 1..978: note = engineered CasX variant
QEIKRINKIRRRLVKDSNTKKAGKTGPMKTLLVRVMTPDLRERLENLRKKPENIPQPISNTSQANLNKLLTDYTEMKKAILHVYWEEFQKDPVGLMSRVAQPASKKIDQNKLKPEMDEKGNLTTAGFACSQCGQPLFVYKLEQVSEKGKAYTNYFGRCNVAEHEKLILLAQLKPEKDSDEAVTYSLGKFGQRALDFYSIHVTKESTHPVKPLAQIAGNRYASYPVGKALSDACMGTIASFLSKYQDIIIEHQKVVKGNQKRLESLRELAGKENLEYPSVTLPPQPHTKEGVDAYNEVIARVRMWVNLNLWQKLKLSRDDAKPLLRLKGFPSFPLVERQANEVDWWDMVCNVKKLINEKKEDGKVFWQNLAGYKRQEALRPYLSSEEDRKKGKKFARYQLGDLLLHLEKKHGEDWGKVYDEAWERIDKKVEGLSKHIKLEEERRSEDAQSKAALTDWLRAKASFVIEGLKEADKDEFCRCELKLQKWYGDLRGKPFAIEAENSILDISGFSKQYNCAFIWQKDGVKKLNLYLIINYFKGGKLRFKKIKPEAFEANRFYTVINKKSGEIVIMEVNFNFDDPNLIILPLAFGKRQGREFIWNDLLSLETGSLKLANGRVIEKTLYNRRTRQDEPALFVALTFERREVLDSSNIKPMNLIGVDRGENIPAVIALTDPEGCPLSRFKDSLGNPTHILRIGESYKEKQRTIQAKKEVEQRRAGGYSRKYASKAKNLADDMVRNTARDLLYYAVTQDAMLIFENLSRGFGRQGKRTFMAERQYTRMEDWLTAKLAYEGLPSKTYLSKTLAQYTSKTCSNCGFTITSADYDRVLEKLKKTATGWMTTINGKELKVEGQITYYNRYKRQNVVKDLSVELDRLSEESVNNDISSWTKGRSGEALSLLKKRFSHRPVQEKFVCLNCGFETHADEQAALNIARSWLFLRSQEYKKYQTNKTTGNTDKRAFVETWQSFYRKKLKEVWKPAV

SEQ ID NO: 42627 - protein, 978 aa, synthetic construct
  REGION 1..978: note = engineered CasX variant
QEIKRINKIRRRLVKDSNTKKAGKTGPMKTLLVRVMTPDLRERLENLRKKPENIPQPISNTSQANLNKLLTDYTEMKKAILHVYWEEFQKDPVGLMSRVAQPASKKIDQNKLKPEMDEKGNLTTAGFACSQCGQPLFVYKLEQVSEKGKAYTNYFGRCNVAEHEKLILLAQLKPEKDSDEAVTYSLGKFGQRALDFYSIHVTKESTHPVKPLAQIAGNRYASHPVGKALSDACMGTIASFLSKYQDIIIEHQKVVKGNQKRLESLRELAGKENLEYPSVTLPPQPHTKEGVDAYNEVIARVRMWVNLNLWQKLKLSRDDAKPLLRLKGFPSFPLVERQANEVDWWDMVCNVKKLINEKKEDGKVFWQNLAGYKRQEALRPYLSSEEDRKKGKKFARYQLGDLLLHLEKKHGEDWGKVYDEAWERIDKKVEGLSKHIKLEEERRSEDAQSKAALTDWLRAKASFVIEGLKEADKDEFCRCELKLQKWYGDLRGKPFAIEAENSILDISGFSKQYNCAFIWQKDGVKKLNLYLIINYFKGGKLRFKKIKPEAFEANRFYTVINKKSGEIVIMEVNFNFDDPNLIILPLAFGKRQGREFIWNDLLSLETGSLKLANGRVIEKTLYNRRTRQDEPALFVALTFERREVLDSSNIKPMNLIGVDRGENIPAVIALTDPEGCPLSRFKDSLGNPTHILRIGESYKEKQRTIQAKKEVEQRRAGGYSRKYASKAKNLADDMVRNTARDLLYYAVTQDAMLIFENLSRGFGRQGKRTFMAERQYTRMEDWLTAKLAYEGLPSKTYLSKTLAQYTSKTCSNCGFTITSADYDRVLEKLKKTATGWMTTINGKELKVEGQITYYNRYKRQNVVKDLSVELDRLSEESVNNDISSWTKGRSGEALSLLKKRFSHRPVQEKFVCLNCGFETHADEQAALNIARSWLFLRSQEYKKYQTNKTTGNTDKRAFVETWQSFYRKKLKEVWKPAV

SEQ ID NO: 42628 - protein, 978 aa, synthetic construct
  REGION 1..978: note = engineered CasX variant
QEIKRINKIRRRLVKDSNTKKAGKTGPMKTLLVRVMTPDLRERLENLRKKPENIPQPISNTSQANLNKLLTDYTEMKKAILHVYWEEFQKDPVGLMSRVAQPASKKIDQNKLKPEMDEKGNLTTAGFACSQCGQPLFVYKLEQVSEKGKAYTNYFGRCNVAEHEKLILLAQLKPEKDSDEAVTYSLGKFGQRALDFYSIHVTKESTHPVKPLAQIAGNRYASSPVGKALSDACMGTIASFLSKYQDIIIEHQKVVKGNQKRLESLRELAGKENLEYPSVTLPPQPHTKEGVDAYNEVIARVRMWVNLNLWQKLKLSRDDAKPLLRLKGFPSFPLVERQANEVDWWDMVCNVKKLINEKKEDGKVFWQNLAGYKRQEALRPYLSSEEDRKKGKKFARYQLGDLLLHLEKKHGEDWGKVYDEAWERIDKKVEGLSKHIKLEEERRSEDAQSKAALTDWLRAKASFVIEGLKEADKDEFCRCELKLQKWYGDLRGKPFAIEAENSILDISGFSKQYNCAFIWQKDGVKKLNLYLIINYFKGGKLRFKKIKPEAFEANRFYTVINKKSGEIVIMEVNFNFDDPNLIILPLAFGKRQGREFIWNDLLSLETGSLKLANGRVIEKTLYNRRTRQDEPALFVALTFERREVLDSSNIKPMNLIGVDRGENIPAVIALTDPEGCPLSRFKDSLGNPTHILRIGESYKEKQRTIQAKKEVEQRRAGGYSRKYASKAKNLADDMVRNTARDLLYYAVTQDAMLIFENLSRGFGRQGKRTFMAERQYTRMEDWLTAKLAYEGLPSKTYLSKTLAQYTSKTCSNCGFTITSADYDRVLEKLKKTATGWMTTINGKELKVEGQITYYNRYKRQNVVKDLSVELDRLSEESVNNDISSWTKGRSGEALSLLKKRFSHRPVQEKFVCLNCGFETHADEQAALNIARSWLFLRSQEYKKYQTNKTTGNTDKRAFVETWQSFYRKKLKEVWKPAV

SEQ ID NO: 42629 - protein, 978 aa, synthetic construct
  REGION 1..978: note = engineered CasX variant
QEIKRINKIRRRLVKDSNTKKAGKTGPMKTLLVRVMTPDLRERLENLRKKPENIPQPISNTSQANLNKLLTDYTEMKKAILHVYWEEFQKDPVGLMSRVAQPASKKIDQNKLKPEMDEKGNLTTAGFACSQCGQPLFVYKLEQVSEKGKAYTNYFGRCNVAEHEKLILLAQLKPEKDSDEAVTYSLGKFGQRALDFYSIHVTKESTHPVKPLAQIAGNRYASTPVGKALSDACMGTIASFLSKYQDIIIEHQKVVKGNQKRLESLRELAGKENLEYPSVTLPPQPHTKEGVDAYNEVIARVRMWVNLNLWQKLKLSRDDAKPLLRLKGFPSFPLVERQANEVDWWDMVCNVKKLINEKKEDGKVFWQNLAGYKRQEALRPYLSSEEDRKKGKKFARYQLGDLLLHLEKKHGEDWGKVYDEAWERIDKKVEGLSKHIKLEEERRSEDAQSKAALTDWLRAKASFVIEGLKEADKDEFCRCELKLQKWYGDLRGKPFAIEAENSILDISGFSKQYNCAFIWQKDGVKKLNLYLIINYFKGGKLRFKKIKPEAFEANRFYTVINKKSGEIVIMEVNFNFDDPNLIILPLAFGKRQGREFIWNDLLSLETGSLKLANGRVIEKTLYNRRTRQDEPALFVALTFERREVLDSSNIKPMNLIGVDRGENIPAVIALTDPEGCPLSRFKDSLGNPTHILRIGESYKEKQRTIQAKKEVEQRRAGGYSRKYASKAKNLADDMVRNTARDLLYYAVTQDAMLIFENLSRGFGRQGKRTFMAERQYTRMEDWLTAKLAYEGLPSKTYLSKTLAQYTSKTCSNCGFTITSADYDRVLEKLKKTATGWMTTINGKELKVEGQITYYNRYKRQNVVKDLSVELDRLSEESVNNDISSWTKGRSGEALSLLKKRFSHRPVQEKFVCLNCGFETHADEQAALNIARSWLFLRSQEYKKYQTNKTTGNTDKRAFVETWQSFYRKKLKEVWKPAV

SEQ ID NO: 42630 - protein, 978 aa, synthetic construct
  REGION 1..978: note = engineered CasX variant
QEIKRINKIRRRLVKDSNTKKAGKTGPMKTLLVRVMTPDLRERLENLRKKPENIPQPISNTSQANLNKLLTDYTEMKKAILHVYWEEFQKDPVGLMSRVAQPASKKIDQNKLKPEMDEKGNLTTAGFACSQCGQPLFVYKLEQVSEKGKAYTNYFGRCNVAEHEKLILLAQLKPEKDSDEAVTYSLGKFGQRALDFYSIHVTKESTHPVKPLAQIAGNRYASAPVGKALSDACMGTIASFLSKYQDIIIEHQKVVKGNQKRLESLRELAGKENLEYPSVTLPPQPHTKEGVDAYNEVIARVRMWVNLNLWQKLKLSRDDAKPLLRLKGFPSFPLVERQANEVDWWDMVCNVKKLINEKKEDGKVFWQNLAGYKRQEALRPYLSSEEDRKKGKKFARYQLGDLLLHLEKKHGEDWGKVYDEAWERIDKKVEGLSKHIKLEEERRSEDAQSKAALTDWLRAKASFVIEGLKEADKDEFCRCELKLQKWYGDLRGKPFAIEAENSILDISGFSKQYNCAFIWQKDGVKKLNLYLIINYFKGGKLRFKKIKPEAFEANRFYTVINKKSGEIVIMEVNFNFDDPNLIILPLAFGKRQGREFIWNDLLSLETGSLKLANGRVIEKTLYNRRTRQDEPALFVALTFERREVLDSSNIKPMNLIGVDRGENIPAVIALTDPEGCPLSRFKDSLGNPTHILRIGESYKEKQRTIQAKKEVEQRRAGGYSRKYASKAKNLADDMVRNTARDLLYYAVTQDAMLIFENLSRGFGRQGKRTFMAERQYTRMEDWLTAKLAYEGLPSKTYLSKTLAQYTSKTCSNCGFTITSADYDRVLEKLKKTATGWMTTINGKELKVEGQITYYNRYKRQNVVKDLSVELDRLSEESVNNDISSWTKGRSGEALSLLKKRFSHRPVQEKFVCLNCGFETHADEQAALNIARSWLFLRSQEYKKYQTNKTTGNTDKRAFVETWQSFYRKKLKEVWKPAV

SEQ ID NO: 42631 - protein, 978 aa, synthetic construct
  REGION 1..978: note = engineered CasX variant
QEIKRINKIRRRLVKDSNTKKAGKTGPMKTLLVRVMTPDLRERLENLRKKPENIPQPISNTSQANLNKLLTDYTEMKKAILHVYWEEFQKDPVGLMSRVAQPASKKIDQNKLKPEMDEKGNLTTAGFACSQCGQPLFVYKLEQVSEKGKAYTNYFGRCNVAEHEKLILLAQLKPEKDSDEAVTYSLGKFGQRALDFYSIHVTKESTHPVKPLAQIAGNRYASVPVGKALSDACMGTIASFLSKYQDIIIEHQKVVKGNQKRLESLRELAGKENLEYPSVTLPPQPHTKEGVDAYNEVIARVRMWVNLNLWQKLKLSRDDAKPLLRLKGFPSFPLVERQANEVDWWDMVCNVKKLINEKKEDGKVFWQNLAGYKRQEALRPYLSSEEDRKKGKKFARYQLGDLLLHLEKKHGEDWGKVYDEAWERIDKKVEGLSKHIKLEEERRSEDAQSKAALTDWLRAKASFVIEGLKEADKDEFCRCELKLQKWYGDLRGKPFAIEAENSILDISGFSKQYNCAFIWQKDGVKKLNLYLIINYFKGGKLRFKKIKPEAFEANRFYTVINKKSGEIVIMEVNFNFDDPNLIILPLAFGKRQGREFIWNDLLSLETGSLKLANGRVIEKTLYNRRTRQDEPALFVALTFERREVLDSSNIKPMNLIGVDRGENIPAVIALTDPEGCPLSRFKDSLGNPTHILRIGESYKEKQRTIQAKKEVEQRRAGGYSRKYASKAKNLADDMVRNTARDLLYYAVTQDAMLIFENLSRGFGRQGKRTFMAERQYTRMEDWLTAKLAYEGLPSKTYLSKTLAQYTSKTCSNCGFTITSADYDRVLEKLKKTATGWMTTINGKELKVEGQITYYNRYKRQNVVKDLSVELDRLSEESVNNDISSWTKGRSGEALSLLKKRFSHRPVQEKFVCLNCGFETHADEQAALNIARSWLFLRSQEYKKYQTNKTTGNTDKRAFVETWQSFYRKKLKEVWKPAV

SEQ ID NO: 42632 - protein, 978 aa, synthetic construct
  REGION 1..978: note = engineered CasX variant
QEIKRINKIRRRLVKDSNTKKAGKTGPMKTLLVRVMTPDLRERLENLRKKPENIPQPISNTSQANLNKLLTDYTEMKKAILHVYWEEFQKDPVGLMSRVAQPASKKIDQNKLKPEMDEKGNLTTAGFACSQCGQPLFVYKLEQVSEKGKAYTNYFGRCNVAEHEKLIKLAQLKPEKDSDEAVTYSLGKFGQRALDFYSIHVTKESTHPVKPLAQIAGNRYASGPVGKALSDACMGTIASFLSKYQDIIIEHQKVVKGNQKRLESLRELAGKENLEYPSVTLPPQPHTKEGVDAYNEVIARVRMWVNLNLWQKLKLSRDDAKPLLRLKGFPSFPLVERQANEVDWWDMVCNVKKLINEKKEDGKVFWQNLAGYKRQEALRPYLSSEEDRKKGKKFARYQLGDLLLHLEKKHGEDWGKVYDEAWERIDKKVEGLSKHIKLEEERRSEDAQSKAALTDWLRAKASFVIEGLKEADKDEFCRCELKLQKWYGDLRGKPFAIEAENSILDISGFSKQYNCAFIWQKDGVKKLNLYLIINYFKGGKLRFKKIKPEAFEANRFYTVINKKSGEIVIMEVNFNFDDPNLIILPLAFGKRQGREFIWNDLLSLETGSLKLANGRVIEKTLYNRRTRQDEPALFVALTFERREVLDSSNIKPMNLIGVDRGENIPAVIALTDPEGCPLSRFKDSLGNPTHILRIGESYKEKQRTIQAKKEVEQRRAGGYSRKYASKAKNLADDMVRNTARDLLYYAVTQDAMLIFENLSRGFGRQGKRTFMAERQYTRMEDWLTAKLAYEGLPSKTYLSKTLAQYTSKTCSNCGFTITSADYDRVLEKLKKTATGWMTTINGKELKVEGQITYYNRYKRQNVVKDLSVELDRLSEESVNNDISSWTKGRSGEALSLLKKRFSHRPVQEKFVCLNCGFETHADEQAALNIARSWLFLRSQEYKKYQTNKTTGNTDKRAFVETWQSFYRKKLKEVWKPAV

SEQ ID NO: 42633 - protein, 977 aa, synthetic construct
  REGION 1..977: note = engineered CasX variant
QEIKRINKIRRRLVKDSNTKKAGKTGPMKTLLVRVMTPDLRERLENLRKKPENIPQPISNTSQANLNKLLTDYTEMKKAILHVYWEEFQKDPVGLMSRVAQPASKKIDQNKLKPEMDEKGNLTTAGFACSQCGQPLFVYKLEQVSEKGKAYTNYFGRCNVAEHEKLILLAQLKPEKDSDEAVTYSLGKFGQRALDFYSIHVTKESTHPVKPLAQIAGNRYASPVGKALSDACMGTIASFLSKYQDIIIEHQKVVKGNQKRLESLRELAGKENLEYPSVTLPPQPHTKEGVDAYNEVIARVRMWVNLNLWQKLKLSRDDAKPLLRLKGFPSFPLVERQANEVDWWDMVCNVKKLINEKKEDGKVFWQNLAGYKRQEALRPYLSSEEDRKKGKKFARYQLGDLLLHLEKKHGEDWGKVYDEAWERIDKKVEGLSKHIKLEEERRSEDAQSKAALTDWLRAKASFVIEGLKEADKDEFCRCELKLQKWYGDLRGKPFAIEAENSILDISGFSKQYNCAFIWQKDGVKKLNLYLIINYFKGGKLRFKKIKPEAFEANRFYTVINKKSGEIVIMEVNFNFDDPNLIILPLAFGKRQGREFIWNDLLSLETGSLKLANGRVIEKTLYNRRTRQDEPALFVALTFERREVLDSSNIKPMNLIGVDRGENIPAVIALTDPEGCPLSRFKDSLGNPTHILRIGESYKEKQRTIQAKKEVEQRRAGGYSRKYASKAKNLADDMVRNTARDLLYYAVTQDAMLIFENLSRGFGRQGKRTFMAERQYTRMEDWLTAKLAYEGLPSKTYLSKTLAQYTSKTCSNCGFTITSADYDRVLEKLKKTATGWMTTINGKELKVEGQITYYNRYKRQNVVKDLSVELDRLSEESVNNDISSWTKGRSGEALSLLKKRFSHRPVQEKFVCLNCGFETHADEQAALNIARSWLFLRSQEYKKYQTNKTTGNTDKRAFVETWQSFYRKKLKEVWKPAV

SEQ ID NO: 42634 - protein, 978 aa, synthetic construct
  REGION 1..978: note = engineered CasX variant
QEIKRINKIRRRLVKDSNTKKAGKTGPMKTLLVRVMTPDLRERLENLRKKPENIPQPISNTSRANLNKLLTDYTEMKKAILHVYDEEFQKDPVGLMSRVAQPASKKIDQNKLKPEMDEKGNLTTAGFACSQCGQPLFVYKLEQVSEKGKAYTNYFGRCNVAEHEKLILLAQLKPEKDSDEAVTYSLGKFGQRALDFYSIHVTKESTHPVKPLAQIAGNRYASYPVGKALSGACMGTIASFLSKYQDIIIEHQKVVKGNQKRLESLRELAGKENLEYPSVTLPPQPHTKEGVDAYNEVIARVRMWVNLNLWQKLKLSRDDAKPLLRLKGFPSFPLVERQANEVDWWDMVCNVKKLINEKKEDGKVFWQNLAGYKRQEALRPYLSSEEDRKKGKKFARYQLGDLLLHLEKKHGEDWGKVYDEAWERIDKKVEGLSKHIKLEEERRSEDAQSKAALTDWLRAKASFVIEGLKEADKDEFCRCELKLQKWYGDLRGKPFAIEAENSILDISGFSKQYNCAFIWQKDGVKKLNLYLIINYFKGGKLRFKKIKPEAFEANRFYTVINKKSGEIVPMEVNFNFDDPNLIILPLAFGKRQGREFIWNDLLSLETGSLKLANGRVIEKTLYNRRTRQDEPALFVALTFERREVLDSSNIKPMNLIGVDRGENIPAVIALTDPEGCPLSRFKDSLGNPTHILRIGESYKEKQRTIQAKKEVEQRRAGGYSRKYASKAKNLADDMVRNTARDLLYYAVTQDAMLIFENLSRGFGRQGKRTFMAERQYTRMEDWLTAKLAYEGLPSKTYLSKTLAQYTSKTCSNCGFTITSADYDRVLEKLKKTATGWMTTINGKELKVEGQITYYNRYKRQNVVKDLSVELDRLSEESVNNDISSWTKGRSGEALSLLKKRFSHRPVQEKFVCLNCGFETHADEQAALNIARSWLFLRSQEYKKYQTNKTTGNTDKRAFVETWQSFYRKKLKEVWKPAV

SEQ ID NO: 42635 - protein, 978 aa, synthetic construct
  REGION 1..978: note = engineered CasX variant
QEIKRINKIRRRLVKDSNTKKAGKTGPMKTLLVRVMTPDLRERLENLRKKPENIPQPISNTSRANLNKLLTDYTEMKKAILHVYDEEFQKDPVGLMSRVAQPASKKIDQNKLKPEMDEKGNLTTAGFACSQCGQPLFVYKLEQVSEKGKAYTNYFGRCNVAEHEKLILLAQLKPEKDSDEAVTYSLGKFGQRALDFYSIHVTKESTHPVKPLAQIAGNRYASHPVGKALSGACMGTIASFLSKYQDIIIEHQKVVKGNQKRLESLRELAGKENLEYPSVTLPPQPHTKEGVDAYNEVIARVRMWVNLNLWQKLKLSRDDAKPLLRLKGFPSFPLVERQANEVDWWDMVCNVKKLINEKKEDGKVFWQNLAGYKRQEALRPYLSSEEDRKKGKKFARYQLGDLLLHLEKKHGEDWGKVYDEAWERIDKKVEGLSKHIKLEEERRSEDAQSKAALTDWLRAKASFVIEGLKEADKDEFCRCELKLQKWYGDLRGKPFAIEAENSILDISGFSKQYNCAFIWQKDGVKKLNLYLIINYFKGGKLRFKKIKPEAFEANRFYTVINKKSGEIVPMEVNFNFDDPNLIILPLAFGKRQGREFIWNDLLSLETGSLKLANGRVIEKTLYNRRTRQDEPALFVALTFERREVLDSSNIKPMNLIGVDRGENIPAVIALTDPEGCPLSRFKDSLGNPTHILRIGESYKEKQRTIQAKKEVEQRRAGGYSRKYASKAKNLADDMVRNTARDLLYYAVTQDAMLIFENLSRGFGRQGKRTFMAERQYTRMEDWLTAKLAYEGLPSKTYLSKTLAQYTSKTCSNCGFTITSADYDRVLEKLKKTATGWMTTINGKELKVEGQITYYNRYKRQNVVKDLSVELDRLSEESVNNDISSWTKGRSGEALSLLKKRFSHRPVQEKFVCLNCGFETHADEQAALNIARSWLFLRSQEYKKYQTNKTTGNTDKRAFVETWQSFYRKKLKEVWKPAV

SEQ ID NO: 42636 - protein, 978 aa, synthetic construct
  REGION 1..978: note = engineered CasX variant
QEIKRINKIRRRLVKDSNTKKAGKTGPMKTLLVRVMTPDLRERLENLRKKPENIPQPISNTSRANLNKLLTDYTEMKKAILHVYDEEFQKDPVGLMSRVAQPASKKIDQNKLKPEMDEKGNLTTAGFACSQCGQPLFVYKLEQVSEKGKAYTNYFGRCNVAEHEKLILLAQLKPEKDSDEAVTYSLGKFGQRALDFYSIHVTKESTHPVKPLAQIAGNRYASSPVGKALSGACMGTIASFLSKYQDIIIEHQKVVKGNQKRLESLRELAGKENLEYPSVTLPPQPHTKEGVDAYNEVIARVRMWVNLNLWQKLKLSRDDAKPLLRLKGFPSFPLVERQANEVDWWDMVCNVKKLINEKKEDGKVFWQNLAGYKRQEALRPYLSSEEDRKKGKKFARYQLGDLLLHLEKKHGEDWGKVYDEAWERIDKKVEGLSKHIKLEEERRSEDAQSKAALTDWLRAKASFVIEGLKEADKDEFCRCELKLQKWYGDLRGKPFAIEAENSILDISGFSKQYNCAFIWQKDGVKKLNLYLIINYFKGGKLRFKKIKPEAFEANRFYTVINKKSGEIVPMEVNFNFDDPNLIILPLAFGKRQGREFIWNDLLSLETGSLKLANGRVIEKTLYNRRTRQDEPALFVALTFERREVLDSSNIKPMNLIGVDRGENIPAVIALTDPEGCPLSRFKDSLGNPTHILRIGESYKEKQRTIQAKKEVEQRRAGGYSRKYASKAKNLADDMVRNTARDLLYYAVTQDAMLIFENLSRGFGRQGKRTFMAERQYTRMEDWLTAKLAYEGLPSKTYLSKTLAQYTSKTCSNCGFTITSADYDRVLEKLKKTATGWMTTINGKELKVEGQITYYNRYKRQNVVKDLSVELDRLSEESVNNDISSWTKGRSGEALSLLKKRFSHRPVQEKFVCLNCGFETHADEQAALNIARSWLFLRSQEYKKYQTNKTTGNTDKRAFVETWQSFYRKKLKEVWKPAV

SEQ ID NO: 42637 - protein, 978 aa, synthetic construct
  REGION 1..978: note = engineered CasX variant
QEIKRINKIRRRLVKDSNTKKAGKTGPMKTLLVRVMTPDLRERLENLRKKPENIPQPISNTSRANLNKLLTDYTEMKKAILHVYDEEFQKDPVGLMSRVAQPASKKIDQNKLKPEMDEKGNLTTAGFACSQCGQPLFVYKLEQVSEKGKAYTNYFGRCNVAEHEKLILLAQLKPEKDSDEAVTYSLGKFGQRALDFYSIHVTKESTHPVKPLAQIAGNRYASTPVGKALSGACMGTIASFLSKYQDIIIEHQKVVKGNQKRLESLRELAGKENLEYPSVTLPPQPHTKEGVDAYNEVIARVRMWVNLNLWQKLKLSRDDAKPLLRLKGFPSFPLVERQANEVDWWDMVCNVKKLINEKKEDGKVFWQNLAGYKRQEALRPYLSSEEDRKKGKKFARYQLGDLLLHLEKKHGEDWGKVYDEAWERIDKKVEGLSKHIKLEEERRSEDAQSKAALTDWLRAKASFVIEGLKEADKDEFCRCELKLQKWYGDLRGKPFAIEAENSILDISGFSKQYNCAFIWQKDGVKKLNLYLIINYFKGGKLRFKKIKPEAFEANRFYTVINKKSGEIVPMEVNFNFDDPNLIILPLAFGKRQGREFIWNDLLSLETGSLKLANGRVIEKTLYNRRTRQDEPALFVALTFERREVLDSSNIKPMNLIGVDRGENIPAVIALTDPEGCPLSRFKDSLGNPTHILRIGESYKEKQRTIQAKKEVEQRRAGGYSRKYASKAKNLADDMVRNTARDLLYYAVTQDAMLIFENLSRGFGRQGKRTFMAERQYTRMEDWLTAKLAYEGLPSKTYLSKTLAQYTSKTCSNCGFTITSADYDRVLEKLKKTATGWMTTINGKELKVEGQITYYNRYKRQNVVKDLSVELDRLSEESVNNDISSWTKGRSGEALSLLKKRFSHRPVQEKFVCLNCGFETHADEQAALNIARSWLFLRSQEYKKYQTNKTTGNTDKRAFVETWQSFYRKKLKEVWKPAV

SEQ ID NO: 42638 - protein, 978 aa, synthetic construct
  REGION 1..978: note = engineered CasX variant
QEIKRINKIRRRLVKDSNTKKAGKTGPMKTLLVRVMTPDLRERLENLRKKPENIPQPISNTSRANLNKLLTDYTEMKKAILHVYDEEFQKDPVGLMSRVAQPASKKIDQNKLKPEMDEKGNLTTAGFACSQCGQPLFVYKLEQVSEKGKAYTNYFGRCNVAEHEKLILLAQLKPEKDSDEAVTYSLGKFGQRALDFYSIHVTKESTHPVKPLAQIAGNRYASAPVGKALSGACMGTIASFLSKYQDIIIEHQKVVKGNQKRLESLRELAGKENLEYPSVTLPPQPHTKEGVDAYNEVIARVRMWVNLNLWQKLKLSRDDAKPLLRLKGFPSFPLVERQANEVDWWDMVCNVKKLINEKKEDGKVFWQNLAGYKRQEALRPYLSSEEDRKKGKKFARYQLGDLLLHLEKKHGEDWGKVYDEAWERIDKKVEGLSKHIKLEEERRSEDAQSKAALTDWLRAKASFVIEGLKEADKDEFCRCELKLQKWYGDLRGKPFAIEAENSILDISGFSKQYNCAFIWQKDGVKKLNLYLIINYFKGGKLRFKKIKPEAFEANRFYTVINKKSGEIVPMEVNFNFDDPNLIILPLAFGKRQGREFIWNDLLSLETGSLKLANGRVIEKTLYNRRTRQDEPALFVALTFERREVLDSSNIKPMNLIGVDRGENIPAVIALTDPEGCPLSRFKDSLGNPTHILRIGESYKEKQRTIQAKKEVEQRRAGGYSRKYASKAKNLADDMVRNTARDLLYYAVTQDAMLIFENLSRGFGRQGKRTFMAERQYTRMEDWLTAKLAYEGLPSKTYLSKTLAQYTSKTCSNCGFTITSADYDRVLEKLKKTATGWMTTINGKELKVEGQITYYNRYKRQNVVKDLSVELDRLSEESVNNDISSWTKGRSGEALSLLKKRFSHRPVQEKFVCLNCGFETHADEQAALNIARSWLFLRSQEYKKYQTNKTTGNTDKRAFVETWQSFYRKKLKEVWKPAV

SEQ ID NO: 42639 - protein, 978 aa, synthetic construct
  REGION 1..978: note = engineered CasX variant
QEIKRINKIRRRLVKDSNTKKAGKTGPMKTLLVRVMTPDLRERLENLRKKPENIPQPISNTSRANLNKLLTDYTEMKKAILHVYDEEFQKDPVGLMSRVAQPASKKIDQNKLKPEMDEKGNLTTAGFACSQCGQPLFVYKLEQVSEKGKAYTNYFGRCNVAEHEKLILLAQLKPEKDSDEAVTYSLGKFGQRALDFYSIHVTKESTHPVKPLAQIAGNRYASVPVGKALSGACMGTIASFLSKYQDIIIEHQKVVKGNQKRLESLRELAGKENLEYPSVTLPPQPHTKEGVDAYNEVIARVRMWVNLNLWQKLKLSRDDAKPLLRLKGFPSFPLVERQANEVDWWDMVCNVKKLINEKKEDGKVFWQNLAGYKRQEALRPYLSSEEDRKKGKKFARYQLGDLLLHLEKKHGEDWGKVYDEAWERIDKKVEGLSKHIKLEEERRSEDAQSKAALTDWLRAKASFVIEGLKEADKDEFCRCELKLQKWYGDLRGKPFAIEAENSILDISGFSKQYNCAFIWQKDGVKKLNLYLIINYFKGGKLRFKKIKPEAFEANRFYTVINKKSGEIVPMEVNFNFDDPNLIILPLAFGKRQGREFIWNDLLSLETGSLKLANGRVIEKTLYNRRTRQDEPALFVALTFERREVLDSSNIKPMNLIGVDRGENIPAVIALTDPEGCPLSRFKDSLGNPTHILRIGESYKEKQRTIQAKKEVEQRRAGGYSRKYASKAKNLADDMVRNTARDLLYYAVTQDAMLIFENLSRGFGRQGKRTFMAERQYTRMEDWLTAKLAYEGLPSKTYLSKTLAQYTSKTCSNCGFTITSADYDRVLEKLKKTATGWMTTINGKELKVEGQITYYNRYKRQNVVKDLSVELDRLSEESVNNDISSWTKGRSGEALSLLKKRFSHRPVQEKFVCLNCGFETHADEQAALNIARSWLFLRSQEYKKYQTNKTTGNTDKRAFVETWQSFYRKKLKEVWKPAV

SEQ ID NO: 42640 - protein, 978 aa, synthetic construct
  REGION 1..978: note = engineered CasX variant
QEIKRINKIRRRLVKDSNTKKAGKTGPMKTLLVRVMTPDLRERLENLRKKPENIPQPISNTSRANLNKLLTDYTEMKKAILHVYDEEFQKDPVGLMSRVAQPASKKIDQNKLKPEMDEKGNLTTAGFACSQCGQPLFVYKLEQVSEKGKAYTNYFGRCNVAEHEKLIKLAQLKPEKDSDEAVTYSLGKFGQRALDFYSIHVTKESTHPVKPLAQIAGNRYASGPVGKALSGACMGTIASFLSKYQDIIIEHQKVVKGNQKRLESLRELAGKENLEYPSVTLPPQPHTKEGVDAYNEVIARVRMWVNLNLWQKLKLSRDDAKPLLRLKGFPSFPLVERQANEVDWWDMVCNVKKLINEKKEDGKVFWQNLAGYKRQEALRPYLSSEEDRKKGKKFARYQLGDLLLHLEKKHGEDWGKVYDEAWERIDKKVEGLSKHIKLEEERRSEDAQSKAALTDWLRAKASFVIEGLKEADKDEFCRCELKLQKWYGDLRGKPFAIEAENSILDISGFSKQYNCAFIWQKDGVKKLNLYLIINYFKGGKLRFKKIKPEAFEANRFYTVINKKSGEIVPMEVNFNFDDPNLIILPLAFGKRQGREFIWNDLLSLETGSLKLANGRVIEKTLYNRRTRQDEPALFVALTFERREVLDSSNIKPMNLIGVDRGENIPAVIALTDPEGCPLSRFKDSLGNPTHILRIGESYKEKQRTIQAKKEVEQRRAGGYSRKYASKAKNLADDMVRNTARDLLYYAVTQDAMLIFENLSRGFGRQGKRTFMAERQYTRMEDWLTAKLAYEGLPSKTYLSKTLAQYTSKTCSNCGFTITSADYDRVLEKLKKTATGWMTTINGKELKVEGQITYYNRYKRQNVVKDLSVELDRLSEESVNNDISSWTKGRSGEALSLLKKRFSHRPVQEKFVCLNCGFETHADEQAALNIARSWLFLRSQEYKKYQTNKTTGNTDKRAFVETWQSFYRKKLKEVWKPAV

SEQ ID NO: 42641 - protein, 977 aa, synthetic construct
  REGION 1..977: note = engineered CasX variant
QEIKRINKIRRRLVKDSNTKKAGKTGPMKTLLVRVMTPDLRERLENLRKKPENIPQPISNTSRANLNKLLTDYTEMKKAILHVYDEEFQKDPVGLMSRVAQPASKKIDQNKLKPEMDEKGNLTTAGFACSQCGQPLFVYKLEQVSEKGKAYTNYFGRCNVAEHEKLILLAQLKPEKDSDEAVTYSLGKFGQRALDFYSIHVTKESTHPVKPLAQIAGNRYASPVGKALSGACMGTIASFLSKYQDIIIEHQKVVKGNQKRLESLRELAGKENLEYPSVTLPPQPHTKEGVDAYNEVIARVRMWVNLNLWQKLKLSRDDAKPLLRLKGFPSFPLVERQANEVDWWDMVCNVKKLINEKKEDGKVFWQNLAGYKRQEALRPYLSSEEDRKKGKKFARYQLGDLLLHLEKKHGEDWGKVYDEAWERIDKKVEGLSKHIKLEEERRSEDAQSKAALTDWLRAKASFVIEGLKEADKDEFCRCELKLQKWYGDLRGKPFAIEAENSILDISGFSKQYNCAFIWQKDGVKKLNLYLIINYFKGGKLRFKKIKPEAFEANRFYTVINKKSGEIVPMEVNFNFDDPNLIILPLAFGKRQGREFIWNDLLSLETGSLKLANGRVIEKTLYNRRTRQDEPALFVALTFERREVLDSSNIKPMNLIGVDRGENIPAVIALTDPEGCPLSRFKDSLGNPTHILRIGESYKEKQRTIQAKKEVEQRRAGGYSRKYASKAKNLADDMVRNTARDLLYYAVTQDAMLIFENLSRGFGRQGKRTFMAERQYTRMEDWLTAKLAYEGLPSKTYLSKTLAQYTSKTCSNCGFTITSADYDRVLEKLKKTATGWMTTINGKELKVEGQITYYNRYKRQNVVKDLSVELDRLSEESVNNDISSWTKGRSGEALSLLKKRFSHRPVQEKFVCLNCGFETHADEQAALNIARSWLFLRSQEYKKYQTNKTTGNTDKRAFVETWQSFYRKKLKEVWKPAV

SEQ ID NO: 42642 - protein, 978 aa, synthetic construct
  REGION 1..978: note = engineered CasX variant
QEIKRINKIRRRLVKDSNTKKAGKTGPMKTLLVRVMTPDLRERLENLRKKPENIPQPISNTSRANLNKLLTDYTEMKKAILHVYDEEFQKDPVGLMSRVAQPASKKIDQNKLKPEMDEKGNLTTAGFACSQCGQPLFVYKLEQVSEKGKAYTNYFGRCNVAEHEKLILLAQLKPEKDSDEAVTYSLGKFGQRALDFYSIHVTKESTHPVKPLAQIAGNRYASYPVGKALSDACMGTIASFLSKYQDIIIEHQKVVKGNQKRLESLRELAGKENLEYPSVTLPPQPHTKEGVDAYNEVIARVRMWVNLNLWQKLKLSRDDAKPLLRLKNFPSFPLVERQANEVDWWDMVCNVKKLINEKKEDGKVFWQNLAGYKRQEALRPYLSSEEDRKKGKKFARYQLGDLLLHLEKKHGEDWGKVYDEAWERIDKKVEGLSKHIKLEEERRSEDAQSKAALTDWLRAKASFVIEGLKEADKDEFCRCELKLQKWYGDLRGKPFAIEAENSILDISGFSKQYNCAFIWQKDGVKKLNLYLIINYFKGGKLRFKKIKPEAFEANRFYTVINKKSGEIVPMEVNFNFDDPNLIILPLAFGKRQGREFIWNDLLSLETGSLKLANGRVIEKTLYNRRTRQDEPALFVALTFERREVLDSSNIKPMNLIGVDRGENIPAVIALTDPEGCPLSRFKDSLGNPTHILRIGESYKEKQRTIQAKKEVEQRRAGGYSRKYASKAKNLADDMVRNTARDLLYYAVTQDAMLIFENLSRGFGRQGKRTFMAERQYTRMEDWLTAKLAYEGLPSKTYLSKTLAQYTSKTCSNCGFTITSADYDRVLEKLKKTATGWMTTINGKELKVEGQITYYNRYKRQNVVKDLSVELDRLSEESVNNDISSWTKGRSGEALSLLKKRFSHRPVQEKFVCLNCGFETHADEQAALNIARSWLFLRSQEYKKYQTNKTTGNTDKRAFVETWQSFYRKKLKEVWKPAV

SEQ ID NO: 42643 - protein, 978 aa, synthetic construct
  REGION 1..978: note = engineered CasX variant
QEIKRINKIRRRLVKDSNTKKAGKTGPMKTLLVRVMTPDLRERLENLRKKPENIPQPISNTSRANLNKLLTDYTEMKKAILHVYDEEFQKDPVGLMSRVAQPASKKIDQNKLKPEMDEKGNLTTAGFACSQCGQPLFVYKLEQVSEKGKAYTNYFGRCNVAEHEKLILLAQLKPEKDSDEAVTYSLGKFGQRALDFYSIHVTKESTHPVKPLAQIAGNRYASHPVGKALSDACMGTIASFLSKYQDIIIEHQKVVKGNQKRLESLRELAGKENLEYPSVTLPPQPHTKEGVDAYNEVIARVRMWVNLNLWQKLKLSRDDAKPLLRLKNFPSFPLVERQANEVDWWDMVCNVKKLINEKKEDGKVFWQNLAGYKRQEALRPYLSSEEDRKKGKKFARYQLGDLLLHLEKKHGEDWGKVYDEAWERIDKKVEGLSKHIKLEEERRSEDAQSKAALTDWLRAKASFVIEGLKEADKDEFCRCELKLQKWYGDLRGKPFAIEAENSILDISGFSKQYNCAFIWQKDGVKKLNLYLIINYFKGGKLRFKKIKPEAFEANRFYTVINKKSGEIVPMEVNFNFDDPNLIILPLAFGKRQGREFIWNDLLSLETGSLKLANGRVIEKTLYNRRTRQDEPALFVALTFERREVLDSSNIKPMNLIGVDRGENIPAVIALTDPEGCPLSRFKDSLGNPTHILRIGESYKEKQRTIQAKKEVEQRRAGGYSRKYASKAKNLADDMVRNTARDLLYYAVTQDAMLIFENLSRGFGRQGKRTFMAERQYTRMEDWLTAKLAYEGLPSKTYLSKTLAQYTSKTCSNCGFTITSADYDRVLEKLKKTATGWMTTINGKELKVEGQITYYNRYKRQNVVKDLSVELDRLSEESVNNDISSWTKGRSGEALSLLKKRFSHRPVQEKFVCLNCGFETHADEQAALNIARSWLFLRSQEYKKYQTNKTTGNTDKRAFVETWQSFYRKKLKEVWKPAV

SEQ ID NO: 42644 - protein, 978 aa, synthetic construct
  REGION 1..978: note = engineered CasX variant
QEIKRINKIRRRLVKDSNTKKAGKTGPMKTLLVRVMTPDLRERLENLRKKPENIPQPISNTSRANLNKLLTDYTEMKKAILHVYDEEFQKDPVGLMSRVAQPASKKIDQNKLKPEMDEKGNLTTAGFACSQCGQPLFVYKLEQVSEKGKAYTNYFGRCNVAEHEKLILLAQLKPEKDSDEAVTYSLGKFGQRALDFYSIHVTKESTHPVKPLAQIAGNRYASSPVGKALSDACMGTIASFLSKYQDIIIEHQKVVKGNQKRLESLRELAGKENLEYPSVTLPPQPHTKEGVDAYNEVIARVRMWVNLNLWQKLKLSRDDAKPLLRLKNFPSFPLVERQANEVDWWDMVCNVKKLINEKKEDGKVFWQNLAGYKRQEALRPYLSSEEDRKKGKKFARYQLGDLLLHLEKKHGEDWGKVYDEAWERIDKKVEGLSKHIKLEEERRSEDAQSKAALTDWLRAKASFVIEGLKEADKDEFCRCELKLQKWYGDLRGKPFAIEAENSILDISGFSKQYNCAFIWQKDGVKKLNLYLIINYFKGGKLRFKKIKPEAFEANRFYTVINKKSGEIVPMEVNFNFDDPNLIILPLAFGKRQGREFIWNDLLSLETGSLKLANGRVIEKTLYNRRTRQDEPALFVALTFERREVLDSSNIKPMNLIGVDRGENIPAVIALTDPEGCPLSRFKDSLGNPTHILRIGESYKEKQRTIQAKKEVEQRRAGGYSRKYASKAKNLADDMVRNTARDLLYYAVTQDAMLIFENLSRGFGRQGKRTFMAERQYTRMEDWLTAKLAYEGLPSKTYLSKTLAQYTSKTCSNCGFTITSADYDRVLEKLKKTATGWMTTINGKELKVEGQITYYNRYKRQNVVKDLSVELDRLSEESVNNDISSWTKGRSGEALSLLKKRFSHRPVQEKFVCLNCGFETHADEQAALNIARSWLFLRSQEYKKYQTNKTTGNTDKRAFVETWQSFYRKKLKEVWKPAV

SEQ ID NO: 42645 - protein, 978 aa, synthetic construct
  REGION 1..978: note = engineered CasX variant
QEIKRINKIRRRLVKDSNTKKAGKTGPMKTLLVRVMTPDLRERLENLRKKPENIPQPISNTSRANLNKLLTDYTEMKKAILHVYDEEFQKDPVGLMSRVAQPASKKIDQNKLKPEMDEKGNLTTAGFACSQCGQPLFVYKLEQVSEKGKAYTNYFGRCNVAEHEKLILLAQLKPEKDSDEAVTYSLGKFGQRALDFYSIHVTKESTHPVKPLAQIAGNRYASTPVGKALSDACMGTIASFLSKYQDIIIEHQKVVKGNQKRLESLRELAGKENLEYPSVTLPPQPHTKEGVDAYNEVIARVRMWVNLNLWQKLKLSRDDAKPLLRLKNFPSFPLVERQANEVDWWDMVCNVKKLINEKKEDGKVFWQNLAGYKRQEALRPYLSSEEDRKKGKKFARYQLGDLLLHLEKKHGEDWGKVYDEAWERIDKKVEGLSKHIKLEEERRSEDAQSKAALTDWLRAKASFVIEGLKEADKDEFCRCELKLQKWYGDLRGKPFAIEAENSILDISGFSKQYNCAFIWQKDGVKKLNLYLIINYFKGGKLRFKKIKPEAFEANRFYTVINKKSGEIVPMEVNFNFDDPNLIILPLAFGKRQGREFIWNDLLSLETGSLKLANGRVIEKTLYNRRTRQDEPALFVALTFERREVLDSSNIKPMNLIGVDRGENIPAVIALTDPEGCPLSRFKDSLGNPTHILRIGESYKEKQRTIQAKKEVEQRRAGGYSRKYASKAKNLADDMVRNTARDLLYYAVTQDAMLIFENLSRGFGRQGKRTFMAERQYTRMEDWLTAKLAYEGLPSKTYLSKTLAQYTSKTCSNCGFTITSADYDRVLEKLKKTATGWMTTINGKELKVEGQITYYNRYKRQNVVKDLSVELDRLSEESVNNDISSWTKGRSGEALSLLKKRFSHRPVQEKFVCLNCGFETHADEQAALNIARSWLFLRSQEYKKYQTNKTTGNTDKRAFVETWQSFYRKKLKEVWKPAV

SEQ ID NO: 42646 - protein, 978 aa, synthetic construct
  REGION 1..978: note = engineered CasX variant
QEIKRINKIRRRLVKDSNTKKAGKTGPMKTLLVRVMTPDLRERLENLRKKPENIPQPISNTSRANLNKLLTDYTEMKKAILHVYDEEFQKDPVGLMSRVAQPASKKIDQNKLKPEMDEKGNLTTAGFACSQCGQPLFVYKLEQVSEKGKAYTNYFGRCNVAEHEKLILLAQLKPEKDSDEAVTYSLGKFGQRALDFYSIHVTKESTHPVKPLAQIAGNRYASAPVGKALSDACMGTIASFLSKYQDIIIEHQKVVKGNQKRLESLRELAGKENLEYPSVTLPPQPHTKEGVDAYNEVIARVRMWVNLNLWQKLKLSRDDAKPLLRLKNFPSFPLVERQANEVDWWDMVCNVKKLINEKKEDGKVFWQNLAGYKRQEALRPYLSSEEDRKKGKKFARYQLGDLLLHLEKKHGEDWGKVYDEAWERIDKKVEGLSKHIKLEEERRSEDAQSKAALTDWLRAKASFVIEGLKEADKDEFCRCELKLQKWYGDLRGKPFAIEAENSILDISGFSKQYNCAFIWQKDGVKKLNLYLIINYFKGGKLRFKKIKPEAFEANRFYTVINKKSGEIVPMEVNFNFDDPNLIILPLAFGKRQGREFIWNDLLSLETGSLKLANGRVIEKTLYNRRTRQDEPALFVALTFERREVLDSSNIKPMNLIGVDRGENIPAVIALTDPEGCPLSRFKDSLGNPTHILRIGESYKEKQRTIQAKKEVEQRRAGGYSRKYASKAKNLADDMVRNTARDLLYYAVTQDAMLIFENLSRGFGRQGKRTFMAERQYTRMEDWLTAKLAYEGLPSKTYLSKTLAQYTSKTCSNCGFTITSADYDRVLEKLKKTATGWMTTINGKELKVEGQITYYNRYKRQNVVKDLSVELDRLSEESVNNDISSWTKGRSGEALSLLKKRFSHRPVQEKFVCLNCGFETHADEQAALNIARSWLFLRSQEYKKYQTNKTTGNTDKRAFVETWQSFYRKKLKEVWKPAV

SEQ ID NO: 42647 - protein, 978 aa, synthetic construct
  REGION 1..978: note = engineered CasX variant
QEIKRINKIRRRLVKDSNTKKAGKTGPMKTLLVRVMTPDLRERLENLRKKPENIPQPISNTSRANLNKLLTDYTEMKKAILHVYDEEFQKDPVGLMSRVAQPASKKIDQNKLKPEMDEKGNLTTAGFACSQCGQPLFVYKLEQVSEKGKAYTNYFGRCNVAEHEKLILLAQLKPEKDSDEAVTYSLGKFGQRALDFYSIHVTKESTHPVKPLAQIAGNRYASVPVGKALSDACMGTIASFLSKYQDIIIEHQKVVKGNQKRLESLRELAGKENLEYPSVTLPPQPHTKEGVDAYNEVIARVRMWVNLNLWQKLKLSRDDAKPLLRLKNFPSFPLVERQANEVDWWDMVCNVKKLINEKKEDGKVFWQNLAGYKRQEALRPYLSSEEDRKKGKKFARYQLGDLLLHLEKKHGEDWGKVYDEAWERIDKKVEGLSKHIKLEEERRSEDAQSKAALTDWLRAKASFVIEGLKEADKDEFCRCELKLQKWYGDLRGKPFAIEAENSILDISGFSKQYNCAFIWQKDGVKKLNLYLIINYFKGGKLRFKKIKPEAFEANRFYTVINKKSGEIVPMEVNFNFDDPNLIILPLAFGKRQGREFIWNDLLSLETGSLKLANGRVIEKTLYNRRTRQDEPALFVALTFERREVLDSSNIKPMNLIGVDRGENIPAVIALTDPEGCPLSRFKDSLGNPTHILRIGESYKEKQRTIQAKKEVEQRRAGGYSRKYASKAKNLADDMVRNTARDLLYYAVTQDAMLIFENLSRGFGRQGKRTFMAERQYTRMEDWLTAKLAYEGLPSKTYLSKTLAQYTSKTCSNCGFTITSADYDRVLEKLKKTATGWMTTINGKELKVEGQITYYNRYKRQNVVKDLSVELDRLSEESVNNDISSWTKGRSGEALSLLKKRFSHRPVQEKFVCLNCGFETHADEQAALNIARSWLFLRSQEYKKYQTNKTTGNTDKRAFVETWQSFYRKKLKEVWKPAV

SEQ ID NO: 42648 - protein, 978 aa, synthetic construct
  REGION 1..978: note = engineered CasX variant
QEIKRINKIRRRLVKDSNTKKAGKTGPMKTLLVRVMTPDLRERLENLRKKPENIPQPISNTSRANLNKLLTDYTEMKKAILHVYDEEFQKDPVGLMSRVAQPASKKIDQNKLKPEMDEKGNLTTAGFACSQCGQPLFVYKLEQVSEKGKAYTNYFGRCNVAEHEKLIKLAQLKPEKDSDEAVTYSLGKFGQRALDFYSIHVTKESTHPVKPLAQIAGNRYASGPVGKALSDACMGTIASFLSKYQDIIIEHQKVVKGNQKRLESLRELAGKENLEYPSVTLPPQPHTKEGVDAYNEVIARVRMWVNLNLWQKLKLSRDDAKPLLRLKNFPSFPLVERQANEVDWWDMVCNVKKLINEKKEDGKVFWQNLAGYKRQEALRPYLSSEEDRKKGKKFARYQLGDLLLHLEKKHGEDWGKVYDEAWERIDKKVEGLSKHIKLEEERRSEDAQSKAALTDWLRAKASFVIEGLKEADKDEFCRCELKLQKWYGDLRGKPFAIEAENSILDISGFSKQYNCAFIWQKDGVKKLNLYLIINYFKGGKLRFKKIKPEAFEANRFYTVINKKSGEIVPMEVNFNFDDPNLIILPLAFGKRQGREFIWNDLLSLETGSLKLANGRVIEKTLYNRRTRQDEPALFVALTFERREVLDSSNIKPMNLIGVDRGENIPAVIALTDPEGCPLSRFKDSLGNPTHILRIGESYKEKQRTIQAKKEVEQRRAGGYSRKYASKAKNLADDMVRNTARDLLYYAVTQDAMLIFENLSRGFGRQGKRTFMAERQYTRMEDWLTAKLAYEGLPSKTYLSKTLAQYTSKTCSNCGFTITSADYDRVLEKLKKTATGWMTTINGKELKVEGQITYYNRYKRQNVVKDLSVELDRLSEESVNNDISSWTKGRSGEALSLLKKRFSHRPVQEKFVCLNCGFETHADEQAALNIARSWLFLRSQEYKKYQTNKTTGNTDKRAFVETWQSFYRKKLKEVWKPAV

SEQ ID NO: 42649 - protein, 977 aa, synthetic construct
  REGION 1..977: note = engineered CasX variant
QEIKRINKIRRRLVKDSNTKKAGKTGPMKTLLVRVMTPDLRERLENLRKKPENIPQPISNTSRANLNKLLTDYTEMKKAILHVYDEEFQKDPVGLMSRVAQPASKKIDQNKLKPEMDEKGNLTTAGFACSQCGQPLFVYKLEQVSEKGKAYTNYFGRCNVAEHEKLILLAQLKPEKDSDEAVTYSLGKFGQRALDFYSIHVTKESTHPVKPLAQIAGNRYASPVGKALSDACMGTIASFLSKYQDIIIEHQKVVKGNQKRLESLRELAGKENLEYPSVTLPPQPHTKEGVDAYNEVIARVRMWVNLNLWQKLKLSRDDAKPLLRLKNFPSFPLVERQANEVDWWDMVCNVKKLINEKKEDGKVFWQNLAGYKRQEALRPYLSSEEDRKKGKKFARYQLGDLLLHLEKKHGEDWGKVYDEAWERIDKKVEGLSKHIKLEEERRSEDAQSKAALTDWLRAKASFVIEGLKEADKDEFCRCELKLQKWYGDLRGKPFAIEAENSILDISGFSKQYNCAFIWQKDGVKKLNLYLIINYFKGGKLRFKKIKPEAFEANRFYTVINKKSGEIVPMEVNFNFDDPNLIILPLAFGKRQGREFIWNDLLSLETGSLKLANGRVIEKTLYNRRTRQDEPALFVALTFERREVLDSSNIKPMNLIGVDRGENIPAVIALTDPEGCPLSRFKDSLGNPTHILRIGESYKEKQRTIQAKKEVEQRRAGGYSRKYASKAKNLADDMVRNTARDLLYYAVTQDAMLIFENLSRGFGRQGKRTFMAERQYTRMEDWLTAKLAYEGLPSKTYLSKTLAQYTSKTCSNCGFTITSADYDRVLEKLKKTATGWMTTINGKELKVEGQITYYNRYKRQNVVKDLSVELDRLSEESVNNDISSWTKGRSGEALSLLKKRFSHRPVQEKFVCLNCGFETHADEQAALNIARSWLFLRSQEYKKYQTNKTTGNTDKRAFVETWQSFYRKKLKEVWKPAV

SEQ ID NO: 42650 - protein, 978 aa, synthetic construct
  REGION 1..978: note = engineered CasX variant
QEIKRINKIRRRLVKDSNTKKAGKTGPMKTLLVRVMTPDLRERLENLRKKPENIPQPISNTSRANLNKLLTDYTEMKKAILHVYDEEFQKDPVGLMSRVAQPASKKIDQNKLKPEMDEKGNLTTAGFACSQCGQPLFVYKLEQVSEKGKAYTNYFGRCNVAEHEKLILLAQLKPEKDSDEAVTYSLGKFGQRALDFYSIHVTKESTHPVKPLAQIAGNRYASYPVGKALSDACMGTIASFLSKYQDIIIEHQKVVKGNQKRLESLRELAGKENLEYPSVTLPPQPHTKEGVDAYNEVIARVRMWVNLNLWQKLKLSRDDAKPLLRLKGFPSFPLVERQANEVDWWDMVCNVKKLINEKKEDGKVFWQNLAGYKRQEALRPYLSSEEDRKKGKKFARYQLGDLLNHLEKKHGEDWGKVYDEAWERIDKKVEGLSKHIKLEEERRSEDAQSKAALTDWLRAKASFVIEGLKEADKDEFCRCELKLQKWYGDLRGKPFAIEAENSILDISGFSKQYNCAFIWQKDGVKKLNLYLIINYFKGGKLRFKKIKPEAFEANRFYTVINKKSGEIVPMEVNFNFDDPNLIILPLAFGKRQGREFIWNDLLSLETGSLKLANGRVIEKTLYNRRTRQDEPALFVALTFERREVLDSSNIKPMNLIGVDRGENIPAVIALTDPEGCPLSRFKDSLGNPTHILRIGESYKEKQRTIQAKKEVEQRRAGGYSRKYASKAKNLADDMVRNTARDLLYYAVTQDAMLIFENLSRGFGRQGKRTFMAERQYTRMEDWLTAKLAYEGLPSKTYLSKTLAQYTSKTCSNCGFTITSADYDRVLEKLKKTATGWMTTINGKELKVEGQITYYNRYKRQNVVKDLSVELDRLSEESVNNDISSWTKGRSGEALSLLKKRFSHRPVQEKFVCLNCGFETHADEQAALNIARSWLFLRSQEYKKYQTNKTTGNTDKRAFVETWQSFYRKKLKEVWKPAV

SEQ ID NO: 42651 - protein, 978 aa, synthetic construct
  REGION 1..978: note = engineered CasX variant
QEIKRINKIRRRLVKDSNTKKAGKTGPMKTLLVRVMTPDLRERLENLRKKPENIPQPISNTSRANLNKLLTDYTEMKKAILHVYDEEFQKDPVGLMSRVAQPASKKIDQNKLKPEMDEKGNLTTAGFACSQCGQPLFVYKLEQVSEKGKAYTNYFGRCNVAEHEKLILLAQLKPEKDSDEAVTYSLGKFGQRALDFYSIHVTKESTHPVKPLAQIAGNRYASHPVGKALSDACMGTIASFLSKYQDIIIEHQKVVKGNQKRLESLRELAGKENLEYPSVTLPPQPHTKEGVDAYNEVIARVRMWVNLNLWQKLKLSRDDAKPLLRLKGFPSFPLVERQANEVDWWDMVCNVKKLINEKKEDGKVFWQNLAGYKRQEALRPYLSSEEDRKKGKKFARYQLGDLLNHLEKKHGEDWGKVYDEAWERIDKKVEGLSKHIKLEEERRSEDAQSKAALTDWLRAKASFVIEGLKEADKDEFCRCELKLQKWYGDLRGKPFAIEAENSILDISGFSKQYNCAFIWQKDGVKKLNLYLIINYFKGGKLRFKKIKPEAFEANRFYTVINKKSGEIVPMEVNFNFDDPNLIILPLAFGKRQGREFIWNDLLSLETGSLKLANGRVIEKTLYNRRTRQDEPALFVALTFERREVLDSSNIKPMNLIGVDRGENIPAVIALTDPEGCPLSRFKDSLGNPTHILRIGESYKEKQRTIQAKKEVEQRRAGGYSRKYASKAKNLADDMVRNTARDLLYYAVTQDAMLIFENLSRGFGRQGKRTFMAERQYTRMEDWLTAKLAYEGLPSKTYLSKTLAQYTSKTCSNCGFTITSADYDRVLEKLKKTATGWMTTINGKELKVEGQITYYNRYKRQNVVKDLSVELDRLSEESVNNDISSWTKGRSGEALSLLKKRFSHRPVQEKFVCLNCGFETHADEQAALNIARSWLFLRSQEYKKYQTNKTTGNTDKRAFVETWQSFYRKKLKEVWKPAV

SEQ ID NO: 42652 - protein, 978 aa, synthetic construct
  REGION 1..978: note = engineered CasX variant
QEIKRINKIRRRLVKDSNTKKAGKTGPMKTLLVRVMTPDLRERLENLRKKPENIPQPISNTSRANLNKLLTDYTEMKKAILHVYDEEFQKDPVGLMSRVAQPASKKIDQNKLKPEMDEKGNLTTAGFACSQCGQPLFVYKLEQVSEKGKAYTNYFGRCNVAEHEKLILLAQLKPEKDSDEAVTYSLGKFGQRALDFYSIHVTKESTHPVKPLAQIAGNRYASSPVGKALSDACMGTIASFLSKYQDIIIEHQKVVKGNQKRLESLRELAGKENLEYPSVTLPPQPHTKEGVDAYNEVIARVRMWVNLNLWQKLKLSRDDAKPLLRLKGFPSFPLVERQANEVDWWDMVCNVKKLINEKKEDGKVFWQNLAGYKRQEALRPYLSSEEDRKKGKKFARYQLGDLLNHLEKKHGEDWGKVYDEAWERIDKKVEGLSKHIKLEEERRSEDAQSKAALTDWLRAKASFVIEGLKEADKDEFCRCELKLQKWYGDLRGKPFAIEAENSILDISGFSKQYNCAFIWQKDGVKKLNLYLIINYFKGGKLRFKKIKPEAFEANRFYTVINKKSGEIVPMEVNFNFDDPNLIILPLAFGKRQGREFIWNDLLSLETGSLKLANGRVIEKTLYNRRTRQDEPALFVALTFERREVLDSSNIKPMNLIGVDRGENIPAVIALTDPEGCPLSRFKDSLGNPTHILRIGESYKEKQRTIQAKKEVEQRRAGGYSRKYASKAKNLADDMVRNTARDLLYYAVTQDAMLIFENLSRGFGRQGKRTFMAERQYTRMEDWLTAKLAYEGLPSKTYLSKTLAQYTSKTCSNCGFTITSADYDRVLEKLKKTATGWMTTINGKELKVEGQITYYNRYKRQNVVKDLSVELDRLSEESVNNDISSWTKGRSGEALSLLKKRFSHRPVQEKFVCLNCGFETHADEQAALNIARSWLFLRSQEYKKYQTNKTTGNTDKRAFVETWQSFYRKKLKEVWKPAV

SEQ ID NO: 42653 - protein, 978 aa, synthetic construct
  REGION 1..978: note = engineered CasX variant
QEIKRINKIRRRLVKDSNTKKAGKTGPMKTLLVRVMTPDLRERLENLRKKPENIPQPISNTSRANLNKLLTDYTEMKKAILHVYDEEFQKDPVGLMSRVAQPASKKIDQNKLKPEMDEKGNLTTAGFACSQCGQPLFVYKLEQVSEKGKAYTNYFGRCNVAEHEKLILLAQLKPEKDSDEAVTYSLGKFGQRALDFYSIHVTKESTHPVKPLAQIAGNRYASTPVGKALSDACMGTIASFLSKYQDIIIEHQKVVKGNQKRLESLRELAGKENLEYPSVTLPPQPHTKEGVDAYNEVIARVRMWVNLNLWQKLKLSRDDAKPLLRLKGFPSFPLVERQANEVDWWDMVCNVKKLINEKKEDGKVFWQNLAGYKRQEALRPYLSSEEDRKKGKKFARYQLGDLLNHLEKKHGEDWGKVYDEAWERIDKKVEGLSKHIKLEEERRSEDAQSKAALTDWLRAKASFVIEGLKEADKDEFCRCELKLQKWYGDLRGKPFAIEAENSILDISGFSKQYNCAFIWQKDGVKKLNLYLIINYFKGGKLRFKKIKPEAFEANRFYTVINKKSGEIVPMEVNFNFDDPNLIILPLAFGKRQGREFIWNDLLSLETGSLKLANGRVIEKTLYNRRTRQDEPALFVALTFERREVLDSSNIKPMNLIGVDRGENIPAVIALTDPEGCPLSRFKDSLGNPTHILRIGESYKEKQRTIQAKKEVEQRRAGGYSRKYASKAKNLADDMVRNTARDLLYYAVTQDAMLIFENLSRGFGRQGKRTFMAERQYTRMEDWLTAKLAYEGLPSKTYLSKTLAQYTSKTCSNCGFTITSADYDRVLEKLKKTATGWMTTINGKELKVEGQITYYNRYKRQNVVKDLSVELDRLSEESVNNDISSWTKGRSGEALSLLKKRFSHRPVQEKFVCLNCGFETHADEQAALNIARSWLFLRSQEYKKYQTNKTTGNTDKRAFVETWQSFYRKKLKEVWKPAV

SEQ ID NO: 42654 - protein, 978 aa, synthetic construct
  REGION 1..978: note = engineered CasX variant
QEIKRINKIRRRLVKDSNTKKAGKTGPMKTLLVRVMTPDLRERLENLRKKPENIPQPISNTSRANLNKLLTDYTEMKKAILHVYDEEFQKDPVGLMSRVAQPASKKIDQNKLKPEMDEKGNLTTAGFACSQCGQPLFVYKLEQVSEKGKAYTNYFGRCNVAEHEKLILLAQLKPEKDSDEAVTYSLGKFGQRALDFYSIHVTKESTHPVKPLAQIAGNRYASAPVGKALSDACMGTIASFLSKYQDIIIEHQKVVKGNQKRLESLRELAGKENLEYPSVTLPPQPHTKEGVDAYNEVIARVRMWVNLNLWQKLKLSRDDAKPLLRLKGFPSFPLVERQANEVDWWDMVCNVKKLINEKKEDGKVFWQNLAGYKRQEALRPYLSSEEDRKKGKKFARYQLGDLLNHLEKKHGEDWGKVYDEAWERIDKKVEGLSKHIKLEEERRSEDAQSKAALTDWLRAKASFVIEGLKEADKDEFCRCELKLQKWYGDLRGKPFAIEAENSILDISGFSKQYNCAFIWQKDGVKKLNLYLIINYFKGGKLRFKKIKPEAFEANRFYTVINKKSGEIVPMEVNFNFDDPNLIILPLAFGKRQGREFIWNDLLSLETGSLKLANGRVIEKTLYNRRTRQDEPALFVALTFERREVLDSSNIKPMNLIGVDRGENIPAVIALTDPEGCPLSRFKDSLGNPTHILRIGESYKEKQRTIQAKKEVEQRRAGGYSRKYASKAKNLADDMVRNTARDLLYYAVTQDAMLIFENLSRGFGRQGKRTFMAERQYTRMEDWLTAKLAYEGLPSKTYLSKTLAQYTSKTCSNCGFTITSADYDRVLEKLKKTATGWMTTINGKELKVEGQITYYNRYKRQNVVKDLSVELDRLSEESVNNDISSWTKGRSGEALSLLKKRFSHRPVQEKFVCLNCGFETHADEQAALNIARSWLFLRSQEYKKYQTNKTTGNTDKRAFVETWQSFYRKKLKEVWKPAV

SEQ ID NO: 42655 - protein, 978 aa, synthetic construct
  REGION 1..978: note = engineered CasX variant
QEIKRINKIRRRLVKDSNTKKAGKTGPMKTLLVRVMTPDLRERLENLRKKPENIPQPISNTSRANLNKLLTDYTEMKKAILHVYDEEFQKDPVGLMSRVAQPASKKIDQNKLKPEMDEKGNLTTAGFACSQCGQPLFVYKLEQVSEKGKAYTNYFGRCNVAEHEKLILLAQLKPEKDSDEAVTYSLGKFGQRALDFYSIHVTKESTHPVKPLAQIAGNRYASVPVGKALSDACMGTIASFLSKYQDIIIEHQKVVKGNQKRLESLRELAGKENLEYPSVTLPPQPHTKEGVDAYNEVIARVRMWVNLNLWQKLKLSRDDAKPLLRLKGFPSFPLVERQANEVDWWDMVCNVKKLINEKKEDGKVFWQNLAGYKRQEALRPYLSSEEDRKKGKKFARYQLGDLLNHLEKKHGEDWGKVYDEAWERIDKKVEGLSKHIKLEEERRSEDAQSKAALTDWLRAKASFVIEGLKEADKDEFCRCELKLQKWYGDLRGKPFAIEAENSILDISGFSKQYNCAFIWQKDGVKKLNLYLIINYFKGGKLRFKKIKPEAFEANRFYTVINKKSGEIVPMEVNFNFDDPNLIILPLAFGKRQGREFIWNDLLSLETGSLKLANGRVIEKTLYNRRTRQDEPALFVALTFERREVLDSSNIKPMNLIGVDRGENIPAVIALTDPEGCPLSRFKDSLGNPTHILRIGESYKEKQRTIQAKKEVEQRRAGGYSRKYASKAKNLADDMVRNTARDLLYYAVTQDAMLIFENLSRGFGRQGKRTFMAERQYTRMEDWLTAKLAYEGLPSKTYLSKTLAQYTSKTCSNCGFTITSADYDRVLEKLKKTATGWMTTINGKELKVEGQITYYNRYKRQNVVKDLSVELDRLSEESVNNDISSWTKGRSGEALSLLKKRFSHRPVQEKFVCLNCGFETHADEQAALNIARSWLFLRSQEYKKYQTNKTTGNTDKRAFVETWQSFYRKKLKEVWKPAV

SEQ ID NO: 42656 - protein, 978 aa, synthetic construct
  REGION 1..978: note = engineered CasX variant
QEIKRINKIRRRLVKDSNTKKAGKTGPMKTLLVRVMTPDLRERLENLRKKPENIPQPISNTSRANLNKLLTDYTEMKKAILHVYDEEFQKDPVGLMSRVAQPASKKIDQNKLKPEMDEKGNLTTAGFACSQCGQPLFVYKLEQVSEKGKAYTNYFGRCNVAEHEKLIKLAQLKPEKDSDEAVTYSLGKFGQRALDFYSIHVTKESTHPVKPLAQIAGNRYASGPVGKALSDACMGTIASFLSKYQDIIIEHQKVVKGNQKRLESLRELAGKENLEYPSVTLPPQPHTKEGVDAYNEVIARVRMWVNLNLWQKLKLSRDDAKPLLRLKGFPSFPLVERQANEVDWWDMVCNVKKLINEKKEDGKVFWQNLAGYKRQEALRPYLSSEEDRKKGKKFARYQLGDLLNHLEKKHGEDWGKVYDEAWERIDKKVEGLSKHIKLEEERRSEDAQSKAALTDWLRAKASFVIEGLKEADKDEFCRCELKLQKWYGDLRGKPFAIEAENSILDISGFSKQYNCAFIWQKDGVKKLNLYLIINYFKGGKLRFKKIKPEAFEANRFYTVINKKSGEIVPMEVNFNFDDPNLIILPLAFGKRQGREFIWNDLLSLETGSLKLANGRVIEKTLYNRRTRQDEPALFVALTFERREVLDSSNIKPMNLIGVDRGENIPAVIALTDPEGCPLSRFKDSLGNPTHILRIGESYKEKQRTIQAKKEVEQRRAGGYSRKYASKAKNLADDMVRNTARDLLYYAVTQDAMLIFENLSRGFGRQGKRTFMAERQYTRMEDWLTAKLAYEGLPSKTYLSKTLAQYTSKTCSNCGFTITSADYDRVLEKLKKTATGWMTTINGKELKVEGQITYYNRYKRQNVVKDLSVELDRLSEESVNNDISSWTKGRSGEALSLLKKRFSHRPVQEKFVCLNCGFETHADEQAALNIARSWLFLRSQEYKKYQTNKTTGNTDKRAFVETWQSFYRKKLKEVWKPAV

SEQ ID NO: 42657 - protein, 977 aa, synthetic construct
  REGION 1..977: note = engineered CasX variant
QEIKRINKIRRRLVKDSNTKKAGKTGPMKTLLVRVMTPDLRERLENLRKKPENIPQPISNTSRANLNKLLTDYTEMKKAILHVYDEEFQKDPVGLMSRVAQPASKKIDQNKLKPEMDEKGNLTTAGFACSQCGQPLFVYKLEQVSEKGKAYTNYFGRCNVAEHEKLILLAQLKPEKDSDEAVTYSLGKFGQRALDFYSIHVTKESTHPVKPLAQIAGNRYASPVGKALSDACMGTIASFLSKYQDIIIEHQKVVKGNQKRLESLRELAGKENLEYPSVTLPPQPHTKEGVDAYNEVIARVRMWVNLNLWQKLKLSRDDAKPLLRLKGFPSFPLVERQANEVDWWDMVCNVKKLINEKKEDGKVFWQNLAGYKRQEALRPYLSSEEDRKKGKKFARYQLGDLLNHLEKKHGEDWGKVYDEAWERIDKKVEGLSKHIKLEEERRSEDAQSKAALTDWLRAKASFVIEGLKEADKDEFCRCELKLQKWYGDLRGKPFAIEAENSILDISGFSKQYNCAFIWQKDGVKKLNLYLIINYFKGGKLRFKKIKPEAFEANRFYTVINKKSGEIVPMEVNFNFDDPNLIILPLAFGKRQGREFIWNDLLSLETGSLKLANGRVIEKTLYNRRTRQDEPALFVALTFERREVLDSSNIKPMNLIGVDRGENIPAVIALTDPEGCPLSRFKDSLGNPTHILRIGESYKEKQRTIQAKKEVEQRRAGGYSRKYASKAKNLADDMVRNTARDLLYYAVTQDAMLIFENLSRGFGRQGKRTFMAERQYTRMEDWLTAKLAYEGLPSKTYLSKTLAQYTSKTCSNCGFTITSADYDRVLEKLKKTATGWMTTINGKELKVEGQITYYNRYKRQNVVKDLSVELDRLSEESVNNDISSWTKGRSGEALSLLKKRFSHRPVQEKFVCLNCGFETHADEQAALNIARSWLFLRSQEYKKYQTNKTTGNTDKRAFVETWQSFYRKKLKEVWKPAV

SEQ ID NO: 42658 - protein, 978 aa, synthetic construct
  REGION 1..978: note = engineered CasX variant
QEIKRINKIRRRLVKDSNTKKAGKTGPMKTLLVRVMTPDLRERLENLRKKPENIPQPISNTSRANLNKLLTDYTEMKKAILHVYDEEFQKDPVGLMSRVAQPASKKIDQNKLKPEMDEKGNLTTAGFACSQCGQPLFVYKLEQVSEKGKAYTNYFGRCNVAEHEKLILLAQLKPEKDSDEAVTYSLGKFGQRALDFYSIHVTKESTHPVKPLAQIAGNRYASYPVGKALSDACMGTIASFLSKYQDIIIEHQKVVKGNQKRLESLRELAGKENLEYPSVTLPPQPHTKEGVDAYNEVIARVRMWVNLNLWQKLKLSRDDAKPLLRLKGFPSFPLVERQANEVDWWDMVCNVKKLINEKKEDGKVFWQNLAGYKRQEALRPYLSSEEDRKKGKKFARYQLGDLLWHLEKKHGEDWGKVYDEAWERIDKKVEGLSKHIKLEEERRSEDAQSKAALTDWLRAKASFVIEGLKEADKDEFCRCELKLQKWYGDLRGKPFAIEAENSILDISGFSKQYNCAFIWQKDGVKKLNLYLIINYFKGGKLRFKKIKPEAFEANRFYTVINKKSGEIVPMEVNFNFDDPNLIILPLAFGKRQGREFIWNDLLSLETGSLKLANGRVIEKTLYNRRTRQDEPALFVALTFERREVLDSSNIKPMNLIGVDRGENIPAVIALTDPEGCPLSRFKDSLGNPTHILRIGESYKEKQRTIQAKKEVEQRRAGGYSRKYASKAKNLADDMVRNTARDLLYYAVTQDAMLIFENLSRGFGRQGKRTFMAERQYTRMEDWLTAKLAYEGLPSKTYLSKTLAQYTSKTCSNCGFTITSADYDRVLEKLKKTATGWMTTINGKELKVEGQITYYNRYKRQNVVKDLSVELDRLSEESVNNDISSWTKGRSGEALSLLKKRFSHRPVQEKFVCLNCGFETHADEQAALNIARSWLFLRSQEYKKYQTNKTTGNTDKRAFVETWQSFYRKKLKEVWKPAV

SEQ ID NO: 42659 - protein, 978 aa, synthetic construct
  REGION 1..978: note = engineered CasX variant
QEIKRINKIRRRLVKDSNTKKAGKTGPMKTLLVRVMTPDLRERLENLRKKPENIPQPISNTSRANLNKLLTDYTEMKKAILHVYDEEFQKDPVGLMSRVAQPASKKIDQNKLKPEMDEKGNLTTAGFACSQCGQPLFVYKLEQVSEKGKAYTNYFGRCNVAEHEKLILLAQLKPEKDSDEAVTYSLGKFGQRALDFYSIHVTKESTHPVKPLAQIAGNRYASHPVGKALSDACMGTIASFLSKYQDIIIEHQKVVKGNQKRLESLRELAGKENLEYPSVTLPPQPHTKEGVDAYNEVIARVRMWVNLNLWQKLKLSRDDAKPLLRLKGFPSFPLVERQANEVDWWDMVCNVKKLINEKKEDGKVFWQNLAGYKRQEALRPYLSSEEDRKKGKKFARYQLGDLLWHLEKKHGEDWGKVYDEAWERIDKKVEGLSKHIKLEEERRSEDAQSKAALTDWLRAKASFVIEGLKEADKDEFCRCELKLQKWYGDLRGKPFAIEAENSILDISGFSKQYNCAFIWQKDGVKKLNLYLIINYFKGGKLRFKKIKPEAFEANRFYTVINKKSGEIVPMEVNFNFDDPNLIILPLAFGKRQGREFIWNDLLSLETGSLKLANGRVIEKTLYNRRTRQDEPALFVALTFERREVLDSSNIKPMNLIGVDRGENIPAVIALTDPEGCPLSRFKDSLGNPTHILRIGESYKEKQRTIQAKKEVEQRRAGGYSRKYASKAKNLADDMVRNTARDLLYYAVTQDAMLIFENLSRGFGRQGKRTFMAERQYTRMEDWLTAKLAYEGLPSKTYLSKTLAQYTSKTCSNCGFTITSADYDRVLEKLKKTATGWMTTINGKELKVEGQITYYNRYKRQNVVKDLSVELDRLSEESVNNDISSWTKGRSGEALSLLKKRFSHRPVQEKFVCLNCGFETHADEQAALNIARSWLFLRSQEYKKYQTNKTTGNTDKRAFVETWQSFYRKKLKEVWKPAV

SEQ ID NO: 42660 - protein, 978 aa, synthetic construct
  REGION 1..978: note = engineered CasX variant
QEIKRINKIRRRLVKDSNTKKAGKTGPMKTLLVRVMTPDLRERLENLRKKPENIPQPISNTSRANLNKLLTDYTEMKKAILHVYDEEFQKDPVGLMSRVAQPASKKIDQNKLKPEMDEKGNLTTAGFACSQCGQPLFVYKLEQVSEKGKAYTNYFGRCNVAEHEKLILLAQLKPEKDSDEAVTYSLGKFGQRALDFYSIHVTKESTHPVKPLAQIAGNRYASSPVGKALSDACMGTIASFLSKYQDIIIEHQKVVKGNQKRLESLRELAGKENLEYPSVTLPPQPHTKEGVDAYNEVIARVRMWVNLNLWQKLKLSRDDAKPLLRLKGFPSFPLVERQANEVDWWDMVCNVKKLINEKKEDGKVFWQNLAGYKRQEALRPYLSSEEDRKKGKKFARYQLGDLLWHLEKKHGEDWGKVYDEAWERIDKKVEGLSKHIKLEEERRSEDAQSKAALTDWLRAKASFVIEGLKEADKDEFCRCELKLQKWYGDLRGKPFAIEAENSILDISGFSKQYNCAFIWQKDGVKKLNLYLIINYFKGGKLRFKKIKPEAFEANRFYTVINKKSGEIVPMEVNFNFDDPNLIILPLAFGKRQGREFIWNDLLSLETGSLKLANGRVIEKTLYNRRTRQDEPALFVALTFERREVLDSSNIKPMNLIGVDRGENIPAVIALTDPEGCPLSRFKDSLGNPTHILRIGESYKEKQRTIQAKKEVEQRRAGGYSRKYASKAKNLADDMVRNTARDLLYYAVTQDAMLIFENLSRGFGRQGKRTFMAERQYTRMEDWLTAKLAYEGLPSKTYLSKTLAQYTSKTCSNCGFTITSADYDRVLEKLKKTATGWMTTINGKELKVEGQITYYNRYKRQNVVKDLSVELDRLSEESVNNDISSWTKGRSGEALSLLKKRFSHRPVQEKFVCLNCGFETHADEQAALNIARSWLFLRSQEYKKYQTNKTTGNTDKRAFVETWQSFYRKKLKEVWKPAV

SEQ ID NO: 42661 - protein, 978 aa, synthetic construct
  REGION 1..978: note = engineered CasX variant
QEIKRINKIRRRLVKDSNTKKAGKTGPMKTLLVRVMTPDLRERLENLRKKPENIPQPISNTSRANLNKLLTDYTEMKKAILHVYDEEFQKDPVGLMSRVAQPASKKIDQNKLKPEMDEKGNLTTAGFACSQCGQPLFVYKLEQVSEKGKAYTNYFGRCNVAEHEKLILLAQLKPEKDSDEAVTYSLGKFGQRALDFYSIHVTKESTHPVKPLAQIAGNRYASTPVGKALSDACMGTIASFLSKYQDIIIEHQKVVKGNQKRLESLRELAGKENLEYPSVTLPPQPHTKEGVDAYNEVIARVRMWVNLNLWQKLKLSRDDAKPLLRLKGFPSFPLVERQANEVDWWDMVCNVKKLINEKKEDGKVFWQNLAGYKRQEALRPYLSSEEDRKKGKKFARYQLGDLLWHLEKKHGEDWGKVYDEAWERIDKKVEGLSKHIKLEEERRSEDAQSKAALTDWLRAKASFVIEGLKEADKDEFCRCELKLQKWYGDLRGKPFAIEAENSILDISGFSKQYNCAFIWQKDGVKKLNLYLIINYFKGGKLRFKKIKPEAFEANRFYTVINKKSGEIVPMEVNFNFDDPNLIILPLAFGKRQGREFIWNDLLSLETGSLKLANGRVIEKTLYNRRTRQDEPALFVALTFERREVLDSSNIKPMNLIGVDRGENIPAVIALTDPEGCPLSRFKDSLGNPTHILRIGESYKEKQRTIQAKKEVEQRRAGGYSRKYASKAKNLADDMVRNTARDLLYYAVTQDAMLIFENLSRGFGRQGKRTFMAERQYTRMEDWLTAKLAYEGLPSKTYLSKTLAQYTSKTCSNCGFTITSADYDRVLEKLKKTATGWMTTINGKELKVEGQITYYNRYKRQNVVKDLSVELDRLSEESVNNDISSWTKGRSGEALSLLKKRFSHRPVQEKFVCLNCGFETHADEQAALNIARSWLFLRSQEYKKYQTNKTTGNTDKRAFVETWQSFYRKKLKEVWKPAV

SEQ ID NO: 42662 - protein, 978 aa, synthetic construct
  REGION 1..978: note = engineered CasX variant
QEIKRINKIRRRLVKDSNTKKAGKTGPMKTLLVRVMTPDLRERLENLRKKPENIPQPISNTSRANLNKLLTDYTEMKKAILHVYDEEFQKDPVGLMSRVAQPASKKIDQNKLKPEMDEKGNLTTAGFACSQCGQPLFVYKLEQVSEKGKAYTNYFGRCNVAEHEKLILLAQLKPEKDSDEAVTYSLGKFGQRALDFYSIHVTKESTHPVKPLAQIAGNRYASAPVGKALSDACMGTIASFLSKYQDIIIEHQKVVKGNQKRLESLRELAGKENLEYPSVTLPPQPHTKEGVDAYNEVIARVRMWVNLNLWQKLKLSRDDAKPLLRLKGFPSFPLVERQANEVDWWDMVCNVKKLINEKKEDGKVFWQNLAGYKRQEALRPYLSSEEDRKKGKKFARYQLGDLLWHLEKKHGEDWGKVYDEAWERIDKKVEGLSKHIKLEEERRSEDAQSKAALTDWLRAKASFVIEGLKEADKDEFCRCELKLQKWYGDLRGKPFAIEAENSILDISGFSKQYNCAFIWQKDGVKKLNLYLIINYFKGGKLRFKKIKPEAFEANRFYTVINKKSGEIVPMEVNFNFDDPNLIILPLAFGKRQGREFIWNDLLSLETGSLKLANGRVIEKTLYNRRTRQDEPALFVALTFERREVLDSSNIKPMNLIGVDRGENIPAVIALTDPEGCPLSRFKDSLGNPTHILRIGESYKEKQRTIQAKKEVEQRRAGGYSRKYASKAKNLADDMVRNTARDLLYYAVTQDAMLIFENLSRGFGRQGKRTFMAERQYTRMEDWLTAKLAYEGLPSKTYLSKTLAQYTSKTCSNCGFTITSADYDRVLEKLKKTATGWMTTINGKELKVEGQITYYNRYKRQNVVKDLSVELDRLSEESVNNDISSWTKGRSGEALSLLKKRFSHRPVQEKFVCLNCGFETHADEQAALNIARSWLFLRSQEYKKYQTNKTTGNTDKRAFVETWQSFYRKKLKEVWKPAV

SEQ ID NO: 42663 - protein, 978 aa, synthetic construct
  REGION 1..978: note = engineered CasX variant
QEIKRINKIRRRLVKDSNTKKAGKTGPMKTLLVRVMTPDLRERLENLRKKPENIPQPISNTSRANLNKLLTDYTEMKKAILHVYDEEFQKDPVGLMSRVAQPASKKIDQNKLKPEMDEKGNLTTAGFACSQCGQPLFVYKLEQVSEKGKAYTNYFGRCNVAEHEKLILLAQLKPEKDSDEAVTYSLGKFGQRALDFYSIHVTKESTHPVKPLAQIAGNRYASVPVGKALSDACMGTIASFLSKYQDIIIEHQKVVKGNQKRLESLRELAGKENLEYPSVTLPPQPHTKEGVDAYNEVIARVRMWVNLNLWQKLKLSRDDAKPLLRLKGFPSFPLVERQANEVDWWDMVCNVKKLINEKKEDGKVFWQNLAGYKRQEALRPYLSSEEDRKKGKKFARYQLGDLLWHLEKKHGEDWGKVYDEAWERIDKKVEGLSKHIKLEEERRSEDAQSKAALTDWLRAKASFVIEGLKEADKDEFCRCELKLQKWYGDLRGKPFAIEAENSILDISGFSKQYNCAFIWQKDGVKKLNLYLIINYFKGGKLRFKKIKPEAFEANRFYTVINKKSGEIVPMEVNFNFDDPNLIILPLAFGKRQGREFIWNDLLSLETGSLKLANGRVIEKTLYNRRTRQDEPALFVALTFERREVLDSSNIKPMNLIGVDRGENIPAVIALTDPEGCPLSRFKDSLGNPTHILRIGESYKEKQRTIQAKKEVEQRRAGGYSRKYASKAKNLADDMVRNTARDLLYYAVTQDAMLIFENLSRGFGRQGKRTFMAERQYTRMEDWLTAKLAYEGLPSKTYLSKTLAQYTSKTCSNCGFTITSADYDRVLEKLKKTATGWMTTINGKELKVEGQITYYNRYKRQNVVKDLSVELDRLSEESVNNDISSWTKGRSGEALSLLKKRFSHRPVQEKFVCLNCGFETHADEQAALNIARSWLFLRSQEYKKYQTNKTTGNTDKRAFVETWQSFYRKKLKEVWKPAV

SEQ ID NO: 42664 - protein, 978 aa, synthetic construct
  REGION 1..978: note = engineered CasX variant
QEIKRINKIRRRLVKDSNTKKAGKTGPMKTLLVRVMTPDLRERLENLRKKPENIPQPISNTSRANLNKLLTDYTEMKKAILHVYDEEFQKDPVGLMSRVAQPASKKIDQNKLKPEMDEKGNLTTAGFACSQCGQPLFVYKLEQVSEKGKAYTNYFGRCNVAEHEKLIKLAQLKPEKDSDEAVTYSLGKFGQRALDFYSIHVTKESTHPVKPLAQIAGNRYASGPVGKALSDACMGTIASFLSKYQDIIIEHQKVVKGNQKRLESLRELAGKENLEYPSVTLPPQPHTKEGVDAYNEVIARVRMWVNLNLWQKLKLSRDDAKPLLRLKGFPSFPLVERQANEVDWWDMVCNVKKLINEKKEDGKVFWQNLAGYKRQEALRPYLSSEEDRKKGKKFARYQLGDLLWHLEKKHGEDWGKVYDEAWERIDKKVEGLSKHIKLEEERRSEDAQSKAALTDWLRAKASFVIEGLKEADKDEFCRCELKLQKWYGDLRGKPFAIEAENSILDISGFSKQYNCAFIWQKDGVKKLNLYLIINYFKGGKLRFKKIKPEAFEANRFYTVINKKSGEIVPMEVNFNFDDPNLIILPLAFGKRQGREFIWNDLLSLETGSLKLANGRVIEKTLYNRRTRQDEPALFVALTFERREVLDSSNIKPMNLIGVDRGENIPAVIALTDPEGCPLSRFKDSLGNPTHILRIGESYKEKQRTIQAKKEVEQRRAGGYSRKYASKAKNLADDMVRNTARDLLYYAVTQDAMLIFENLSRGFGRQGKRTFMAERQYTRMEDWLTAKLAYEGLPSKTYLSKTLAQYTSKTCSNCGFTITSADYDRVLEKLKKTATGWMTTINGKELKVEGQITYYNRYKRQNVVKDLSVELDRLSEESVNNDISSWTKGRSGEALSLLKKRFSHRPVQEKFVCLNCGFETHADEQAALNIARSWLFLRSQEYKKYQTNKTTGNTDKRAFVETWQSFYRKKLKEVWKPAV

SEQ ID NO: 42665 - protein, 977 aa, synthetic construct
  REGION 1..977: note = engineered CasX variant
QEIKRINKIRRRLVKDSNTKKAGKTGPMKTLLVRVMTPDLRERLENLRKKPENIPQPISNTSRANLNKLLTDYTEMKKAILHVYDEEFQKDPVGLMSRVAQPASKKIDQNKLKPEMDEKGNLTTAGFACSQCGQPLFVYKLEQVSEKGKAYTNYFGRCNVAEHEKLILLAQLKPEKDSDEAVTYSLGKFGQRALDFYSIHVTKESTHPVKPLAQIAGNRYASPVGKALSDACMGTIASFLSKYQDIIIEHQKVVKGNQKRLESLRELAGKENLEYPSVTLPPQPHTKEGVDAYNEVIARVRMWVNLNLWQKLKLSRDDAKPLLRLKGFPSFPLVERQANEVDWWDMVCNVKKLINEKKEDGKVFWQNLAGYKRQEALRPYLSSEEDRKKGKKFARYQLGDLLWHLEKKHGEDWGKVYDEAWERIDKKVEGLSKHIKLEEERRSEDAQSKAALTDWLRAKASFVIEGLKEADKDEFCRCELKLQKWYGDLRGKPFAIEAENSILDISGFSKQYNCAFIWQKDGVKKLNLYLIINYFKGGKLRFKKIKPEAFEANRFYTVINKKSGEIVPMEVNFNFDDPNLIILPLAFGKRQGREFIWNDLLSLETGSLKLANGRVIEKTLYNRRTRQDEPALFVALTFERREVLDSSNIKPMNLIGVDRGENIPAVIALTDPEGCPLSRFKDSLGNPTHILRIGESYKEKQRTIQAKKEVEQRRAGGYSRKYASKAKNLADDMVRNTARDLLYYAVTQDAMLIFENLSRGFGRQGKRTFMAERQYTRMEDWLTAKLAYEGLPSKTYLSKTLAQYTSKTCSNCGFTITSADYDRVLEKLKKTATGWMTTINGKELKVEGQITYYNRYKRQNVVKDLSVELDRLSEESVNNDISSWTKGRSGEALSLLKKRFSHRPVQEKFVCLNCGFETHADEQAALNIARSWLFLRSQEYKKYQTNKTTGNTDKRAFVETWQSFYRKKLKEVWKPAV

SEQ ID NO: 42666 - protein, 978 aa, synthetic construct
  REGION 1..978: note = engineered CasX variant
QEIKRINKIRRRLVKDSNTKKAGKTGPMKTLLVRVMTPDLRERLENLRKKPENIPQPISNTSRANLNKLLTDYTEMKKAILHVYDEEFQKDPVGLMSRVAQPASKKIDQNKLKPEMDEKGNLTTAGFACSQCGQPLFVYKLEQVSEKGKAYTNYFGRCNVAEHEKLILLAQLKPEKDSDEAVTYSLGKFGQRALDFYSIHVTKESTHPVKPLAQIAGNRYASYPVGKALSDACMGTIASFLSKYQDIIIEHQKVVKGNQKRLESLRELAGKENLEYPSVTLPPQPHTKEGVDAYNEVIARVRMWVNLNLWQKLKLSRDDAKPLLRLKGFPSFPLVERQANEVDWWDMVCNVKKLINEKKEDGKVFWQNLAGYKRQEALRPYLSSEEDRKKGKKFARYQLGDLLLHLYKKHGEDWGKVYDEAWERIDKKVEGLSKHIKLEEERRSEDAQSKAALTDWLRAKASFVIEGLKEADKDEFCRCELKLQKWYGDLRGKPFAIEAENSILDISGFSKQYNCAFIWQKDGVKKLNLYLIINYFKGGKLRFKKIKPEAFEANRFYTVINKKSGEIVPMEVNFNFDDPNLIILPLAFGKRQGREFIWNDLLSLETGSLKLANGRVIEKTLYNRRTRQDEPALFVALTFERREVLDSSNIKPMNLIGVDRGENIPAVIALTDPEGCPLSRFKDSLGNPTHILRIGESYKEKQRTIQAKKEVEQRRAGGYSRKYASKAKNLADDMVRNTARDLLYYAVTQDAMLIFENLSRGFGRQGKRTFMAERQYTRMEDWLTAKLAYEGLPSKTYLSKTLAQYTSKTCSNCGFTITSADYDRVLEKLKKTATGWMTTINGKELKVEGQITYYNRYKRQNVVKDLSVELDRLSEESVNNDISSWTKGRSGEALSLLKKRFSHRPVQEKFVCLNCGFETHADEQAALNIARSWLFLRSQEYKKYQTNKTTGNTDKRAFVETWQSFYRKKLKEVWKPAV

SEQ ID NO: 42667 - protein, 978 aa, synthetic construct
  REGION 1..978: note = engineered CasX variant
QEIKRINKIRRRLVKDSNTKKAGKTGPMKTLLVRVMTPDLRERLENLRKKPENIPQPISNTSRANLNKLLTDYTEMKKAILHVYDEEFQKDPVGLMSRVAQPASKKIDQNKLKPEMDEKGNLTTAGFACSQCGQPLFVYKLEQVSEKGKAYTNYFGRCNVAEHEKLILLAQLKPEKDSDEAVTYSLGKFGQRALDFYSIHVTKESTHPVKPLAQIAGNRYASHPVGKALSDACMGTIASFLSKYQDIIIEHQKVVKGNQKRLESLRELAGKENLEYPSVTLPPQPHTKEGVDAYNEVIARVRMWVNLNLWQKLKLSRDDAKPLLRLKGFPSFPLVERQANEVDWWDMVCNVKKLINEKKEDGKVFWQNLAGYKRQEALRPYLSSEEDRKKGKKFARYQLGDLLLHLYKKHGEDWGKVYDEAWERIDKKVEGLSKHIKLEEERRSEDAQSKAALTDWLRAKASFVIEGLKEADKDEFCRCELKLQKWYGDLRGKPFAIEAENSILDISGFSKQYNCAFIWQKDGVKKLNLYLIINYFKGGKLRFKKIKPEAFEANRFYTVINKKSGEIVPMEVNFNFDDPNLIILPLAFGKRQGREFIWNDLLSLETGSLKLANGRVIEKTLYNRRTRQDEPALFVALTFERREVLDSSNIKPMNLIGVDRGENIPAVIALTDPEGCPLSRFKDSLGNPTHILRIGESYKEKQRTIQAKKEVEQRRAGGYSRKYASKAKNLADDMVRNTARDLLYYAVTQDAMLIFENLSRGFGRQGKRTFMAERQYTRMEDWLTAKLAYEGLPSKTYLSKTLAQYTSKTCSNCGFTITSADYDRVLEKLKKTATGWMTTINGKELKVEGQITYYNRYKRQNVVKDLSVELDRLSEESVNNDISSWTKGRSGEALSLLKKRFSHRPVQEKFVCLNCGFETHADEQAALNIARSWLFLRSQEYKKYQTNKTTGNTDKRAFVETWQSFYRKKLKEVWKPAV

SEQ ID NO: 42668 - protein, 978 aa, synthetic construct
  REGION 1..978: note = engineered CasX variant
QEIKRINKIRRRLVKDSNTKKAGKTGPMKTLLVRVMTPDLRERLENLRKKPENIPQPISNTSRANLNKLLTDYTEMKKAILHVYDEEFQKDPVGLMSRVAQPASKKIDQNKLKPEMDEKGNLTTAGFACSQCGQPLFVYKLEQVSEKGKAYTNYFGRCNVAEHEKLILLAQLKPEKDSDEAVTYSLGKFGQRALDFYSIHVTKESTHPVKPLAQIAGNRYASSPVGKALSDACMGTIASFLSKYQDIIIEHQKVVKGNQKRLESLRELAGKENLEYPSVTLPPQPHTKEGVDAYNEVIARVRMWVNLNLWQKLKLSRDDAKPLLRLKGFPSFPLVERQANEVDWWDMVCNVKKLINEKKEDGKVFWQNLAGYKRQEALRPYLSSEEDRKKGKKFARYQLGDLLLHLYKKHGEDWGKVYDEAWERIDKKVEGLSKHIKLEEERRSEDAQSKAALTDWLRAKASFVIEGLKEADKDEFCRCELKLQKWYGDLRGKPFAIEAENSILDISGFSKQYNCAFIWQKDGVKKLNLYLIINYFKGGKLRFKKIKPEAFEANRFYTVINKKSGEIVPMEVNFNFDDPNLIILPLAFGKRQGREFIWNDLLSLETGSLKLANGRVIEKTLYNRRTRQDEPALFVALTFERREVLDSSNIKPMNLIGVDRGENIPAVIALTDPEGCPLSRFKDSLGNPTHILRIGESYKEKQRTIQAKKEVEQRRAGGYSRKYASKAKNLADDMVRNTARDLLYYAVTQDAMLIFENLSRGFGRQGKRTFMAERQYTRMEDWLTAKLAYEGLPSKTYLSKTLAQYTSKTCSNCGFTITSADYDRVLEKLKKTATGWMTTINGKELKVEGQITYYNRYKRQNVVKDLSVELDRLSEESVNNDISSWTKGRSGEALSLLKKRFSHRPVQEKFVCLNCGFETHADEQAALNIARSWLFLRSQEYKKYQTNKTTGNTDKRAFVETWQSFYRKKLKEVWKPAV

SEQ ID NO: 42669 - protein, 978 aa, synthetic construct
  REGION 1..978: note = engineered CasX variant
QEIKRINKIRRRLVKDSNTKKAGKTGPMKTLLVRVMTPDLRERLENLRKKPENIPQPISNTSRANLNKLLTDYTEMKKAILHVYDEEFQKDPVGLMSRVAQPASKKIDQNKLKPEMDEKGNLTTAGFACSQCGQPLFVYKLEQVSEKGKAYTNYFGRCNVAEHEKLILLAQLKPEKDSDEAVTYSLGKFGQRALDFYSIHVTKESTHPVKPLAQIAGNRYASTPVGKALSDACMGTIASFLSKYQDIIIEHQKVVKGNQKRLESLRELAGKENLEYPSVTLPPQPHTKEGVDAYNEVIARVRMWVNLNLWQKLKLSRDDAKPLLRLKGFPSFPLVERQANEVDWWDMVCNVKKLINEKKEDGKVFWQNLAGYKRQEALRPYLSSEEDRKKGKKFARYQLGDLLLHLYKKHGEDWGKVYDEAWERIDKKVEGLSKHIKLEEERRSEDAQSKAALTDWLRAKASFVIEGLKEADKDEFCRCELKLQKWYGDLRGKPFAIEAENSILDISGFSKQYNCAFIWQKDGVKKLNLYLIINYFKGGKLRFKKIKPEAFEANRFYTVINKKSGEIVPMEVNFNFDDPNLIILPLAFGKRQGREFIWNDLLSLETGSLKLANGRVIEKTLYNRRTRQDEPALFVALTFERREVLDSSNIKPMNLIGVDRGENIPAVIALTDPEGCPLSRFKDSLGNPTHILRIGESYKEKQRTIQAKKEVEQRRAGGYSRKYASKAKNLADDMVRNTARDLLYYAVTQDAMLIFENLSRGFGRQGKRTFMAERQYTRMEDWLTAKLAYEGLPSKTYLSKTLAQYTSKTCSNCGFTITSADYDRVLEKLKKTATGWMTTINGKELKVEGQITYYNRYKRQNVVKDLSVELDRLSEESVNNDISSWTKGRSGEALSLLKKRFSHRPVQEKFVCLNCGFETHADEQAALNIARSWLFLRSQEYKKYQTNKTTGNTDKRAFVETWQSFYRKKLKEVWKPAV

SEQ ID NO: 42670 - protein, 978 aa, synthetic construct
  REGION 1..978: note = engineered CasX variant
QEIKRINKIRRRLVKDSNTKKAGKTGPMKTLLVRVMTPDLRERLENLRKKPENIPQPISNTSRANLNKLLTDYTEMKKAILHVYDEEFQKDPVGLMSRVAQPASKKIDQNKLKPEMDEKGNLTTAGFACSQCGQPLFVYKLEQVSEKGKAYTNYFGRCNVAEHEKLILLAQLKPEKDSDEAVTYSLGKFGQRALDFYSIHVTKESTHPVKPLAQIAGNRYASAPVGKALSDACMGTIASFLSKYQDIIIEHQKVVKGNQKRLESLRELAGKENLEYPSVTLPPQPHTKEGVDAYNEVIARVRMWVNLNLWQKLKLSRDDAKPLLRLKGFPSFPLVERQANEVDWWDMVCNVKKLINEKKEDGKVFWQNLAGYKRQEALRPYLSSEEDRKKGKKFARYQLGDLLLHLYKKHGEDWGKVYDEAWERIDKKVEGLSKHIKLEEERRSEDAQSKAALTDWLRAKASFVIEGLKEADKDEFCRCELKLQKWYGDLRGKPFAIEAENSILDISGFSKQYNCAFIWQKDGVKKLNLYLIINYFKGGKLRFKKIKPEAFEANRFYTVINKKSGEIVPMEVNFNFDDPNLIILPLAFGKRQGREFIWNDLLSLETGSLKLANGRVIEKTLYNRRTRQDEPALFVALTFERREVLDSSNIKPMNLIGVDRGENIPAVIALTDPEGCPLSRFKDSLGNPTHILRIGESYKEKQRTIQAKKEVEQRRAGGYSRKYASKAKNLADDMVRNTARDLLYYAVTQDAMLIFENLSRGFGRQGKRTFMAERQYTRMEDWLTAKLAYEGLPSKTYLSKTLAQYTSKTCSNCGFTITSADYDRVLEKLKKTATGWMTTINGKELKVEGQITYYNRYKRQNVVKDLSVELDRLSEESVNNDISSWTKGRSGEALSLLKKRFSHRPVQEKFVCLNCGFETHADEQAALNIARSWLFLRSQEYKKYQTNKTTGNTDKRAFVETWQSFYRKKLKEVWKPAV

SEQ ID NO: 42671 - protein, 978 aa, synthetic construct
  REGION 1..978: note = engineered CasX variant
QEIKRINKIRRRLVKDSNTKKAGKTGPMKTLLVRVMTPDLRERLENLRKKPENIPQPISNTSRANLNKLLTDYTEMKKAILHVYDEEFQKDPVGLMSRVAQPASKKIDQNKLKPEMDEKGNLTTAGFACSQCGQPLFVYKLEQVSEKGKAYTNYFGRCNVAEHEKLILLAQLKPEKDSDEAVTYSLGKFGQRALDFYSIHVTKESTHPVKPLAQIAGNRYASVPVGKALSDACMGTIASFLSKYQDIIIEHQKVVKGNQKRLESLRELAGKENLEYPSVTLPPQPHTKEGVDAYNEVIARVRMWVNLNLWQKLKLSRDDAKPLLRLKGFPSFPLVERQANEVDWWDMVCNVKKLINEKKEDGKVFWQNLAGYKRQEALRPYLSSEEDRKKGKKFARYQLGDLLLHLYKKHGEDWGKVYDEAWERIDKKVEGLSKHIKLEEERRSEDAQSKAALTDWLRAKASFVIEGLKEADKDEFCRCELKLQKWYGDLRGKPFAIEAENSILDISGFSKQYNCAFIWQKDGVKKLNLYLIINYFKGGKLRFKKIKPEAFEANRFYTVINKKSGEIVPMEVNFNFDDPNLIILPLAFGKRQGREFIWNDLLSLETGSLKLANGRVIEKTLYNRRTRQDEPALFVALTFERREVLDSSNIKPMNLIGVDRGENIPAVIALTDPEGCPLSRFKDSLGNPTHILRIGESYKEKQRTIQAKKEVEQRRAGGYSRKYASKAKNLADDMVRNTARDLLYYAVTQDAMLIFENLSRGFGRQGKRTFMAERQYTRMEDWLTAKLAYEGLPSKTYLSKTLAQYTSKTCSNCGFTITSADYDRVLEKLKKTATGWMTTINGKELKVEGQITYYNRYKRQNVVKDLSVELDRLSEESVNNDISSWTKGRSGEALSLLKKRFSHRPVQEKFVCLNCGFETHADEQAALNIARSWLFLRSQEYKKYQTNKTTGNTDKRAFVETWQSFYRKKLKEVWKPAV

SEQ ID NO: 42672 - protein, 978 aa, synthetic construct
  REGION 1..978: note = engineered CasX variant
QEIKRINKIRRRLVKDSNTKKAGKTGPMKTLLVRVMTPDLRERLENLRKKPENIPQPISNTSRANLNKLLTDYTEMKKAILHVYDEEFQKDPVGLMSRVAQPASKKIDQNKLKPEMDEKGNLTTAGFACSQCGQPLFVYKLEQVSEKGKAYTNYFGRCNVAEHEKLIKLAQLKPEKDSDEAVTYSLGKFGQRALDFYSIHVTKESTHPVKPLAQIAGNRYASGPVGKALSDACMGTIASFLSKYQDIIIEHQKVVKGNQKRLESLRELAGKENLEYPSVTLPPQPHTKEGVDAYNEVIARVRMWVNLNLWQKLKLSRDDAKPLLRLKGFPSFPLVERQANEVDWWDMVCNVKKLINEKKEDGKVFWQNLAGYKRQEALRPYLSSEEDRKKGKKFARYQLGDLLLHLYKKHGEDWGKVYDEAWERIDKKVEGLSKHIKLEEERRSEDAQSKAALTDWLRAKASFVIEGLKEADKDEFCRCELKLQKWYGDLRGKPFAIEAENSILDISGFSKQYNCAFIWQKDGVKKLNLYLIINYFKGGKLRFKKIKPEAFEANRFYTVINKKSGEIVPMEVNFNFDDPNLIILPLAFGKRQGREFIWNDLLSLETGSLKLANGRVIEKTLYNRRTRQDEPALFVALTFERREVLDSSNIKPMNLIGVDRGENIPAVIALTDPEGCPLSRFKDSLGNPTHILRIGESYKEKQRTIQAKKEVEQRRAGGYSRKYASKAKNLADDMVRNTARDLLYYAVTQDAMLIFENLSRGFGRQGKRTFMAERQYTRMEDWLTAKLAYEGLPSKTYLSKTLAQYTSKTCSNCGFTITSADYDRVLEKLKKTATGWMTTINGKELKVEGQITYYNRYKRQNVVKDLSVELDRLSEESVNNDISSWTKGRSGEALSLLKKRFSHRPVQEKFVCLNCGFETHADEQAALNIARSWLFLRSQEYKKYQTNKTTGNTDKRAFVETWQSFYRKKLKEVWKPAV

SEQ ID NO: 42673 - protein, 977 aa, synthetic construct
  REGION 1..977: note = engineered CasX variant
QEIKRINKIRRRLVKDSNTKKAGKTGPMKTLLVRVMTPDLRERLENLRKKPENIPQPISNTSRANLNKLLTDYTEMKKAILHVYDEEFQKDPVGLMSRVAQPASKKIDQNKLKPEMDEKGNLTTAGFACSQCGQPLFVYKLEQVSEKGKAYTNYFGRCNVAEHEKLILLAQLKPEKDSDEAVTYSLGKFGQRALDFYSIHVTKESTHPVKPLAQIAGNRYASPVGKALSDACMGTIASFLSKYQDIIIEHQKVVKGNQKRLESLRELAGKENLEYPSVTLPPQPHTKEGVDAYNEVIARVRMWVNLNLWQKLKLSRDDAKPLLRLKGFPSFPLVERQANEVDWWDMVCNVKKLINEKKEDGKVFWQNLAGYKRQEALRPYLSSEEDRKKGKKFARYQLGDLLLHLYKKHGEDWGKVYDEAWERIDKKVEGLSKHIKLEEERRSEDAQSKAALTDWLRAKASFVIEGLKEADKDEFCRCELKLQKWYGDLRGKPFAIEAENSILDISGFSKQYNCAFIWQKDGVKKLNLYLIINYFKGGKLRFKKIKPEAFEANRFYTVINKKSGEIVPMEVNFNFDDPNLIILPLAFGKRQGREFIWNDLLSLETGSLKLANGRVIEKTLYNRRTRQDEPALFVALTFERREVLDSSNIKPMNLIGVDRGENIPAVIALTDPEGCPLSRFKDSLGNPTHILRIGESYKEKQRTIQAKKEVEQRRAGGYSRKYASKAKNLADDMVRNTARDLLYYAVTQDAMLIFENLSRGFGRQGKRTFMAERQYTRMEDWLTAKLAYEGLPSKTYLSKTLAQYTSKTCSNCGFTITSADYDRVLEKLKKTATGWMTTINGKELKVEGQITYYNRYKRQNVVKDLSVELDRLSEESVNNDISSWTKGRSGEALSLLKKRFSHRPVQEKFVCLNCGFETHADEQAALNIARSWLFLRSQEYKKYQTNKTTGNTDKRAFVETWQSFYRKKLKEVWKPAV

SEQ ID NO: 42674 - protein, 978 aa, synthetic construct
  REGION 1..978: note = engineered CasX variant
QEIKRINKIRRRLVKDSNTKKAGKTGPMKTLLVRVMTPDLRERLENLRKKPENIPQPISNTSRANLNKLLTDYTEMKKAILHVYDEEFQKDPVGLMSRVAQPASKKIDQNKLKPEMDEKGNLTTAGFACSQCGQPLFVYKLEQVSEKGKAYTNYFGRCNVAEHEKLILLAQLKPEKDSDEAVTYSLGKFGQRALDFYSIHVTKESTHPVKPLAQIAGNRYASYPVGKALSDACMGTIASFLSKYQDIIIEHQKVVKGNQKRLESLRELAGKENLEYPSVTLPPQPHTKEGVDAYNEVIARVRMWVNLNLWQKLKLSRDDAKPLLRLKGFPSFPLVERQANEVDWWDMVCNVKKLINEKKEDGKVFWQNLAGYKRQEALRPYLSSEEDRKKGKKFARYQLGDLLLHLEKKHPEDWGKVYDEAWERIDKKVEGLSKHIKLEEERRSEDAQSKAALTDWLRAKASFVIEGLKEADKDEFCRCELKLQKWYGDLRGKPFAIEAENSILDISGFSKQYNCAFIWQKDGVKKLNLYLIINYFKGGKLRFKKIKPEAFEANRFYTVINKKSGEIVPMEVNFNFDDPNLIILPLAFGKRQGREFIWNDLLSLETGSLKLANGRVIEKTLYNRRTRQDEPALFVALTFERREVLDSSNIKPMNLIGVDRGENIPAVIALTDPEGCPLSRFKDSLGNPTHILRIGESYKEKQRTIQAKKEVEQRRAGGYSRKYASKAKNLADDMVRNTARDLLYYAVTQDAMLIFENLSRGFGRQGKRTFMAERQYTRMEDWLTAKLAYEGLPSKTYLSKTLAQYTSKTCSNCGFTITSADYDRVLEKLKKTATGWMTTINGKELKVEGQITYYNRYKRQNVVKDLSVELDRLSEESVNNDISSWTKGRSGEALSLLKKRFSHRPVQEKFVCLNCGFETHADEQAALNIARSWLFLRSQEYKKYQTNKTTGNTDKRAFVETWQSFYRKKLKEVWKPAV

SEQ ID NO: 42675 - protein, 978 aa, synthetic construct
  REGION 1..978: note = engineered CasX variant
QEIKRINKIRRRLVKDSNTKKAGKTGPMKTLLVRVMTPDLRERLENLRKKPENIPQPISNTSRANLNKLLTDYTEMKKAILHVYDEEFQKDPVGLMSRVAQPASKKIDQNKLKPEMDEKGNLTTAGFACSQCGQPLFVYKLEQVSEKGKAYTNYFGRCNVAEHEKLILLAQLKPEKDSDEAVTYSLGKFGQRALDFYSIHVTKESTHPVKPLAQIAGNRYASHPVGKALSDACMGTIASFLSKYQDIIIEHQKVVKGNQKRLESLRELAGKENLEYPSVTLPPQPHTKEGVDAYNEVIARVRMWVNLNLWQKLKLSRDDAKPLLRLKGFPSFPLVERQANEVDWWDMVCNVKKLINEKKEDGKVFWQNLAGYKRQEALRPYLSSEEDRKKGKKFARYQLGDLLLHLEKKHPEDWGKVYDEAWERIDKKVEGLSKHIKLEEERRSEDAQSKAALTDWLRAKASFVIEGLKEADKDEFCRCELKLQKWYGDLRGKPFAIEAENSILDISGFSKQYNCAFIWQKDGVKKLNLYLIINYFKGGKLRFKKIKPEAFEANRFYTVINKKSGEIVPMEVNFNFDDPNLIILPLAFGKRQGREFIWNDLLSLETGSLKLANGRVIEKTLYNRRTRQDEPALFVALTFERREVLDSSNIKPMNLIGVDRGENIPAVIALTDPEGCPLSRFKDSLGNPTHILRIGESYKEKQRTIQAKKEVEQRRAGGYSRKYASKAKNLADDMVRNTARDLLYYAVTQDAMLIFENLSRGFGRQGKRTFMAERQYTRMEDWLTAKLAYEGLPSKTYLSKTLAQYTSKTCSNCGFTITSADYDRVLEKLKKTATGWMTTINGKELKVEGQITYYNRYKRQNVVKDLSVELDRLSEESVNNDISSWTKGRSGEALSLLKKRFSHRPVQEKFVCLNCGFETHADEQAALNIARSWLFLRSQEYKKYQTNKTTGNTDKRAFVETWQSFYRKKLKEVWKPAV

SEQ ID NO: 42676 - protein, 978 aa, synthetic construct
  REGION 1..978: note = engineered CasX variant
QEIKRINKIRRRLVKDSNTKKAGKTGPMKTLLVRVMTPDLRERLENLRKKPENIPQPISNTSRANLNKLLTDYTEMKKAILHVYDEEFQKDPVGLMSRVAQPASKKIDQNKLKPEMDEKGNLTTAGFACSQCGQPLFVYKLEQVSEKGKAYTNYFGRCNVAEHEKLILLAQLKPEKDSDEAVTYSLGKFGQRALDFYSIHVTKESTHPVKPLAQIAGNRYASSPVGKALSDACMGTIASFLSKYQDIIIEHQKVVKGNQKRLESLRELAGKENLEYPSVTLPPQPHTKEGVDAYNEVIARVRMWVNLNLWQKLKLSRDDAKPLLRLKGFPSFPLVERQANEVDWWDMVCNVKKLINEKKEDGKVFWQNLAGYKRQEALRPYLSSEEDRKKGKKFARYQLGDLLLHLEKKHPEDWGKVYDEAWERIDKKVEGLSKHIKLEEERRSEDAQSKAALTDWLRAKASFVIEGLKEADKDEFCRCELKLQKWYGDLRGKPFAIEAENSILDISGFSKQYNCAFIWQKDGVKKLNLYLIINYFKGGKLRFKKIKPEAFEANRFYTVINKKSGEIVPMEVNFNFDDPNLIILPLAFGKRQGREFIWNDLLSLETGSLKLANGRVIEKTLYNRRTRQDEPALFVALTFERREVLDSSNIKPMNLIGVDRGENIPAVIALTDPEGCPLSRFKDSLGNPTHILRIGESYKEKQRTIQAKKEVEQRRAGGYSRKYASKAKNLADDMVRNTARDLLYYAVTQDAMLIFENLSRGFGRQGKRTFMAERQYTRMEDWLTAKLAYEGLPSKTYLSKTLAQYTSKTCSNCGFTITSADYDRVLEKLKKTATGWMTTINGKELKVEGQITYYNRYKRQNVVKDLSVELDRLSEESVNNDISSWTKGRSGEALSLLKKRFSHRPVQEKFVCLNCGFETHADEQAALNIARSWLFLRSQEYKKYQTNKTTGNTDKRAFVETWQSFYRKKLKEVWKPAV

SEQ ID NO: 42677 - protein, 978 aa, synthetic construct
  REGION 1..978: note = engineered CasX variant
QEIKRINKIRRRLVKDSNTKKAGKTGPMKTLLVRVMTPDLRERLENLRKKPENIPQPISNTSRANLNKLLTDYTEMKKAILHVYDEEFQKDPVGLMSRVAQPASKKIDQNKLKPEMDEKGNLTTAGFACSQCGQPLFVYKLEQVSEKGKAYTNYFGRCNVAEHEKLILLAQLKPEKDSDEAVTYSLGKFGQRALDFYSIHVTKESTHPVKPLAQIAGNRYASTPVGKALSDACMGTIASFLSKYQDIIIEHQKVVKGNQKRLESLRELAGKENLEYPSVTLPPQPHTKEGVDAYNEVIARVRMWVNLNLWQKLKLSRDDAKPLLRLKGFPSFPLVERQANEVDWWDMVCNVKKLINEKKEDGKVFWQNLAGYKRQEALRPYLSSEEDRKKGKKFARYQLGDLLLHLEKKHPEDWGKVYDEAWERIDKKVEGLSKHIKLEEERRSEDAQSKAALTDWLRAKASFVIEGLKEADKDEFCRCELKLQKWYGDLRGKPFAIEAENSILDISGFSKQYNCAFIWQKDGVKKLNLYLIINYFKGGKLRFKKIKPEAFEANRFYTVINKKSGEIVPMEVNFNFDDPNLIILPLAFGKRQGREFIWNDLLSLETGSLKLANGRVIEKTLYNRRTRQDEPALFVALTFERREVLDSSNIKPMNLIGVDRGENIPAVIALTDPEGCPLSRFKDSLGNPTHILRIGESYKEKQRTIQAKKEVEQRRAGGYSRKYASKAKNLADDMVRNTARDLLYYAVTQDAMLIFENLSRGFGRQGKRTFMAERQYTRMEDWLTAKLAYEGLPSKTYLSKTLAQYTSKTCSNCGFTITSADYDRVLEKLKKTATGWMTTINGKELKVEGQITYYNRYKRQNVVKDLSVELDRLSEESVNNDISSWTKGRSGEALSLLKKRFSHRPVQEKFVCLNCGFETHADEQAALNIARSWLFLRSQEYKKYQTNKTTGNTDKRAFVETWQSFYRKKLKEVWKPAV

SEQ ID NO: 42678 - protein, 978 aa, synthetic construct
  REGION 1..978: note = engineered CasX variant
QEIKRINKIRRRLVKDSNTKKAGKTGPMKTLLVRVMTPDLRERLENLRKKPENIPQPISNTSRANLNKLLTDYTEMKKAILHVYDEEFQKDPVGLMSRVAQPASKKIDQNKLKPEMDEKGNLTTAGFACSQCGQPLFVYKLEQVSEKGKAYTNYFGRCNVAEHEKLILLAQLKPEKDSDEAVTYSLGKFGQRALDFYSIHVTKESTHPVKPLAQIAGNRYASAPVGKALSDACMGTIASFLSKYQDIIIEHQKVVKGNQKRLESLRELAGKENLEYPSVTLPPQPHTKEGVDAYNEVIARVRMWVNLNLWQKLKLSRDDAKPLLRLKGFPSFPLVERQANEVDWWDMVCNVKKLINEKKEDGKVFWQNLAGYKRQEALRPYLSSEEDRKKGKKFARYQLGDLLLHLEKKHPEDWGKVYDEAWERIDKKVEGLSKHIKLEEERRSEDAQSKAALTDWLRAKASFVIEGLKEADKDEFCRCELKLQKWYGDLRGKPFAIEAENSILDISGFSKQYNCAFIWQKDGVKKLNLYLIINYFKGGKLRFKKIKPEAFEANRFYTVINKKSGEIVPMEVNFNFDDPNLIILPLAFGKRQGREFIWNDLLSLETGSLKLANGRVIEKTLYNRRTRQDEPALFVALTFERREVLDSSNIKPMNLIGVDRGENIPAVIALTDPEGCPLSRFKDSLGNPTHILRIGESYKEKQRTIQAKKEVEQRRAGGYSRKYASKAKNLADDMVRNTARDLLYYAVTQDAMLIFENLSRGFGRQGKRTFMAERQYTRMEDWLTAKLAYEGLPSKTYLSKTLAQYTSKTCSNCGFTITSADYDRVLEKLKKTATGWMTTINGKELKVEGQITYYNRYKRQNVVKDLSVELDRLSEESVNNDISSWTKGRSGEALSLLKKRFSHRPVQEKFVCLNCGFETHADEQAALNIARSWLFLRSQEYKKYQTNKTTGNTDKRAFVETWQSFYRKKLKEVWKPAV

SEQ ID NO: 42679 - protein, 978 aa, synthetic construct
  REGION 1..978: note = engineered CasX variant
QEIKRINKIRRRLVKDSNTKKAGKTGPMKTLLVRVMTPDLRERLENLRKKPENIPQPISNTSRANLNKLLTDYTEMKKAILHVYDEEFQKDPVGLMSRVAQPASKKIDQNKLKPEMDEKGNLTTAGFACSQCGQPLFVYKLEQVSEKGKAYTNYFGRCNVAEHEKLILLAQLKPEKDSDEAVTYSLGKFGQRALDFYSIHVTKESTHPVKPLAQIAGNRYASVPVGKALSDACMGTIASFLSKYQDIIIEHQKVVKGNQKRLESLRELAGKENLEYPSVTLPPQPHTKEGVDAYNEVIARVRMWVNLNLWQKLKLSRDDAKPLLRLKGFPSFPLVERQANEVDWWDMVCNVKKLINEKKEDGKVFWQNLAGYKRQEALRPYLSSEEDRKKGKKFARYQLGDLLLHLEKKHPEDWGKVYDEAWERIDKKVEGLSKHIKLEEERRSEDAQSKAALTDWLRAKASFVIEGLKEADKDEFCRCELKLQKWYGDLRGKPFAIEAENSILDISGFSKQYNCAFIWQKDGVKKLNLYLIINYFKGGKLRFKKIKPEAFEANRFYTVINKKSGEIVPMEVNFNFDDPNLIILPLAFGKRQGREFIWNDLLSLETGSLKLANGRVIEKTLYNRRTRQDEPALFVALTFERREVLDSSNIKPMNLIGVDRGENIPAVIALTDPEGCPLSRFKDSLGNPTHILRIGESYKEKQRTIQAKKEVEQRRAGGYSRKYASKAKNLADDMVRNTARDLLYYAVTQDAMLIFENLSRGFGRQGKRTFMAERQYTRMEDWLTAKLAYEGLPSKTYLSKTLAQYTSKTCSNCGFTITSADYDRVLEKLKKTATGWMTTINGKELKVEGQITYYNRYKRQNVVKDLSVELDRLSEESVNNDISSWTKGRSGEALSLLKKRFSHRPVQEKFVCLNCGFETHADEQAALNIARSWLFLRSQEYKKYQTNKTTGNTDKRAFVETWQSFYRKKLKEVWKPAV

SEQ ID NO: 42680 - protein, 978 aa, synthetic construct
  REGION 1..978: note = engineered CasX variant
QEIKRINKIRRRLVKDSNTKKAGKTGPMKTLLVRVMTPDLRERLENLRKKPENIPQPISNTSRANLNKLLTDYTEMKKAILHVYDEEFQKDPVGLMSRVAQPASKKIDQNKLKPEMDEKGNLTTAGFACSQCGQPLFVYKLEQVSEKGKAYTNYFGRCNVAEHEKLIKLAQLKPEKDSDEAVTYSLGKFGQRALDFYSIHVTKESTHPVKPLAQIAGNRYASGPVGKALSDACMGTIASFLSKYQDIIIEHQKVVKGNQKRLESLRELAGKENLEYPSVTLPPQPHTKEGVDAYNEVIARVRMWVNLNLWQKLKLSRDDAKPLLRLKGFPSFPLVERQANEVDWWDMVCNVKKLINEKKEDGKVFWQNLAGYKRQEALRPYLSSEEDRKKGKKFARYQLGDLLLHLEKKHPEDWGKVYDEAWERIDKKVEGLSKHIKLEEERRSEDAQSKAALTDWLRAKASFVIEGLKEADKDEFCRCELKLQKWYGDLRGKPFAIEAENSILDISGFSKQYNCAFIWQKDGVKKLNLYLIINYFKGGKLRFKKIKPEAFEANRFYTVINKKSGEIVPMEVNFNFDDPNLIILPLAFGKRQGREFIWNDLLSLETGSLKLANGRVIEKTLYNRRTRQDEPALFVALTFERREVLDSSNIKPMNLIGVDRGENIPAVIALTDPEGCPLSRFKDSLGNPTHILRIGESYKEKQRTIQAKKEVEQRRAGGYSRKYASKAKNLADDMVRNTARDLLYYAVTQDAMLIFENLSRGFGRQGKRTFMAERQYTRMEDWLTAKLAYEGLPSKTYLSKTLAQYTSKTCSNCGFTITSADYDRVLEKLKKTATGWMTTINGKELKVEGQITYYNRYKRQNVVKDLSVELDRLSEESVNNDISSWTKGRSGEALSLLKKRFSHRPVQEKFVCLNCGFETHADEQAALNIARSWLFLRSQEYKKYQTNKTTGNTDKRAFVETWQSFYRKKLKEVWKPAV

SEQ ID NO: 42681 - protein, 977 aa, synthetic construct
  REGION 1..977: note = engineered CasX variant
QEIKRINKIRRRLVKDSNTKKAGKTGPMKTLLVRVMTPDLRERLENLRKKPENIPQPISNTSRANLNKLLTDYTEMKKAILHVYDEEFQKDPVGLMSRVAQPASKKIDQNKLKPEMDEKGNLTTAGFACSQCGQPLFVYKLEQVSEKGKAYTNYFGRCNVAEHEKLILLAQLKPEKDSDEAVTYSLGKFGQRALDFYSIHVTKESTHPVKPLAQIAGNRYASPVGKALSDACMGTIASFLSKYQDIIIEHQKVVKGNQKRLESLRELAGKENLEYPSVTLPPQPHTKEGVDAYNEVIARVRMWVNLNLWQKLKLSRDDAKPLLRLKGFPSFPLVERQANEVDWWDMVCNVKKLINEKKEDGKVFWQNLAGYKRQEALRPYLSSEEDRKKGKKFARYQLGDLLLHLEKKHPEDWGKVYDEAWERIDKKVEGLSKHIKLEEERRSEDAQSKAALTDWLRAKASFVIEGLKEADKDEFCRCELKLQKWYGDLRGKPFAIEAENSILDISGFSKQYNCAFIWQKDGVKKLNLYLIINYFKGGKLRFKKIKPEAFEANRFYTVINKKSGEIVPMEVNFNFDDPNLIILPLAFGKRQGREFIWNDLLSLETGSLKLANGRVIEKTLYNRRTRQDEPALFVALTFERREVLDSSNIKPMNLIGVDRGENIPAVIALTDPEGCPLSRFKDSLGNPTHILRIGESYKEKQRTIQAKKEVEQRRAGGYSRKYASKAKNLADDMVRNTARDLLYYAVTQDAMLIFENLSRGFGRQGKRTFMAERQYTRMEDWLTAKLAYEGLPSKTYLSKTLAQYTSKTCSNCGFTITSADYDRVLEKLKKTATGWMTTINGKELKVEGQITYYNRYKRQNVVKDLSVELDRLSEESVNNDISSWTKGRSGEALSLLKKRFSHRPVQEKFVCLNCGFETHADEQAALNIARSWLFLRSQEYKKYQTNKTTGNTDKRAFVETWQSFYRKKLKEVWKPAV

SEQ ID NO: 42682 - protein, 979 aa, synthetic construct
  REGION 1..979: note = engineered CasX variant
QEIKRINKIRRRLVKDSNTKKAGKTGPMKTLLVRVMTPDLRERLENLRKKPENIPQPISNTSRANLNKLLTDYTEMKKAILHVYDEEFQKDPVGLMSRVAQPASKKIDQNKLKPEMDEKGNLTTAGFACSQCGQPLFVYKLEQVSEKGKAYTNYFGRCNVAEHEKLILLAQLKPEKDSDEAVTYSLGKFGQRALDFYSIHVTKESTHPVKPLAQIAGNRYASYPVGKALSDACMGTIASFLSKYQDIIIEHQKVVKGNQKRLESLRELAGKENLEYPSVTLPPQPHTKEGVDAYNEVIARVRMWVNLNLWQKLKLSRDDAKPLLRLKGFPSFPLVERQANEVDWWDMVCNVKKLINEKKEDGKVFWQNLAGYKRQEALRPYLSSEEDRKKGKKFARYQLGDLLLHLEKKHGERDWGKVYDEAWERIDKKVEGLSKHIKLEEERRSEDAQSKAALTDWLRAKASFVIEGLKEADKDEFCRCELKLQKWYGDLRGKPFAIEAENSILDISGFSKQYNCAFIWQKDGVKKLNLYLIINYFKGGKLRFKKIKPEAFEANRFYTVINKKSGEIVPMEVNFNFDDPNLIILPLAFGKRQGREFIWNDLLSLETGSLKLANGRVIEKTLYNRRTRQDEPALFVALTFERREVLDSSNIKPMNLIGVDRGENIPAVIALTDPEGCPLSRFKDSLGNPTHILRIGESYKEKQRTIQAKKEVEQRRAGGYSRKYASKAKNLADDMVRNTARDLLYYAVTQDAMLIFENLSRGFGRQGKRTFMAERQYTRMEDWLTAKLAYEGLPSKTYLSKTLAQYTSKTCSNCGFTITSADYDRVLEKLKKTATGWMTTINGKELKVEGQITYYNRYKRQNVVKDLSVELDRLSEESVNNDISSWTKGRSGEALSLLKKRFSHRPVQEKFVCLNCGFETHADEQAALNIARSWLFLRSQEYKKYQTNKTTGNTDKRAFVETWQSFYRKKLKEVWKPAV

SEQ ID NO: 42683 - protein, 979 aa, synthetic construct
  REGION 1..979: note = engineered CasX variant
QEIKRINKIRRRLVKDSNTKKAGKTGPMKTLLVRVMTPDLRERLENLRKKPENIPQPISNTSRANLNKLLTDYTEMKKAILHVYDEEFQKDPVGLMSRVAQPASKKIDQNKLKPEMDEKGNLTTAGFACSQCGQPLFVYKLEQVSEKGKAYTNYFGRCNVAEHEKLILLAQLKPEKDSDEAVTYSLGKFGQRALDFYSIHVTKESTHPVKPLAQIAGNRYASHPVGKALSDACMGTIASFLSKYQDIIIEHQKVVKGNQKRLESLRELAGKENLEYPSVTLPPQPHTKEGVDAYNEVIARVRMWVNLNLWQKLKLSRDDAKPLLRLKGFPSFPLVERQANEVDWWDMVCNVKKLINEKKEDGKVFWQNLAGYKRQEALRPYLSSEEDRKKGKKFARYQLGDLLLHLEKKHGERDWGKVYDEAWERIDKKVEGLSKHIKLEEERRSEDAQSKAALTDWLRAKASFVIEGLKEADKDEFCRCELKLQKWYGDLRGKPFAIEAENSILDISGFSKQYNCAFIWQKDGVKKLNLYLIINYFKGGKLRFKKIKPEAFEANRFYTVINKKSGEIVPMEVNFNFDDPNLIILPLAFGKRQGREFIWNDLLSLETGSLKLANGRVIEKTLYNRRTRQDEPALFVALTFERREVLDSSNIKPMNLIGVDRGENIPAVIALTDPEGCPLSRFKDSLGNPTHILRIGESYKEKQRTIQAKKEVEQRRAGGYSRKYASKAKNLADDMVRNTARDLLYYAVTQDAMLIFENLSRGFGRQGKRTFMAERQYTRMEDWLTAKLAYEGLPSKTYLSKTLAQYTSKTCSNCGFTITSADYDRVLEKLKKTATGWMTTINGKELKVEGQITYYNRYKRQNVVKDLSVELDRLSEESVNNDISSWTKGRSGEALSLLKKRFSHRPVQEKFVCLNCGFETHADEQAALNIARSWLFLRSQEYKKYQTNKTTGNTDKRAFVETWQSFYRKKLKEVWKPAV

SEQ ID NO: 42684 - protein, 979 aa, synthetic construct
  REGION 1..979: note = engineered CasX variant
QEIKRINKIRRRLVKDSNTKKAGKTGPMKTLLVRVMTPDLRERLENLRKKPENIPQPISNTSRANLNKLLTDYTEMKKAILHVYDEEFQKDPVGLMSRVAQPASKKIDQNKLKPEMDEKGNLTTAGFACSQCGQPLFVYKLEQVSEKGKAYTNYFGRCNVAEHEKLILLAQLKPEKDSDEAVTYSLGKFGQRALDFYSIHVTKESTHPVKPLAQIAGNRYASSPVGKALSDACMGTIASFLSKYQDIIIEHQKVVKGNQKRLESLRELAGKENLEYPSVTLPPQPHTKEGVDAYNEVIARVRMWVNLNLWQKLKLSRDDAKPLLRLKGFPSFPLVERQANEVDWWDMVCNVKKLINEKKEDGKVFWQNLAGYKRQEALRPYLSSEEDRKKGKKFARYQLGDLLLHLEKKHGERDWGKVYDEAWERIDKKVEGLSKHIKLEEERRSEDAQSKAALTDWLRAKASFVIEGLKEADKDEFCRCELKLQKWYGDLRGKPFAIEAENSILDISGFSKQYNCAFIWQKDGVKKLNLYLIINYFKGGKLRFKKIKPEAFEANRFYTVINKKSGEIVPMEVNFNFDDPNLIILPLAFGKRQGREFIWNDLLSLETGSLKLANGRVIEKTLYNRRTRQDEPALFVALTFERREVLDSSNIKPMNLIGVDRGENIPAVIALTDPEGCPLSRFKDSLGNPTHILRIGESYKEKQRTIQAKKEVEQRRAGGYSRKYASKAKNLADDMVRNTARDLLYYAVTQDAMLIFENLSRGFGRQGKRTFMAERQYTRMEDWLTAKLAYEGLPSKTYLSKTLAQYTSKTCSNCGFTITSADYDRVLEKLKKTATGWMTTINGKELKVEGQITYYNRYKRQNVVKDLSVELDRLSEESVNNDISSWTKGRSGEALSLLKKRFSHRPVQEKFVCLNCGFETHADEQAALNIARSWLFLRSQEYKKYQTNKTTGNTDKRAFVETWQSFYRKKLKEVWKPAV

SEQ ID NO: 42685 - protein, 979 aa, synthetic construct
  REGION 1..979: note = engineered CasX variant
QEIKRINKIRRRLVKDSNTKKAGKTGPMKTLLVRVMTPDLRERLENLRKKPENIPQPISNTSRANLNKLLTDYTEMKKAILHVYDEEFQKDPVGLMSRVAQPASKKIDQNKLKPEMDEKGNLTTAGFACSQCGQPLFVYKLEQVSEKGKAYTNYFGRCNVAEHEKLILLAQLKPEKDSDEAVTYSLGKFGQRALDFYSIHVTKESTHPVKPLAQIAGNRYASTPVGKALSDACMGTIASFLSKYQDIIIEHQKVVKGNQKRLESLRELAGKENLEYPSVTLPPQPHTKEGVDAYNEVIARVRMWVNLNLWQKLKLSRDDAKPLLRLKGFPSFPLVERQANEVDWWDMVCNVKKLINEKKEDGKVFWQNLAGYKRQEALRPYLSSEEDRKKGKKFARYQLGDLLLHLEKKHGERDWGKVYDEAWERIDKKVEGLSKHIKLEEERRSEDAQSKAALTDWLRAKASFVIEGLKEADKDEFCRCELKLQKWYGDLRGKPFAIEAENSILDISGFSKQYNCAFIWQKDGVKKLNLYLIINYFKGGKLRFKKIKPEAFEANRFYTVINKKSGEIVPMEVNFNFDDPNLIILPLAFGKRQGREFIWNDLLSLETGSLKLANGRVIEKTLYNRRTRQDEPALFVALTFERREVLDSSNIKPMNLIGVDRGENIPAVIALTDPEGCPLSRFKDSLGNPTHILRIGESYKEKQRTIQAKKEVEQRRAGGYSRKYASKAKNLADDMVRNTARDLLYYAVTQDAMLIFENLSRGFGRQGKRTFMAERQYTRMEDWLTAKLAYEGLPSKTYLSKTLAQYTSKTCSNCGFTITSADYDRVLEKLKKTATGWMTTINGKELKVEGQITYYNRYKRQNVVKDLSVELDRLSEESVNNDISSWTKGRSGEALSLLKKRFSHRPVQEKFVCLNCGFETHADEQAALNIARSWLFLRSQEYKKYQTNKTTGNTDKRAFVETWQSFYRKKLKEVWKPAV

SEQ ID NO: 42686 - protein, 979 aa, synthetic construct
  REGION 1..979: note = engineered CasX variant
QEIKRINKIRRRLVKDSNTKKAGKTGPMKTLLVRVMTPDLRERLENLRKKPENIPQPISNTSRANLNKLLTDYTEMKKAILHVYDEEFQKDPVGLMSRVAQPASKKIDQNKLKPEMDEKGNLTTAGFACSQCGQPLFVYKLEQVSEKGKAYTNYFGRCNVAEHEKLILLAQLKPEKDSDEAVTYSLGKFGQRALDFYSIHVTKESTHPVKPLAQIAGNRYASAPVGKALSDACMGTIASFLSKYQDIIIEHQKVVKGNQKRLESLRELAGKENLEYPSVTLPPQPHTKEGVDAYNEVIARVRMWVNLNLWQKLKLSRDDAKPLLRLKGFPSFPLVERQANEVDWWDMVCNVKKLINEKKEDGKVFWQNLAGYKRQEALRPYLSSEEDRKKGKKFARYQLGDLLLHLEKKHGERDWGKVYDEAWERIDKKVEGLSKHIKLEEERRSEDAQSKAALTDWLRAKASFVIEGLKEADKDEFCRCELKLQKWYGDLRGKPFAIEAENSILDISGFSKQYNCAFIWQKDGVKKLNLYLIINYFKGGKLRFKKIKPEAFEANRFYTVINKKSGEIVPMEVNFNFDDPNLIILPLAFGKRQGREFIWNDLLSLETGSLKLANGRVIEKTLYNRRTRQDEPALFVALTFERREVLDSSNIKPMNLIGVDRGENIPAVIALTDPEGCPLSRFKDSLGNPTHILRIGESYKEKQRTIQAKKEVEQRRAGGYSRKYASKAKNLADDMVRNTARDLLYYAVTQDAMLIFENLSRGFGRQGKRTFMAERQYTRMEDWLTAKLAYEGLPSKTYLSKTLAQYTSKTCSNCGFTITSADYDRVLEKLKKTATGWMTTINGKELKVEGQITYYNRYKRQNVVKDLSVELDRLSEESVNNDISSWTKGRSGEALSLLKKRFSHRPVQEKFVCLNCGFETHADEQAALNIARSWLFLRSQEYKKYQTNKTTGNTDKRAFVETWQSFYRKKLKEVWKPAV

SEQ ID NO: 42687 - protein, 979 aa, synthetic construct
  REGION 1..979: note = engineered CasX variant
QEIKRINKIRRRLVKDSNTKKAGKTGPMKTLLVRVMTPDLRERLENLRKKPENIPQPISNTSRANLNKLLTDYTEMKKAILHVYDEEFQKDPVGLMSRVAQPASKKIDQNKLKPEMDEKGNLTTAGFACSQCGQPLFVYKLEQVSEKGKAYTNYFGRCNVAEHEKLILLAQLKPEKDSDEAVTYSLGKFGQRALDFYSIHVTKESTHPVKPLAQIAGNRYASVPVGKALSDACMGTIASFLSKYQDIIIEHQKVVKGNQKRLESLRELAGKENLEYPSVTLPPQPHTKEGVDAYNEVIARVRMWVNLNLWQKLKLSRDDAKPLLRLKGFPSFPLVERQANEVDWWDMVCNVKKLINEKKEDGKVFWQNLAGYKRQEALRPYLSSEEDRKKGKKFARYQLGDLLLHLEKKHGERDWGKVYDEAWERIDKKVEGLSKHIKLEEERRSEDAQSKAALTDWLRAKASFVIEGLKEADKDEFCRCELKLQKWYGDLRGKPFAIEAENSILDISGFSKQYNCAFIWQKDGVKKLNLYLIINYFKGGKLRFKKIKPEAFEANRFYTVINKKSGEIVPMEVNFNFDDPNLIILPLAFGKRQGREFIWNDLLSLETGSLKLANGRVIEKTLYNRRTRQDEPALFVALTFERREVLDSSNIKPMNLIGVDRGENIPAVIALTDPEGCPLSRFKDSLGNPTHILRIGESYKEKQRTIQAKKEVEQRRAGGYSRKYASKAKNLADDMVRNTARDLLYYAVTQDAMLIFENLSRGFGRQGKRTFMAERQYTRMEDWLTAKLAYEGLPSKTYLSKTLAQYTSKTCSNCGFTITSADYDRVLEKLKKTATGWMTTINGKELKVEGQITYYNRYKRQNVVKDLSVELDRLSEESVNNDISSWTKGRSGEALSLLKKRFSHRPVQEKFVCLNCGFETHADEQAALNIARSWLFLRSQEYKKYQTNKTTGNTDKRAFVETWQSFYRKKLKEVWKPAV

SEQ ID NO: 42688 - protein, 979 aa, synthetic construct
  REGION 1..979: note = engineered CasX variant
QEIKRINKIRRRLVKDSNTKKAGKTGPMKTLLVRVMTPDLRERLENLRKKPENIPQPISNTSRANLNKLLTDYTEMKKAILHVYDEEFQKDPVGLMSRVAQPASKKIDQNKLKPEMDEKGNLTTAGFACSQCGQPLFVYKLEQVSEKGKAYTNYFGRCNVAEHEKLIKLAQLKPEKDSDEAVTYSLGKFGQRALDFYSIHVTKESTHPVKPLAQIAGNRYASGPVGKALSDACMGTIASFLSKYQDIIIEHQKVVKGNQKRLESLRELAGKENLEYPSVTLPPQPHTKEGVDAYNEVIARVRMWVNLNLWQKLKLSRDDAKPLLRLKGFPSFPLVERQANEVDWWDMVCNVKKLINEKKEDGKVFWQNLAGYKRQEALRPYLSSEEDRKKGKKFARYQLGDLLLHLEKKHGERDWGKVYDEAWERIDKKVEGLSKHIKLEEERRSEDAQSKAALTDWLRAKASFVIEGLKEADKDEFCRCELKLQKWYGDLRGKPFAIEAENSILDISGFSKQYNCAFIWQKDGVKKLNLYLIINYFKGGKLRFKKIKPEAFEANRFYTVINKKSGEIVPMEVNFNFDDPNLIILPLAFGKRQGREFIWNDLLSLETGSLKLANGRVIEKTLYNRRTRQDEPALFVALTFERREVLDSSNIKPMNLIGVDRGENIPAVIALTDPEGCPLSRFKDSLGNPTHILRIGESYKEKQRTIQAKKEVEQRRAGGYSRKYASKAKNLADDMVRNTARDLLYYAVTQDAMLIFENLSRGFGRQGKRTFMAERQYTRMEDWLTAKLAYEGLPSKTYLSKTLAQYTSKTCSNCGFTITSADYDRVLEKLKKTATGWMTTINGKELKVEGQITYYNRYKRQNVVKDLSVELDRLSEESVNNDISSWTKGRSGEALSLLKKRFSHRPVQEKFVCLNCGFETHADEQAALNIARSWLFLRSQEYKKYQTNKTTGNTDKRAFVETWQSFYRKKLKEVWKPAV

SEQ ID NO: 42689 - protein, 978 aa, synthetic construct
  REGION 1..978: note = engineered CasX variant
QEIKRINKIRRRLVKDSNTKKAGKTGPMKTLLVRVMTPDLRERLENLRKKPENIPQPISNTSRANLNKLLTDYTEMKKAILHVYDEEFQKDPVGLMSRVAQPASKKIDQNKLKPEMDEKGNLTTAGFACSQCGQPLFVYKLEQVSEKGKAYTNYFGRCNVAEHEKLILLAQLKPEKDSDEAVTYSLGKFGQRALDFYSIHVTKESTHPVKPLAQIAGNRYASPVGKALSDACMGTIASFLSKYQDIIIEHQKVVKGNQKRLESLRELAGKENLEYPSVTLPPQPHTKEGVDAYNEVIARVRMWVNLNLWQKLKLSRDDAKPLLRLKGFPSFPLVERQANEVDWWDMVCNVKKLINEKKEDGKVFWQNLAGYKRQEALRPYLSSEEDRKKGKKFARYQLGDLLLHLEKKHGERDWGKVYDEAWERIDKKVEGLSKHIKLEEERRSEDAQSKAALTDWLRAKASFVIEGLKEADKDEFCRCELKLQKWYGDLRGKPFAIEAENSILDISGFSKQYNCAFIWQKDGVKKLNLYLIINYFKGGKLRFKKIKPEAFEANRFYTVINKKSGEIVPMEVNFNFDDPNLIILPLAFGKRQGREFIWNDLLSLETGSLKLANGRVIEKTLYNRRTRQDEPALFVALTFERREVLDSSNIKPMNLIGVDRGENIPAVIALTDPEGCPLSRFKDSLGNPTHILRIGESYKEKQRTIQAKKEVEQRRAGGYSRKYASKAKNLADDMVRNTARDLLYYAVTQDAMLIFENLSRGFGRQGKRTFMAERQYTRMEDWLTAKLAYEGLPSKTYLSKTLAQYTSKTCSNCGFTITSADYDRVLEKLKKTATGWMTTINGKELKVEGQITYYNRYKRQNVVKDLSVELDRLSEESVNNDISSWTKGRSGEALSLLKKRFSHRPVQEKFVCLNCGFETHADEQAALNIARSWLFLRSQEYKKYQTNKTTGNTDKRAFVETWQSFYRKKLKEVWKPAV

SEQ ID NO: 42690 - protein, 979 aa, synthetic construct
  REGION 1..979: note = engineered CasX variant
QEIKRINKIRRRLVKDSNTKKAGKTGPMKTLLVRVMTPDLRERLENLRKKPENIPQPISNTSRANLNKLLTDYTEMKKAILHVYDEEFQKDPVGLMSRVAQPASKKIDQNKLKPEMDEKGNLTTAGFACSQCGQPLFVYKLEQVSEKGKAYTNYFGRCNVAEHEKLILLAQLKPEKDSDEAVTYSLGKFGQRALDFYSIHVTKESTHPVKPLAQIAGNRYASYPVGKALSDACMGTIASFLSKYQDIIIEHQKVVKGNQKRLESLRELAGKENLEYPSVTLPPQPHTKEGVDAYNEVIARVRMWVNLNLWQKLKLSRDDAKPLLRLKGFPSFPLVERQANEVDWWDMVCNVKKLINEKKEDGKVFWQNLAGYKRQEALRPYLSSEEDRKKGKKFARYQLGDLLLHLEKKHGEYDWGKVYDEAWERIDKKVEGLSKHIKLEEERRSEDAQSKAALTDWLRAKASFVIEGLKEADKDEFCRCELKLQKWYGDLRGKPFAIEAENSILDISGFSKQYNCAFIWQKDGVKKLNLYLIINYFKGGKLRFKKIKPEAFEANRFYTVINKKSGEIVPMEVNFNFDDPNLIILPLAFGKRQGREFIWNDLLSLETGSLKLANGRVIEKTLYNRRTRQDEPALFVALTFERREVLDSSNIKPMNLIGVDRGENIPAVIALTDPEGCPLSRFKDSLGNPTHILRIGESYKEKQRTIQAKKEVEQRRAGGYSRKYASKAKNLADDMVRNTARDLLYYAVTQDAMLIFENLSRGFGRQGKRTFMAERQYTRMEDWLTAKLAYEGLPSKTYLSKTLAQYTSKTCSNCGFTITSADYDRVLEKLKKTATGWMTTINGKELKVEGQITYYNRYKRQNVVKDLSVELDRLSEESVNNDISSWTKGRSGEALSLLKKRFSHRPVQEKFVCLNCGFETHADEQAALNIARSWLFLRSQEYKKYQTNKTTGNTDKRAFVETWQSFYRKKLKEVWKPAV

SEQ ID NO: 42691 - protein, 979 aa, synthetic construct
  REGION 1..979: note = engineered CasX variant
QEIKRINKIRRRLVKDSNTKKAGKTGPMKTLLVRVMTPDLRERLENLRKKPENIPQPISNTSRANLNKLLTDYTEMKKAILHVYDEEFQKDPVGLMSRVAQPASKKIDQNKLKPEMDEKGNLTTAGFACSQCGQPLFVYKLEQVSEKGKAYTNYFGRCNVAEHEKLILLAQLKPEKDSDEAVTYSLGKFGQRALDFYSIHVTKESTHPVKPLAQIAGNRYASHPVGKALSDACMGTIASFLSKYQDIIIEHQKVVKGNQKRLESLRELAGKENLEYPSVTLPPQPHTKEGVDAYNEVIARVRMWVNLNLWQKLKLSRDDAKPLLRLKGFPSFPLVERQANEVDWWDMVCNVKKLINEKKEDGKVFWQNLAGYKRQEALRPYLSSEEDRKKGKKFARYQLGDLLLHLEKKHGEYDWGKVYDEAWERIDKKVEGLSKHIKLEEERRSEDAQSKAALTDWLRAKASFVIEGLKEADKDEFCRCELKLQKWYGDLRGKPFAIEAENSILDISGFSKQYNCAFIWQKDGVKKLNLYLIINYFKGGKLRFKKIKPEAFEANRFYTVINKKSGEIVPMEVNFNFDDPNLIILPLAFGKRQGREFIWNDLLSLETGSLKLANGRVIEKTLYNRRTRQDEPALFVALTFERREVLDSSNIKPMNLIGVDRGENIPAVIALTDPEGCPLSRFKDSLGNPTHILRIGESYKEKQRTIQAKKEVEQRRAGGYSRKYASKAKNLADDMVRNTARDLLYYAVTQDAMLIFENLSRGFGRQGKRTFMAERQYTRMEDWLTAKLAYEGLPSKTYLSKTLAQYTSKTCSNCGFTITSADYDRVLEKLKKTATGWMTTINGKELKVEGQITYYNRYKRQNVVKDLSVELDRLSEESVNNDISSWTKGRSGEALSLLKKRFSHRPVQEKFVCLNCGFETHADEQAALNIARSWLFLRSQEYKKYQTNKTTGNTDKRAFVETWQSFYRKKLKEVWKPAV

SEQ ID NO: 42692 - protein, 979 aa, synthetic construct
  REGION 1..979: note = engineered CasX variant
QEIKRINKIRRRLVKDSNTKKAGKTGPMKTLLVRVMTPDLRERLENLRKKPENIPQPISNTSRANLNKLLTDYTEMKKAILHVYDEEFQKDPVGLMSRVAQPASKKIDQNKLKPEMDEKGNLTTAGFACSQCGQPLFVYKLEQVSEKGKAYTNYFGRCNVAEHEKLILLAQLKPEKDSDEAVTYSLGKFGQRALDFYSIHVTKESTHPVKPLAQIAGNRYASSPVGKALSDACMGTIASFLSKYQDIIIEHQKVVKGNQKRLESLRELAGKENLEYPSVTLPPQPHTKEGVDAYNEVIARVRMWVNLNLWQKLKLSRDDAKPLLRLKGFPSFPLVERQANEVDWWDMVCNVKKLINEKKEDGKVFWQNLAGYKRQEALRPYLSSEEDRKKGKKFARYQLGDLLLHLEKKHGEYDWGKVYDEAWERIDKKVEGLSKHIKLEEERRSEDAQSKAALTDWLRAKASFVIEGLKEADKDEFCRCELKLQKWYGDLRGKPFAIEAENSILDISGFSKQYNCAFIWQKDGVKKLNLYLIINYFKGGKLRFKKIKPEAFEANRFYTVINKKSGEIVPMEVNFNFDDPNLIILPLAFGKRQGREFIWNDLLSLETGSLKLANGRVIEKTLYNRRTRQDEPALFVALTFERREVLDSSNIKPMNLIGVDRGENIPAVIALTDPEGCPLSRFKDSLGNPTHILRIGESYKEKQRTIQAKKEVEQRRAGGYSRKYASKAKNLADDMVRNTARDLLYYAVTQDAMLIFENLSRGFGRQGKRTFMAERQYTRMEDWLTAKLAYEGLPSKTYLSKTLAQYTSKTCSNCGFTITSADYDRVLEKLKKTATGWMTTINGKELKVEGQITYYNRYKRQNVVKDLSVELDRLSEESVNNDISSWTKGRSGEALSLLKKRFSHRPVQEKFVCLNCGFETHADEQAALNIARSWLFLRSQEYKKYQTNKTTGNTDKRAFVETWQSFYRKKLKEVWKPAV

SEQ ID NO: 42693 - protein, 979 aa, synthetic construct
  REGION 1..979: note = engineered CasX variant
QEIKRINKIRRRLVKDSNTKKAGKTGPMKTLLVRVMTPDLRERLENLRKKPENIPQPISNTSRANLNKLLTDYTEMKKAILHVYDEEFQKDPVGLMSRVAQPASKKIDQNKLKPEMDEKGNLTTAGFACSQCGQPLFVYKLEQVSEKGKAYTNYFGRCNVAEHEKLILLAQLKPEKDSDEAVTYSLGKFGQRALDFYSIHVTKESTHPVKPLAQIAGNRYASTPVGKALSDACMGTIASFLSKYQDIIIEHQKVVKGNQKRLESLRELAGKENLEYPSVTLPPQPHTKEGVDAYNEVIARVRMWVNLNLWQKLKLSRDDAKPLLRLKGFPSFPLVERQANEVDWWDMVCNVKKLINEKKEDGKVFWQNLAGYKRQEALRPYLSSEEDRKKGKKFARYQLGDLLLHLEKKHGEYDWGKVYDEAWERIDKKVEGLSKHIKLEEERRSEDAQSKAALTDWLRAKASFVIEGLKEADKDEFCRCELKLQKWYGDLRGKPFAIEAENSILDISGFSKQYNCAFIWQKDGVKKLNLYLIINYFKGGKLRFKKIKPEAFEANRFYTVINKKSGEIVPMEVNFNFDDPNLIILPLAFGKRQGREFIWNDLLSLETGSLKLANGRVIEKTLYNRRTRQDEPALFVALTFERREVLDSSNIKPMNLIGVDRGENIPAVIALTDPEGCPLSRFKDSLGNPTHILRIGESYKEKQRTIQAKKEVEQRRAGGYSRKYASKAKNLADDMVRNTARDLLYYAVTQDAMLIFENLSRGFGRQGKRTFMAERQYTRMEDWLTAKLAYEGLPSKTYLSKTLAQYTSKTCSNCGFTITSADYDRVLEKLKKTATGWMTTINGKELKVEGQITYYNRYKRQNVVKDLSVELDRLSEESVNNDISSWTKGRSGEALSLLKKRFSHRPVQEKFVCLNCGFETHADEQAALNIARSWLFLRSQEYKKYQTNKTTGNTDKRAFVETWQSFYRKKLKEVWKPAV

SEQ ID NO: 42694 - protein, 979 aa, synthetic construct
  REGION 1..979: note = engineered CasX variant
QEIKRINKIRRRLVKDSNTKKAGKTGPMKTLLVRVMTPDLRERLENLRKKPENIPQPISNTSRANLNKLLTDYTEMKKAILHVYDEEFQKDPVGLMSRVAQPASKKIDQNKLKPEMDEKGNLTTAGFACSQCGQPLFVYKLEQVSEKGKAYTNYFGRCNVAEHEKLILLAQLKPEKDSDEAVTYSLGKFGQRALDFYSIHVTKESTHPVKPLAQIAGNRYASAPVGKALSDACMGTIASFLSKYQDIIIEHQKVVKGNQKRLESLRELAGKENLEYPSVTLPPQPHTKEGVDAYNEVIARVRMWVNLNLWQKLKLSRDDAKPLLRLKGFPSFPLVERQANEVDWWDMVCNVKKLINEKKEDGKVFWQNLAGYKRQEALRPYLSSEEDRKKGKKFARYQLGDLLLHLEKKHGEYDWGKVYDEAWERIDKKVEGLSKHIKLEEERRSEDAQSKAALTDWLRAKASFVIEGLKEADKDEFCRCELKLQKWYGDLRGKPFAIEAENSILDISGFSKQYNCAFIWQKDGVKKLNLYLIINYFKGGKLRFKKIKPEAFEANRFYTVINKKSGEIVPMEVNFNFDDPNLIILPLAFGKRQGREFIWNDLLSLETGSLKLANGRVIEKTLYNRRTRQDEPALFVALTFERREVLDSSNIKPMNLIGVDRGENIPAVIALTDPEGCPLSRFKDSLGNPTHILRIGESYKEKQRTIQAKKEVEQRRAGGYSRKYASKAKNLADDMVRNTARDLLYYAVTQDAMLIFENLSRGFGRQGKRTFMAERQYTRMEDWLTAKLAYEGLPSKTYLSKTLAQYTSKTCSNCGFTITSADYDRVLEKLKKTATGWMTTINGKELKVEGQITYYNRYKRQNVVKDLSVELDRLSEESVNNDISSWTKGRSGEALSLLKKRFSHRPVQEKFVCLNCGFETHADEQAALNIARSWLFLRSQEYKKYQTNKTTGNTDKRAFVETWQSFYRKKLKEVWKPAV

SEQ ID NO: 42695 - protein, 979 aa, synthetic construct
  REGION 1..979: note = engineered CasX variant
QEIKRINKIRRRLVKDSNTKKAGKTGPMKTLLVRVMTPDLRERLENLRKKPENIPQPISNTSRANLNKLLTDYTEMKKAILHVYDEEFQKDPVGLMSRVAQPASKKIDQNKLKPEMDEKGNLTTAGFACSQCGQPLFVYKLEQVSEKGKAYTNYFGRCNVAEHEKLILLAQLKPEKDSDEAVTYSLGKFGQRALDFYSIHVTKESTHPVKPLAQIAGNRYASVPVGKALSDACMGTIASFLSKYQDIIIEHQKVVKGNQKRLESLRELAGKENLEYPSVTLPPQPHTKEGVDAYNEVIARVRMWVNLNLWQKLKLSRDDAKPLLRLKGFPSFPLVERQANEVDWWDMVCNVKKLINEKKEDGKVFWQNLAGYKRQEALRPYLSSEEDRKKGKKFARYQLGDLLLHLEKKHGEYDWGKVYDEAWERIDKKVEGLSKHIKLEEERRSEDAQSKAALTDWLRAKASFVIEGLKEADKDEFCRCELKLQKWYGDLRGKPFAIEAENSILDISGFSKQYNCAFIWQKDGVKKLNLYLIINYFKGGKLRFKKIKPEAFEANRFYTVINKKSGEIVPMEVNFNFDDPNLIILPLAFGKRQGREFIWNDLLSLETGSLKLANGRVIEKTLYNRRTRQDEPALFVALTFERREVLDSSNIKPMNLIGVDRGENIPAVIALTDPEGCPLSRFKDSLGNPTHILRIGESYKEKQRTIQAKKEVEQRRAGGYSRKYASKAKNLADDMVRNTARDLLYYAVTQDAMLIFENLSRGFGRQGKRTFMAERQYTRMEDWLTAKLAYEGLPSKTYLSKTLAQYTSKTCSNCGFTITSADYDRVLEKLKKTATGWMTTINGKELKVEGQITYYNRYKRQNVVKDLSVELDRLSEESVNNDISSWTKGRSGEALSLLKKRFSHRPVQEKFVCLNCGFETHADEQAALNIARSWLFLRSQEYKKYQTNKTTGNTDKRAFVETWQSFYRKKLKEVWKPAV

SEQ ID NO: 42696 - protein, 979 aa, synthetic construct
  REGION 1..979: note = engineered CasX variant
QEIKRINKIRRRLVKDSNTKKAGKTGPMKTLLVRVMTPDLRERLENLRKKPENIPQPISNTSRANLNKLLTDYTEMKKAILHVYDEEFQKDPVGLMSRVAQPASKKIDQNKLKPEMDEKGNLTTAGFACSQCGQPLFVYKLEQVSEKGKAYTNYFGRCNVAEHEKLIKLAQLKPEKDSDEAVTYSLGKFGQRALDFYSIHVTKESTHPVKPLAQIAGNRYASGPVGKALSDACMGTIASFLSKYQDIIIEHQKVVKGNQKRLESLRELAGKENLEYPSVTLPPQPHTKEGVDAYNEVIARVRMWVNLNLWQKLKLSRDDAKPLLRLKGFPSFPLVERQANEVDWWDMVCNVKKLINEKKEDGKVFWQNLAGYKRQEALRPYLSSEEDRKKGKKFARYQLGDLLLHLEKKHGEYDWGKVYDEAWERIDKKVEGLSKHIKLEEERRSEDAQSKAALTDWLRAKASFVIEGLKEADKDEFCRCELKLQKWYGDLRGKPFAIEAENSILDISGFSKQYNCAFIWQKDGVKKLNLYLIINYFKGGKLRFKKIKPEAFEANRFYTVINKKSGEIVPMEVNFNFDDPNLIILPLAFGKRQGREFIWNDLLSLETGSLKLANGRVIEKTLYNRRTRQDEPALFVALTFERREVLDSSNIKPMNLIGVDRGENIPAVIALTDPEGCPLSRFKDSLGNPTHILRIGESYKEKQRTIQAKKEVEQRRAGGYSRKYASKAKNLADDMVRNTARDLLYYAVTQDAMLIFENLSRGFGRQGKRTFMAERQYTRMEDWLTAKLAYEGLPSKTYLSKTLAQYTSKTCSNCGFTITSADYDRVLEKLKKTATGWMTTINGKELKVEGQITYYNRYKRQNVVKDLSVELDRLSEESVNNDISSWTKGRSGEALSLLKKRFSHRPVQEKFVCLNCGFETHADEQAALNIARSWLFLRSQEYKKYQTNKTTGNTDKRAFVETWQSFYRKKLKEVWKPAV

SEQ ID NO: 42697 - protein, 978 aa, synthetic construct
  REGION 1..978: note = engineered CasX variant
QEIKRINKIRRRLVKDSNTKKAGKTGPMKTLLVRVMTPDLRERLENLRKKPENIPQPISNTSRANLNKLLTDYTEMKKAILHVYDEEFQKDPVGLMSRVAQPASKKIDQNKLKPEMDEKGNLTTAGFACSQCGQPLFVYKLEQVSEKGKAYTNYFGRCNVAEHEKLILLAQLKPEKDSDEAVTYSLGKFGQRALDFYSIHVTKESTHPVKPLAQIAGNRYASPVGKALSDACMGTIASFLSKYQDIIIEHQKVVKGNQKRLESLRELAGKENLEYPSVTLPPQPHTKEGVDAYNEVIARVRMWVNLNLWQKLKLSRDDAKPLLRLKGFPSFPLVERQANEVDWWDMVCNVKKLINEKKEDGKVFWQNLAGYKRQEALRPYLSSEEDRKKGKKFARYQLGDLLLHLEKKHGEYDWGKVYDEAWERIDKKVEGLSKHIKLEEERRSEDAQSKAALTDWLRAKASFVIEGLKEADKDEFCRCELKLQKWYGDLRGKPFAIEAENSILDISGFSKQYNCAFIWQKDGVKKLNLYLIINYFKGGKLRFKKIKPEAFEANRFYTVINKKSGEIVPMEVNFNFDDPNLIILPLAFGKRQGREFIWNDLLSLETGSLKLANGRVIEKTLYNRRTRQDEPALFVALTFERREVLDSSNIKPMNLIGVDRGENIPAVIALTDPEGCPLSRFKDSLGNPTHILRIGESYKEKQRTIQAKKEVEQRRAGGYSRKYASKAKNLADDMVRNTARDLLYYAVTQDAMLIFENLSRGFGRQGKRTFMAERQYTRMEDWLTAKLAYEGLPSKTYLSKTLAQYTSKTCSNCGFTITSADYDRVLEKLKKTATGWMTTINGKELKVEGQITYYNRYKRQNVVKDLSVELDRLSEESVNNDISSWTKGRSGEALSLLKKRFSHRPVQEKFVCLNCGFETHADEQAALNIARSWLFLRSQEYKKYQTNKTTGNTDKRAFVETWQSFYRKKLKEVWKPAV

SEQ ID NO: 42698 - protein, 978 aa, synthetic construct
  REGION 1..978: note = engineered CasX variant
QEIKRINKIRRRLVKDSNTKKAGKTGPMKTLLVRVMTPDLRERLENLRKKPENIPQPISNTSRANLNKLLTDYTEMKKAILHVYDEEFQKDPVGLMSRVAQPASKKIDQNKLKPEMDEKGNLTTAGFACSQCGQPLFVYKLEQVSEKGKAYTNYFGRCNVAEHEKLILLAQLKPEKDSDEAVTYSLGKFGQRALDFYSIHVTKESTHPVKPLAQIAGNRYASYPVGKALSDACMGTIASFLSKYQDIIIEHQKVVKGNQKRLESLRELAGKENLEYPSVTLPPQPHTKEGVDAYNEVIARVRMWVNLNLWQKLKLSRDDAKPLLRLKGFPSFPLVERQANEVDWWDMVCNVKKLINEKKEDGKVFWQNLAGYKRQEALRPYLSSEEDRKKGKKFARYQLGDLLLHLEKKHGEDWGDVYDEAWERIDKKVEGLSKHIKLEEERRSEDAQSKAALTDWLRAKASFVIEGLKEADKDEFCRCELKLQKWYGDLRGKPFAIEAENSILDISGFSKQYNCAFIWQKDGVKKLNLYLIINYFKGGKLRFKKIKPEAFEANRFYTVINKKSGEIVPMEVNFNFDDPNLIILPLAFGKRQGREFIWNDLLSLETGSLKLANGRVIEKTLYNRRTRQDEPALFVALTFERREVLDSSNIKPMNLIGVDRGENIPAVIALTDPEGCPLSRFKDSLGNPTHILRIGESYKEKQRTIQAKKEVEQRRAGGYSRKYASKAKNLADDMVRNTARDLLYYAVTQDAMLIFENLSRGFGRQGKRTFMAERQYTRMEDWLTAKLAYEGLPSKTYLSKTLAQYTSKTCSNCGFTITSADYDRVLEKLKKTATGWMTTINGKELKVEGQITYYNRYKRQNVVKDLSVELDRLSEESVNNDISSWTKGRSGEALSLLKKRFSHRPVQEKFVCLNCGFETHADEQAALNIARSWLFLRSQEYKKYQTNKTTGNTDKRAFVETWQSFYRKKLKEVWKPAV

SEQ ID NO: 42699 - protein, 978 aa, synthetic construct
  REGION 1..978: note = engineered CasX variant
QEIKRINKIRRRLVKDSNTKKAGKTGPMKTLLVRVMTPDLRERLENLRKKPENIPQPISNTSRANLNKLLTDYTEMKKAILHVYDEEFQKDPVGLMSRVAQPASKKIDQNKLKPEMDEKGNLTTAGFACSQCGQPLFVYKLEQVSEKGKAYTNYFGRCNVAEHEKLILLAQLKPEKDSDEAVTYSLGKFGQRALDFYSIHVTKESTHPVKPLAQIAGNRYASHPVGKALSDACMGTIASFLSKYQDIIIEHQKVVKGNQKRLESLRELAGKENLEYPSVTLPPQPHTKEGVDAYNEVIARVRMWVNLNLWQKLKLSRDDAKPLLRLKGFPSFPLVERQANEVDWWDMVCNVKKLINEKKEDGKVFWQNLAGYKRQEALRPYLSSEEDRKKGKKFARYQLGDLLLHLEKKHGEDWGDVYDEAWERIDKKVEGLSKHIKLEEERRSEDAQSKAALTDWLRAKASFVIEGLKEADKDEFCRCELKLQKWYGDLRGKPFAIEAENSILDISGFSKQYNCAFIWQKDGVKKLNLYLIINYFKGGKLRFKKIKPEAFEANRFYTVINKKSGEIVPMEVNFNFDDPNLIILPLAFGKRQGREFIWNDLLSLETGSLKLANGRVIEKTLYNRRTRQDEPALFVALTFERREVLDSSNIKPMNLIGVDRGENIPAVIALTDPEGCPLSRFKDSLGNPTHILRIGESYKEKQRTIQAKKEVEQRRAGGYSRKYASKAKNLADDMVRNTARDLLYYAVTQDAMLIFENLSRGFGRQGKRTFMAERQYTRMEDWLTAKLAYEGLPSKTYLSKTLAQYTSKTCSNCGFTITSADYDRVLEKLKKTATGWMTTINGKELKVEGQITYYNRYKRQNVVKDLSVELDRLSEESVNNDISSWTKGRSGEALSLLKKRFSHRPVQEKFVCLNCGFETHADEQAALNIARSWLFLRSQEYKKYQTNKTTGNTDKRAFVETWQSFYRKKLKEVWKPAV

SEQ ID NO: 42700 - protein, 978 aa, synthetic construct
  REGION 1..978: note = engineered CasX variant
QEIKRINKIRRRLVKDSNTKKAGKTGPMKTLLVRVMTPDLRERLENLRKKPENIPQPISNTSRANLNKLLTDYTEMKKAILHVYDEEFQKDPVGLMSRVAQPASKKIDQNKLKPEMDEKGNLTTAGFACSQCGQPLFVYKLEQVSEKGKAYTNYFGRCNVAEHEKLILLAQLKPEKDSDEAVTYSLGKFGQRALDFYSIHVTKESTHPVKPLAQIAGNRYASSPVGKALSDACMGTIASFLSKYQDIIIEHQKVVKGNQKRLESLRELAGKENLEYPSVTLPPQPHTKEGVDAYNEVIARVRMWVNLNLWQKLKLSRDDAKPLLRLKGFPSFPLVERQANEVDWWDMVCNVKKLINEKKEDGKVFWQNLAGYKRQEALRPYLSSEEDRKKGKKFARYQLGDLLLHLEKKHGEDWGDVYDEAWERIDKKVEGLSKHIKLEEERRSEDAQSKAALTDWLRAKASFVIEGLKEADKDEFCRCELKLQKWYGDLRGKPFAIEAENSILDISGFSKQYNCAFIWQKDGVKKLNLYLIINYFKGGKLRFKKIKPEAFEANRFYTVINKKSGEIVPMEVNFNFDDPNLIILPLAFGKRQGREFIWNDLLSLETGSLKLANGRVIEKTLYNRRTRQDEPALFVALTFERREVLDSSNIKPMNLIGVDRGENIPAVIALTDPEGCPLSRFKDSLGNPTHILRIGESYKEKQRTIQAKKEVEQRRAGGYSRKYASKAKNLADDMVRNTARDLLYYAVTQDAMLIFENLSRGFGRQGKRTFMAERQYTRMEDWLTAKLAYEGLPSKTYLSKTLAQYTSKTCSNCGFTITSADYDRVLEKLKKTATGWMTTINGKELKVEGQITYYNRYKRQNVVKDLSVELDRLSEESVNNDISSWTKGRSGEALSLLKKRFSHRPVQEKFVCLNCGFETHADEQAALNIARSWLFLRSQEYKKYQTNKTTGNTDKRAFVETWQSFYRKKLKEVWKPAV

SEQ ID NO: 42701 - protein, 978 aa, synthetic construct
  REGION 1..978: note = engineered CasX variant
QEIKRINKIRRRLVKDSNTKKAGKTGPMKTLLVRVMTPDLRERLENLRKKPENIPQPISNTSRANLNKLLTDYTEMKKAILHVYDEEFQKDPVGLMSRVAQPASKKIDQNKLKPEMDEKGNLTTAGFACSQCGQPLFVYKLEQVSEKGKAYTNYFGRCNVAEHEKLILLAQLKPEKDSDEAVTYSLGKFGQRALDFYSIHVTKESTHPVKPLAQIAGNRYASTPVGKALSDACMGTIASFLSKYQDIIIEHQKVVKGNQKRLESLRELAGKENLEYPSVTLPPQPHTKEGVDAYNEVIARVRMWVNLNLWQKLKLSRDDAKPLLRLKGFPSFPLVERQANEVDWWDMVCNVKKLINEKKEDGKVFWQNLAGYKRQEALRPYLSSEEDRKKGKKFARYQLGDLLLHLEKKHGEDWGDVYDEAWERIDKKVEGLSKHIKLEEERRSEDAQSKAALTDWLRAKASFVIEGLKEADKDEFCRCELKLQKWYGDLRGKPFAIEAENSILDISGFSKQYNCAFIWQKDGVKKLNLYLIINYFKGGKLRFKKIKPEAFEANRFYTVINKKSGEIVPMEVNFNFDDPNLIILPLAFGKRQGREFIWNDLLSLETGSLKLANGRVIEKTLYNRRTRQDEPALFVALTFERREVLDSSNIKPMNLIGVDRGENIPAVIALTDPEGCPLSRFKDSLGNPTHILRIGESYKEKQRTIQAKKEVEQRRAGGYSRKYASKAKNLADDMVRNTARDLLYYAVTQDAMLIFENLSRGFGRQGKRTFMAERQYTRMEDWLTAKLAYEGLPSKTYLSKTLAQYTSKTCSNCGFTITSADYDRVLEKLKKTATGWMTTINGKELKVEGQITYYNRYKRQNVVKDLSVELDRLSEESVNNDISSWTKGRSGEALSLLKKRFSHRPVQEKFVCLNCGFETHADEQAALNIARSWLFLRSQEYKKYQTNKTTGNTDKRAFVETWQSFYRKKLKEVWKPAV

SEQ ID NO: 42702 - protein, 978 aa, synthetic construct
  REGION 1..978: note = engineered CasX variant
QEIKRINKIRRRLVKDSNTKKAGKTGPMKTLLVRVMTPDLRERLENLRKKPENIPQPISNTSRANLNKLLTDYTEMKKAILHVYDEEFQKDPVGLMSRVAQPASKKIDQNKLKPEMDEKGNLTTAGFACSQCGQPLFVYKLEQVSEKGKAYTNYFGRCNVAEHEKLILLAQLKPEKDSDEAVTYSLGKFGQRALDFYSIHVTKESTHPVKPLAQIAGNRYASAPVGKALSDACMGTIASFLSKYQDIIIEHQKVVKGNQKRLESLRELAGKENLEYPSVTLPPQPHTKEGVDAYNEVIARVRMWVNLNLWQKLKLSRDDAKPLLRLKGFPSFPLVERQANEVDWWDMVCNVKKLINEKKEDGKVFWQNLAGYKRQEALRPYLSSEEDRKKGKKFARYQLGDLLLHLEKKHGEDWGDVYDEAWERIDKKVEGLSKHIKLEEERRSEDAQSKAALTDWLRAKASFVIEGLKEADKDEFCRCELKLQKWYGDLRGKPFAIEAENSILDISGFSKQYNCAFIWQKDGVKKLNLYLIINYFKGGKLRFKKIKPEAFEANRFYTVINKKSGEIVPMEVNFNFDDPNLIILPLAFGKRQGREFIWNDLLSLETGSLKLANGRVIEKTLYNRRTRQDEPALFVALTFERREVLDSSNIKPMNLIGVDRGENIPAVIALTDPEGCPLSRFKDSLGNPTHILRIGESYKEKQRTIQAKKEVEQRRAGGYSRKYASKAKNLADDMVRNTARDLLYYAVTQDAMLIFENLSRGFGRQGKRTFMAERQYTRMEDWLTAKLAYEGLPSKTYLSKTLAQYTSKTCSNCGFTITSADYDRVLEKLKKTATGWMTTINGKELKVEGQITYYNRYKRQNVVKDLSVELDRLSEESVNNDISSWTKGRSGEALSLLKKRFSHRPVQEKFVCLNCGFETHADEQAALNIARSWLFLRSQEYKKYQTNKTTGNTDKRAFVETWQSFYRKKLKEVWKPAV

SEQ ID NO: 42703 - protein, 978 aa, synthetic construct
  REGION 1..978: note = engineered CasX variant
QEIKRINKIRRRLVKDSNTKKAGKTGPMKTLLVRVMTPDLRERLENLRKKPENIPQPISNTSRANLNKLLTDYTEMKKAILHVYDEEFQKDPVGLMSRVAQPASKKIDQNKLKPEMDEKGNLTTAGFACSQCGQPLFVYKLEQVSEKGKAYTNYFGRCNVAEHEKLILLAQLKPEKDSDEAVTYSLGKFGQRALDFYSIHVTKESTHPVKPLAQIAGNRYASVPVGKALSDACMGTIASFLSKYQDIIIEHQKVVKGNQKRLESLRELAGKENLEYPSVTLPPQPHTKEGVDAYNEVIARVRMWVNLNLWQKLKLSRDDAKPLLRLKGFPSFPLVERQANEVDWWDMVCNVKKLINEKKEDGKVFWQNLAGYKRQEALRPYLSSEEDRKKGKKFARYQLGDLLLHLEKKHGEDWGDVYDEAWERIDKKVEGLSKHIKLEEERRSEDAQSKAALTDWLRAKASFVIEGLKEADKDEFCRCELKLQKWYGDLRGKPFAIEAENSILDISGFSKQYNCAFIWQKDGVKKLNLYLIINYFKGGKLRFKKIKPEAFEANRFYTVINKKSGEIVPMEVNFNFDDPNLIILPLAFGKRQGREFIWNDLLSLETGSLKLANGRVIEKTLYNRRTRQDEPALFVALTFERREVLDSSNIKPMNLIGVDRGENIPAVIALTDPEGCPLSRFKDSLGNPTHILRIGESYKEKQRTIQAKKEVEQRRAGGYSRKYASKAKNLADDMVRNTARDLLYYAVTQDAMLIFENLSRGFGRQGKRTFMAERQYTRMEDWLTAKLAYEGLPSKTYLSKTLAQYTSKTCSNCGFTITSADYDRVLEKLKKTATGWMTTINGKELKVEGQITYYNRYKRQNVVKDLSVELDRLSEESVNNDISSWTKGRSGEALSLLKKRFSHRPVQEKFVCLNCGFETHADEQAALNIARSWLFLRSQEYKKYQTNKTTGNTDKRAFVETWQSFYRKKLKEVWKPAV

SEQ ID NO: 42704 - protein, 978 aa, synthetic construct
  REGION 1..978: note = engineered CasX variant
QEIKRINKIRRRLVKDSNTKKAGKTGPMKTLLVRVMTPDLRERLENLRKKPENIPQPISNTSRANLNKLLTDYTEMKKAILHVYDEEFQKDPVGLMSRVAQPASKKIDQNKLKPEMDEKGNLTTAGFACSQCGQPLFVYKLEQVSEKGKAYTNYFGRCNVAEHEKLIKLAQLKPEKDSDEAVTYSLGKFGQRALDFYSIHVTKESTHPVKPLAQIAGNRYASGPVGKALSDACMGTIASFLSKYQDIIIEHQKVVKGNQKRLESLRELAGKENLEYPSVTLPPQPHTKEGVDAYNEVIARVRMWVNLNLWQKLKLSRDDAKPLLRLKGFPSFPLVERQANEVDWWDMVCNVKKLINEKKEDGKVFWQNLAGYKRQEALRPYLSSEEDRKKGKKFARYQLGDLLLHLEKKHGEDWGDVYDEAWERIDKKVEGLSKHIKLEEERRSEDAQSKAALTDWLRAKASFVIEGLKEADKDEFCRCELKLQKWYGDLRGKPFAIEAENSILDISGFSKQYNCAFIWQKDGVKKLNLYLIINYFKGGKLRFKKIKPEAFEANRFYTVINKKSGEIVPMEVNFNFDDPNLIILPLAFGKRQGREFIWNDLLSLETGSLKLANGRVIEKTLYNRRTRQDEPALFVALTFERREVLDSSNIKPMNLIGVDRGENIPAVIALTDPEGCPLSRFKDSLGNPTHILRIGESYKEKQRTIQAKKEVEQRRAGGYSRKYASKAKNLADDMVRNTARDLLYYAVTQDAMLIFENLSRGFGRQGKRTFMAERQYTRMEDWLTAKLAYEGLPSKTYLSKTLAQYTSKTCSNCGFTITSADYDRVLEKLKKTATGWMTTINGKELKVEGQITYYNRYKRQNVVKDLSVELDRLSEESVNNDISSWTKGRSGEALSLLKKRFSHRPVQEKFVCLNCGFETHADEQAALNIARSWLFLRSQEYKKYQTNKTTGNTDKRAFVETWQSFYRKKLKEVWKPAV

SEQ ID NO: 42705 - protein, 977 aa, synthetic construct
  REGION 1..977: note = engineered CasX variant
QEIKRINKIRRRLVKDSNTKKAGKTGPMKTLLVRVMTPDLRERLENLRKKPENIPQPISNTSRANLNKLLTDYTEMKKAILHVYDEEFQKDPVGLMSRVAQPASKKIDQNKLKPEMDEKGNLTTAGFACSQCGQPLFVYKLEQVSEKGKAYTNYFGRCNVAEHEKLILLAQLKPEKDSDEAVTYSLGKFGQRALDFYSIHVTKESTHPVKPLAQIAGNRYASPVGKALSDACMGTIASFLSKYQDIIIEHQKVVKGNQKRLESLRELAGKENLEYPSVTLPPQPHTKEGVDAYNEVIARVRMWVNLNLWQKLKLSRDDAKPLLRLKGFPSFPLVERQANEVDWWDMVCNVKKLINEKKEDGKVFWQNLAGYKRQEALRPYLSSEEDRKKGKKFARYQLGDLLLHLEKKHGEDWGDVYDEAWERIDKKVEGLSKHIKLEEERRSEDAQSKAALTDWLRAKASFVIEGLKEADKDEFCRCELKLQKWYGDLRGKPFAIEAENSILDISGFSKQYNCAFIWQKDGVKKLNLYLIINYFKGGKLRFKKIKPEAFEANRFYTVINKKSGEIVPMEVNFNFDDPNLIILPLAFGKRQGREFIWNDLLSLETGSLKLANGRVIEKTLYNRRTRQDEPALFVALTFERREVLDSSNIKPMNLIGVDRGENIPAVIALTDPEGCPLSRFKDSLGNPTHILRIGESYKEKQRTIQAKKEVEQRRAGGYSRKYASKAKNLADDMVRNTARDLLYYAVTQDAMLIFENLSRGFGRQGKRTFMAERQYTRMEDWLTAKLAYEGLPSKTYLSKTLAQYTSKTCSNCGFTITSADYDRVLEKLKKTATGWMTTINGKELKVEGQITYYNRYKRQNVVKDLSVELDRLSEESVNNDISSWTKGRSGEALSLLKKRFSHRPVQEKFVCLNCGFETHADEQAALNIARSWLFLRSQEYKKYQTNKTTGNTDKRAFVETWQSFYRKKLKEVWKPAV

SEQ ID NO: 42706 - protein, 978 aa, synthetic construct
  REGION 1..978: note = engineered CasX variant
QEIKRINKIRRRLVKDSNTKKAGKTGPMKTLLVRVMTPDLRERLENLRKKPENIPQPISNTSRANLNKLLTDYTEMKKAILHVYDEEFQKDPVGLMSRVAQPASKKIDQNKLKPEMDEKGNLTTAGFACSQCGQPLFVYKLEQVSEKGKAYTNYFGRCNVAEHEKLILLAQLKPEKDSDEAVTYSLGKFGQRALDFYSIHVTKESTHPVKPLAQIAGNRYASYPVGKALSDACMGTIASFLSKYQDIIIEHQKVVKGNQKRLESLRELAGKENLEYPSVTLPPQPHTKEGVDAYNEVIARVRMWVNLNLWQKLKLSRDDAKPLLRLKGFPSFPLVERQANEVDWWDMVCNVKKLINEKKEDGKVFWQNLAGYKRQEALRPYLSSEEDRKKGKKFARYQLGDLLLHLEKKHGEDWGKVYGEAWERIDKKVEGLSKHIKLEEERRSEDAQSKAALTDWLRAKASFVIEGLKEADKDEFCRCELKLQKWYGDLRGKPFAIEAENSILDISGFSKQYNCAFIWQKDGVKKLNLYLIINYFKGGKLRFKKIKPEAFEANRFYTVINKKSGEIVPMEVNFNFDDPNLIILPLAFGKRQGREFIWNDLLSLETGSLKLANGRVIEKTLYNRRTRQDEPALFVALTFERREVLDSSNIKPMNLIGVDRGENIPAVIALTDPEGCPLSRFKDSLGNPTHILRIGESYKEKQRTIQAKKEVEQRRAGGYSRKYASKAKNLADDMVRNTARDLLYYAVTQDAMLIFENLSRGFGRQGKRTFMAERQYTRMEDWLTAKLAYEGLPSKTYLSKTLAQYTSKTCSNCGFTITSADYDRVLEKLKKTATGWMTTINGKELKVEGQITYYNRYKRQNVVKDLSVELDRLSEESVNNDISSWTKGRSGEALSLLKKRFSHRPVQEKFVCLNCGFETHADEQAALNIARSWLFLRSQEYKKYQTNKTTGNTDKRAFVETWQSFYRKKLKEVWKPAV

SEQ ID NO: 42707 - protein, 978 aa, synthetic construct
  REGION 1..978: note = engineered CasX variant
QEIKRINKIRRRLVKDSNTKKAGKTGPMKTLLVRVMTPDLRERLENLRKKPENIPQPISNTSRANLNKLLTDYTEMKKAILHVYDEEFQKDPVGLMSRVAQPASKKIDQNKLKPEMDEKGNLTTAGFACSQCGQPLFVYKLEQVSEKGKAYTNYFGRCNVAEHEKLILLAQLKPEKDSDEAVTYSLGKFGQRALDFYSIHVTKESTHPVKPLAQIAGNRYASHPVGKALSDACMGTIASFLSKYQDIIIEHQKVVKGNQKRLESLRELAGKENLEYPSVTLPPQPHTKEGVDAYNEVIARVRMWVNLNLWQKLKLSRDDAKPLLRLKGFPSFPLVERQANEVDWWDMVCNVKKLINEKKEDGKVFWQNLAGYKRQEALRPYLSSEEDRKKGKKFARYQLGDLLLHLEKKHGEDWGKVYGEAWERIDKKVEGLSKHIKLEEERRSEDAQSKAALTDWLRAKASFVIEGLKEADKDEFCRCELKLQKWYGDLRGKPFAIEAENSILDISGFSKQYNCAFIWQKDGVKKLNLYLIINYFKGGKLRFKKIKPEAFEANRFYTVINKKSGEIVPMEVNFNFDDPNLIILPLAFGKRQGREFIWNDLLSLETGSLKLANGRVIEKTLYNRRTRQDEPALFVALTFERREVLDSSNIKPMNLIGVDRGENIPAVIALTDPEGCPLSRFKDSLGNPTHILRIGESYKEKQRTIQAKKEVEQRRAGGYSRKYASKAKNLADDMVRNTARDLLYYAVTQDAMLIFENLSRGFGRQGKRTFMAERQYTRMEDWLTAKLAYEGLPSKTYLSKTLAQYTSKTCSNCGFTITSADYDRVLEKLKKTATGWMTTINGKELKVEGQITYYNRYKRQNVVKDLSVELDRLSEESVNNDISSWTKGRSGEALSLLKKRFSHRPVQEKFVCLNCGFETHADEQAALNIARSWLFLRSQEYKKYQTNKTTGNTDKRAFVETWQSFYRKKLKEVWKPAV

SEQ ID NO: 42708 - protein, 978 aa, synthetic construct
  REGION 1..978: note = engineered CasX variant
QEIKRINKIRRRLVKDSNTKKAGKTGPMKTLLVRVMTPDLRERLENLRKKPENIPQPISNTSRANLNKLLTDYTEMKKAILHVYDEEFQKDPVGLMSRVAQPASKKIDQNKLKPEMDEKGNLTTAGFACSQCGQPLFVYKLEQVSEKGKAYTNYFGRCNVAEHEKLILLAQLKPEKDSDEAVTYSLGKFGQRALDFYSIHVTKESTHPVKPLAQIAGNRYASSPVGKALSDACMGTIASFLSKYQDIIIEHQKVVKGNQKRLESLRELAGKENLEYPSVTLPPQPHTKEGVDAYNEVIARVRMWVNLNLWQKLKLSRDDAKPLLRLKGFPSFPLVERQANEVDWWDMVCNVKKLINEKKEDGKVFWQNLAGYKRQEALRPYLSSEEDRKKGKKFARYQLGDLLLHLEKKHGEDWGKVYGEAWERIDKKVEGLSKHIKLEEERRSEDAQSKAALTDWLRAKASFVIEGLKEADKDEFCRCELKLQKWYGDLRGKPFAIEAENSILDISGFSKQYNCAFIWQKDGVKKLNLYLIINYFKGGKLRFKKIKPEAFEANRFYTVINKKSGEIVPMEVNFNFDDPNLIILPLAFGKRQGREFIWNDLLSLETGSLKLANGRVIEKTLYNRRTRQDEPALFVALTFERREVLDSSNIKPMNLIGVDRGENIPAVIALTDPEGCPLSRFKDSLGNPTHILRIGESYKEKQRTIQAKKEVEQRRAGGYSRKYASKAKNLADDMVRNTARDLLYYAVTQDAMLIFENLSRGFGRQGKRTFMAERQYTRMEDWLTAKLAYEGLPSKTYLSKTLAQYTSKTCSNCGFTITSADYDRVLEKLKKTATGWMTTINGKELKVEGQITYYNRYKRQNVVKDLSVELDRLSEESVNNDISSWTKGRSGEALSLLKKRFSHRPVQEKFVCLNCGFETHADEQAALNIARSWLFLRSQEYKKYQTNKTTGNTDKRAFVETWQSFYRKKLKEVWKPAV

SEQ ID NO: 42709 - protein, 978 aa, synthetic construct
  REGION 1..978: note = engineered CasX variant
QEIKRINKIRRRLVKDSNTKKAGKTGPMKTLLVRVMTPDLRERLENLRKKPENIPQPISNTSRANLNKLLTDYTEMKKAILHVYDEEFQKDPVGLMSRVAQPASKKIDQNKLKPEMDEKGNLTTAGFACSQCGQPLFVYKLEQVSEKGKAYTNYFGRCNVAEHEKLILLAQLKPEKDSDEAVTYSLGKFGQRALDFYSIHVTKESTHPVKPLAQIAGNRYASTPVGKALSDACMGTIASFLSKYQDIIIEHQKVVKGNQKRLESLRELAGKENLEYPSVTLPPQPHTKEGVDAYNEVIARVRMWVNLNLWQKLKLSRDDAKPLLRLKGFPSFPLVERQANEVDWWDMVCNVKKLINEKKEDGKVFWQNLAGYKRQEALRPYLSSEEDRKKGKKFARYQLGDLLLHLEKKHGEDWGKVYGEAWERIDKKVEGLSKHIKLEEERRSEDAQSKAALTDWLRAKASFVIEGLKEADKDEFCRCELKLQKWYGDLRGKPFAIEAENSILDISGFSKQYNCAFIWQKDGVKKLNLYLIINYFKGGKLRFKKIKPEAFEANRFYTVINKKSGEIVPMEVNFNFDDPNLIILPLAFGKRQGREFIWNDLLSLETGSLKLANGRVIEKTLYNRRTRQDEPALFVALTFERREVLDSSNIKPMNLIGVDRGENIPAVIALTDPEGCPLSRFKDSLGNPTHILRIGESYKEKQRTIQAKKEVEQRRAGGYSRKYASKAKNLADDMVRNTARDLLYYAVTQDAMLIFENLSRGFGRQGKRTFMAERQYTRMEDWLTAKLAYEGLPSKTYLSKTLAQYTSKTCSNCGFTITSADYDRVLEKLKKTATGWMTTINGKELKVEGQITYYNRYKRQNVVKDLSVELDRLSEESVNNDISSWTKGRSGEALSLLKKRFSHRPVQEKFVCLNCGFETHADEQAALNIARSWLFLRSQEYKKYQTNKTTGNTDKRAFVETWQSFYRKKLKEVWKPAV

SEQ ID NO: 42710 - protein, 978 aa, synthetic construct
  REGION 1..978: note = engineered CasX variant
QEIKRINKIRRRLVKDSNTKKAGKTGPMKTLLVRVMTPDLRERLENLRKKPENIPQPISNTSRANLNKLLTDYTEMKKAILHVYDEEFQKDPVGLMSRVAQPASKKIDQNKLKPEMDEKGNLTTAGFACSQCGQPLFVYKLEQVSEKGKAYTNYFGRCNVAEHEKLILLAQLKPEKDSDEAVTYSLGKFGQRALDFYSIHVTKESTHPVKPLAQIAGNRYASAPVGKALSDACMGTIASFLSKYQDIIIEHQKVVKGNQKRLESLRELAGKENLEYPSVTLPPQPHTKEGVDAYNEVIARVRMWVNLNLWQKLKLSRDDAKPLLRLKGFPSFPLVERQANEVDWWDMVCNVKKLINEKKEDGKVFWQNLAGYKRQEALRPYLSSEEDRKKGKKFARYQLGDLLLHLEKKHGEDWGKVYGEAWERIDKKVEGLSKHIKLEEERRSEDAQSKAALTDWLRAKASFVIEGLKEADKDEFCRCELKLQKWYGDLRGKPFAIEAENSILDISGFSKQYNCAFIWQKDGVKKLNLYLIINYFKGGKLRFKKIKPEAFEANRFYTVINKKSGEIVPMEVNFNFDDPNLIILPLAFGKRQGREFIWNDLLSLETGSLKLANGRVIEKTLYNRRTRQDEPALFVALTFERREVLDSSNIKPMNLIGVDRGENIPAVIALTDPEGCPLSRFKDSLGNPTHILRIGESYKEKQRTIQAKKEVEQRRAGGYSRKYASKAKNLADDMVRNTARDLLYYAVTQDAMLIFENLSRGFGRQGKRTFMAERQYTRMEDWLTAKLAYEGLPSKTYLSKTLAQYTSKTCSNCGFTITSADYDRVLEKLKKTATGWMTTINGKELKVEGQITYYNRYKRQNVVKDLSVELDRLSEESVNNDISSWTKGRSGEALSLLKKRFSHRPVQEKFVCLNCGFETHADEQAALNIARSWLFLRSQEYKKYQTNKTTGNTDKRAFVETWQSFYRKKLKEVWKPAV

SEQ ID NO: 42711 - protein, 978 aa, synthetic construct
  REGION 1..978: note = engineered CasX variant
QEIKRINKIRRRLVKDSNTKKAGKTGPMKTLLVRVMTPDLRERLENLRKKPENIPQPISNTSRANLNKLLTDYTEMKKAILHVYDEEFQKDPVGLMSRVAQPASKKIDQNKLKPEMDEKGNLTTAGFACSQCGQPLFVYKLEQVSEKGKAYTNYFGRCNVAEHEKLILLAQLKPEKDSDEAVTYSLGKFGQRALDFYSIHVTKESTHPVKPLAQIAGNRYASVPVGKALSDACMGTIASFLSKYQDIIIEHQKVVKGNQKRLESLRELAGKENLEYPSVTLPPQPHTKEGVDAYNEVIARVRMWVNLNLWQKLKLSRDDAKPLLRLKGFPSFPLVERQANEVDWWDMVCNVKKLINEKKEDGKVFWQNLAGYKRQEALRPYLSSEEDRKKGKKFARYQLGDLLLHLEKKHGEDWGKVYGEAWERIDKKVEGLSKHIKLEEERRSEDAQSKAALTDWLRAKASFVIEGLKEADKDEFCRCELKLQKWYGDLRGKPFAIEAENSILDISGFSKQYNCAFIWQKDGVKKLNLYLIINYFKGGKLRFKKIKPEAFEANRFYTVINKKSGEIVPMEVNFNFDDPNLIILPLAFGKRQGREFIWNDLLSLETGSLKLANGRVIEKTLYNRRTRQDEPALFVALTFERREVLDSSNIKPMNLIGVDRGENIPAVIALTDPEGCPLSRFKDSLGNPTHILRIGESYKEKQRTIQAKKEVEQRRAGGYSRKYASKAKNLADDMVRNTARDLLYYAVTQDAMLIFENLSRGFGRQGKRTFMAERQYTRMEDWLTAKLAYEGLPSKTYLSKTLAQYTSKTCSNCGFTITSADYDRVLEKLKKTATGWMTTINGKELKVEGQITYYNRYKRQNVVKDLSVELDRLSEESVNNDISSWTKGRSGEALSLLKKRFSHRPVQEKFVCLNCGFETHADEQAALNIARSWLFLRSQEYKKYQTNKTTGNTDKRAFVETWQSFYRKKLKEVWKPAV

SEQ ID NO: 42712 - protein, 978 aa, synthetic construct
  REGION 1..978: note = engineered CasX variant
QEIKRINKIRRRLVKDSNTKKAGKTGPMKTLLVRVMTPDLRERLENLRKKPENIPQPISNTSRANLNKLLTDYTEMKKAILHVYDEEFQKDPVGLMSRVAQPASKKIDQNKLKPEMDEKGNLTTAGFACSQCGQPLFVYKLEQVSEKGKAYTNYFGRCNVAEHEKLIKLAQLKPEKDSDEAVTYSLGKFGQRALDFYSIHVTKESTHPVKPLAQIAGNRYASGPVGKALSDACMGTIASFLSKYQDIIIEHQKVVKGNQKRLESLRELAGKENLEYPSVTLPPQPHTKEGVDAYNEVIARVRMWVNLNLWQKLKLSRDDAKPLLRLKGFPSFPLVERQANEVDWWDMVCNVKKLINEKKEDGKVFWQNLAGYKRQEALRPYLSSEEDRKKGKKFARYQLGDLLLHLEKKHGEDWGKVYGEAWERIDKKVEGLSKHIKLEEERRSEDAQSKAALTDWLRAKASFVIEGLKEADKDEFCRCELKLQKWYGDLRGKPFAIEAENSILDISGFSKQYNCAFIWQKDGVKKLNLYLIINYFKGGKLRFKKIKPEAFEANRFYTVINKKSGEIVPMEVNFNFDDPNLIILPLAFGKRQGREFIWNDLLSLETGSLKLANGRVIEKTLYNRRTRQDEPALFVALTFERREVLDSSNIKPMNLIGVDRGENIPAVIALTDPEGCPLSRFKDSLGNPTHILRIGESYKEKQRTIQAKKEVEQRRAGGYSRKYASKAKNLADDMVRNTARDLLYYAVTQDAMLIFENLSRGFGRQGKRTFMAERQYTRMEDWLTAKLAYEGLPSKTYLSKTLAQYTSKTCSNCGFTITSADYDRVLEKLKKTATGWMTTINGKELKVEGQITYYNRYKRQNVVKDLSVELDRLSEESVNNDISSWTKGRSGEALSLLKKRFSHRPVQEKFVCLNCGFETHADEQAALNIARSWLFLRSQEYKKYQTNKTTGNTDKRAFVETWQSFYRKKLKEVWKPAV

SEQ ID NO: 42713 - protein, 977 aa, synthetic construct
  REGION 1..977: note = engineered CasX variant
QEIKRINKIRRRLVKDSNTKKAGKTGPMKTLLVRVMTPDLRERLENLRKKPENIPQPISNTSRANLNKLLTDYTEMKKAILHVYDEEFQKDPVGLMSRVAQPASKKIDQNKLKPEMDEKGNLTTAGFACSQCGQPLFVYKLEQVSEKGKAYTNYFGRCNVAEHEKLILLAQLKPEKDSDEAVTYSLGKFGQRALDFYSIHVTKESTHPVKPLAQIAGNRYASPVGKALSDACMGTIASFLSKYQDIIIEHQKVVKGNQKRLESLRELAGKENLEYPSVTLPPQPHTKEGVDAYNEVIARVRMWVNLNLWQKLKLSRDDAKPLLRLKGFPSFPLVERQANEVDWWDMVCNVKKLINEKKEDGKVFWQNLAGYKRQEALRPYLSSEEDRKKGKKFARYQLGDLLLHLEKKHGEDWGKVYGEAWERIDKKVEGLSKHIKLEEERRSEDAQSKAALTDWLRAKASFVIEGLKEADKDEFCRCELKLQKWYGDLRGKPFAIEAENSILDISGFSKQYNCAFIWQKDGVKKLNLYLIINYFKGGKLRFKKIKPEAFEANRFYTVINKKSGEIVPMEVNFNFDDPNLIILPLAFGKRQGREFIWNDLLSLETGSLKLANGRVIEKTLYNRRTRQDEPALFVALTFERREVLDSSNIKPMNLIGVDRGENIPAVIALTDPEGCPLSRFKDSLGNPTHILRIGESYKEKQRTIQAKKEVEQRRAGGYSRKYASKAKNLADDMVRNTARDLLYYAVTQDAMLIFENLSRGFGRQGKRTFMAERQYTRMEDWLTAKLAYEGLPSKTYLSKTLAQYTSKTCSNCGFTITSADYDRVLEKLKKTATGWMTTINGKELKVEGQITYYNRYKRQNVVKDLSVELDRLSEESVNNDISSWTKGRSGEALSLLKKRFSHRPVQEKFVCLNCGFETHADEQAALNIARSWLFLRSQEYKKYQTNKTTGNTDKRAFVETWQSFYRKKLKEVWKPAV

SEQ ID NO: 42714 - protein, 978 aa, synthetic construct
  REGION 1..978: note = engineered CasX variant
QEIKRINKIRRRLVKDSNTKKAGKTGPMKTLLVRVMTPDLRERLENLRKKPENIPQPISNTSRANLNKLLTDYTEMKKAILHVYDEEFQKDPVGLMSRVAQPASKKIDQNKLKPEMDEKGNLTTAGFACSQCGQPLFVYKLEQVSEKGKAYTNYFGRCNVAEHEKLILLAQLKPEKDSDEAVTYSLGKFGQRALDFYSIHVTKESTHPVKPLAQIAGNRYASYPVGKALSDACMGTIASFLSKYQDIIIEHQKVVKGNQKRLESLRELAGKENLEYPSVTLPPQPHTKEGVDAYNEVIARVRMWVNLNLWQKLKLSRDDAKPLLRLKGFPSFPLVERQANEVDWWDMVCNVKKLINEKKEDGKVFWQNLAGYKRQEALRPYLSSEEDRKKGKKFARYQLGDLLLHLEKKHGEDWGKVYDEAWERIDKKVEGLSKHIKLEEERRSEDAQSKAALTDWLRAKASFVIEGKKEADKDEFCRCELKLQKWYGDLRGKPFAIEAENSILDISGFSKQYNCAFIWQKDGVKKLNLYLIINYFKGGKLRFKKIKPEAFEANRFYTVINKKSGEIVPMEVNFNFDDPNLIILPLAFGKRQGREFIWNDLLSLETGSLKLANGRVIEKTLYNRRTRQDEPALFVALTFERREVLDSSNIKPMNLIGVDRGENIPAVIALTDPEGCPLSRFKDSLGNPTHILRIGESYKEKQRTIQAKKEVEQRRAGGYSRKYASKAKNLADDMVRNTARDLLYYAVTQDAMLIFENLSRGFGRQGKRTFMAERQYTRMEDWLTAKLAYEGLPSKTYLSKTLAQYTSKTCSNCGFTITSADYDRVLEKLKKTATGWMTTINGKELKVEGQITYYNRYKRQNVVKDLSVELDRLSEESVNNDISSWTKGRSGEALSLLKKRFSHRPVQEKFVCLNCGFETHADEQAALNIARSWLFLRSQEYKKYQTNKTTGNTDKRAFVETWQSFYRKKLKEVWKPAV

SEQ ID NO: 42715 - protein, 978 aa, synthetic construct
  REGION 1..978: note = engineered CasX variant
QEIKRINKIRRRLVKDSNTKKAGKTGPMKTLLVRVMTPDLRERLENLRKKPENIPQPISNTSRANLNKLLTDYTEMKKAILHVYDEEFQKDPVGLMSRVAQPASKKIDQNKLKPEMDEKGNLTTAGFACSQCGQPLFVYKLEQVSEKGKAYTNYFGRCNVAEHEKLILLAQLKPEKDSDEAVTYSLGKFGQRALDFYSIHVTKESTHPVKPLAQIAGNRYASHPVGKALSDACMGTIASFLSKYQDIIIEHQKVVKGNQKRLESLRELAGKENLEYPSVTLPPQPHTKEGVDAYNEVIARVRMWVNLNLWQKLKLSRDDAKPLLRLKGFPSFPLVERQANEVDWWDMVCNVKKLINEKKEDGKVFWQNLAGYKRQEALRPYLSSEEDRKKGKKFARYQLGDLLLHLEKKHGEDWGKVYDEAWERIDKKVEGLSKHIKLEEERRSEDAQSKAALTDWLRAKASFVIEGKKEADKDEFCRCELKLQKWYGDLRGKPFAIEAENSILDISGFSKQYNCAFIWQKDGVKKLNLYLIINYFKGGKLRFKKIKPEAFEANRFYTVINKKSGEIVPMEVNFNFDDPNLIILPLAFGKRQGREFIWNDLLSLETGSLKLANGRVIEKTLYNRRTRQDEPALFVALTFERREVLDSSNIKPMNLIGVDRGENIPAVIALTDPEGCPLSRFKDSLGNPTHILRIGESYKEKQRTIQAKKEVEQRRAGGYSRKYASKAKNLADDMVRNTARDLLYYAVTQDAMLIFENLSRGFGRQGKRTFMAERQYTRMEDWLTAKLAYEGLPSKTYLSKTLAQYTSKTCSNCGFTITSADYDRVLEKLKKTATGWMTTINGKELKVEGQITYYNRYKRQNVVKDLSVELDRLSEESVNNDISSWTKGRSGEALSLLKKRFSHRPVQEKFVCLNCGFETHADEQAALNIARSWLFLRSQEYKKYQTNKTTGNTDKRAFVETWQSFYRKKLKEVWKPAV

SEQ ID NO: 42716 - protein, 978 aa, synthetic construct
  REGION 1..978: note = engineered CasX variant
QEIKRINKIRRRLVKDSNTKKAGKTGPMKTLLVRVMTPDLRERLENLRKKPENIPQPISNTSRANLNKLLTDYTEMKKAILHVYDEEFQKDPVGLMSRVAQPASKKIDQNKLKPEMDEKGNLTTAGFACSQCGQPLFVYKLEQVSEKGKAYTNYFGRCNVAEHEKLILLAQLKPEKDSDEAVTYSLGKFGQRALDFYSIHVTKESTHPVKPLAQIAGNRYASSPVGKALSDACMGTIASFLSKYQDIIIEHQKVVKGNQKRLESLRELAGKENLEYPSVTLPPQPHTKEGVDAYNEVIARVRMWVNLNLWQKLKLSRDDAKPLLRLKGFPSFPLVERQANEVDWWDMVCNVKKLINEKKEDGKVFWQNLAGYKRQEALRPYLSSEEDRKKGKKFARYQLGDLLLHLEKKHGEDWGKVYDEAWERIDKKVEGLSKHIKLEEERRSEDAQSKAALTDWLRAKASFVIEGKKEADKDEFCRCELKLQKWYGDLRGKPFAIEAENSILDISGFSKQYNCAFIWQKDGVKKLNLYLIINYFKGGKLRFKKIKPEAFEANRFYTVINKKSGEIVPMEVNFNFDDPNLIILPLAFGKRQGREFIWNDLLSLETGSLKLANGRVIEKTLYNRRTRQDEPALFVALTFERREVLDSSNIKPMNLIGVDRGENIPAVIALTDPEGCPLSRFKDSLGNPTHILRIGESYKEKQRTIQAKKEVEQRRAGGYSRKYASKAKNLADDMVRNTARDLLYYAVTQDAMLIFENLSRGFGRQGKRTFMAERQYTRMEDWLTAKLAYEGLPSKTYLSKTLAQYTSKTCSNCGFTITSADYDRVLEKLKKTATGWMTTINGKELKVEGQITYYNRYKRQNVVKDLSVELDRLSEESVNNDISSWTKGRSGEALSLLKKRFSHRPVQEKFVCLNCGFETHADEQAALNIARSWLFLRSQEYKKYQTNKTTGNTDKRAFVETWQSFYRKKLKEVWKPAV

SEQ ID NO: 42717 - protein, 978 aa, synthetic construct
  REGION 1..978: note = engineered CasX variant
QEIKRINKIRRRLVKDSNTKKAGKTGPMKTLLVRVMTPDLRERLENLRKKPENIPQPISNTSRANLNKLLTDYTEMKKAILHVYDEEFQKDPVGLMSRVAQPASKKIDQNKLKPEMDEKGNLTTAGFACSQCGQPLFVYKLEQVSEKGKAYTNYFGRCNVAEHEKLILLAQLKPEKDSDEAVTYSLGKFGQRALDFYSIHVTKESTHPVKPLAQIAGNRYASTPVGKALSDACMGTIASFLSKYQDIIIEHQKVVKGNQKRLESLRELAGKENLEYPSVTLPPQPHTKEGVDAYNEVIARVRMWVNLNLWQKLKLSRDDAKPLLRLKGFPSFPLVERQANEVDWWDMVCNVKKLINEKKEDGKVFWQNLAGYKRQEALRPYLSSEEDRKKGKKFARYQLGDLLLHLEKKHGEDWGKVYDEAWERIDKKVEGLSKHIKLEEERRSEDAQSKAALTDWLRAKASFVIEGKKEADKDEFCRCELKLQKWYGDLRGKPFAIEAENSILDISGFSKQYNCAFIWQKDGVKKLNLYLIINYFKGGKLRFKKIKPEAFEANRFYTVINKKSGEIVPMEVNFNFDDPNLIILPLAFGKRQGREFIWNDLLSLETGSLKLANGRVIEKTLYNRRTRQDEPALFVALTFERREVLDSSNIKPMNLIGVDRGENIPAVIALTDPEGCPLSRFKDSLGNPTHILRIGESYKEKQRTIQAKKEVEQRRAGGYSRKYASKAKNLADDMVRNTARDLLYYAVTQDAMLIFENLSRGFGRQGKRTFMAERQYTRMEDWLTAKLAYEGLPSKTYLSKTLAQYTSKTCSNCGFTITSADYDRVLEKLKKTATGWMTTINGKELKVEGQITYYNRYKRQNVVKDLSVELDRLSEESVNNDISSWTKGRSGEALSLLKKRFSHRPVQEKFVCLNCGFETHADEQAALNIARSWLFLRSQEYKKYQTNKTTGNTDKRAFVETWQSFYRKKLKEVWKPAV

SEQ ID NO: 42718 - protein, 978 aa, synthetic construct
  REGION 1..978: note = engineered CasX variant
QEIKRINKIRRRLVKDSNTKKAGKTGPMKTLLVRVMTPDLRERLENLRKKPENIPQPISNTSRANLNKLLTDYTEMKKAILHVYDEEFQKDPVGLMSRVAQPASKKIDQNKLKPEMDEKGNLTTAGFACSQCGQPLFVYKLEQVSEKGKAYTNYFGRCNVAEHEKLILLAQLKPEKDSDEAVTYSLGKFGQRALDFYSIHVTKESTHPVKPLAQIAGNRYASAPVGKALSDACMGTIASFLSKYQDIIIEHQKVVKGNQKRLESLRELAGKENLEYPSVTLPPQPHTKEGVDAYNEVIARVRMWVNLNLWQKLKLSRDDAKPLLRLKGFPSFPLVERQANEVDWWDMVCNVKKLINEKKEDGKVFWQNLAGYKRQEALRPYLSSEEDRKKGKKFARYQLGDLLLHLEKKHGEDWGKVYDEAWERIDKKVEGLSKHIKLEEERRSEDAQSKAALTDWLRAKASFVIEGKKEADKDEFCRCELKLQKWYGDLRGKPFAIEAENSILDISGFSKQYNCAFIWQKDGVKKLNLYLIINYFKGGKLRFKKIKPEAFEANRFYTVINKKSGEIVPMEVNFNFDDPNLIILPLAFGKRQGREFIWNDLLSLETGSLKLANGRVIEKTLYNRRTRQDEPALFVALTFERREVLDSSNIKPMNLIGVDRGENIPAVIALTDPEGCPLSRFKDSLGNPTHILRIGESYKEKQRTIQAKKEVEQRRAGGYSRKYASKAKNLADDMVRNTARDLLYYAVTQDAMLIFENLSRGFGRQGKRTFMAERQYTRMEDWLTAKLAYEGLPSKTYLSKTLAQYTSKTCSNCGFTITSADYDRVLEKLKKTATGWMTTINGKELKVEGQITYYNRYKRQNVVKDLSVELDRLSEESVNNDISSWTKGRSGEALSLLKKRFSHRPVQEKFVCLNCGFETHADEQAALNIARSWLFLRSQEYKKYQTNKTTGNTDKRAFVETWQSFYRKKLKEVWKPAV

SEQ ID NO: 42719 - protein, 978 aa, synthetic construct
  REGION 1..978: note = engineered CasX variant
QEIKRINKIRRRLVKDSNTKKAGKTGPMKTLLVRVMTPDLRERLENLRKKPENIPQPISNTSRANLNKLLTDYTEMKKAILHVYDEEFQKDPVGLMSRVAQPASKKIDQNKLKPEMDEKGNLTTAGFACSQCGQPLFVYKLEQVSEKGKAYTNYFGRCNVAEHEKLILLAQLKPEKDSDEAVTYSLGKFGQRALDFYSIHVTKESTHPVKPLAQIAGNRYASVPVGKALSDACMGTIASFLSKYQDIIIEHQKVVKGNQKRLESLRELAGKENLEYPSVTLPPQPHTKEGVDAYNEVIARVRMWVNLNLWQKLKLSRDDAKPLLRLKGFPSFPLVERQANEVDWWDMVCNVKKLINEKKEDGKVFWQNLAGYKRQEALRPYLSSEEDRKKGKKFARYQLGDLLLHLEKKHGEDWGKVYDEAWERIDKKVEGLSKHIKLEEERRSEDAQSKAALTDWLRAKASFVIEGKKEADKDEFCRCELKLQKWYGDLRGKPFAIEAENSILDISGFSKQYNCAFIWQKDGVKKLNLYLIINYFKGGKLRFKKIKPEAFEANRFYTVINKKSGEIVPMEVNFNFDDPNLIILPLAFGKRQGREFIWNDLLSLETGSLKLANGRVIEKTLYNRRTRQDEPALFVALTFERREVLDSSNIKPMNLIGVDRGENIPAVIALTDPEGCPLSRFKDSLGNPTHILRIGESYKEKQRTIQAKKEVEQRRAGGYSRKYASKAKNLADDMVRNTARDLLYYAVTQDAMLIFENLSRGFGRQGKRTFMAERQYTRMEDWLTAKLAYEGLPSKTYLSKTLAQYTSKTCSNCGFTITSADYDRVLEKLKKTATGWMTTINGKELKVEGQITYYNRYKRQNVVKDLSVELDRLSEESVNNDISSWTKGRSGEALSLLKKRFSHRPVQEKFVCLNCGFETHADEQAALNIARSWLFLRSQEYKKYQTNKTTGNTDKRAFVETWQSFYRKKLKEVWKPAV

SEQ ID NO: 42720 - protein, 978 aa, synthetic construct
  REGION 1..978: note = engineered CasX variant
QEIKRINKIRRRLVKDSNTKKAGKTGPMKTLLVRVMTPDLRERLENLRKKPENIPQPISNTSRANLNKLLTDYTEMKKAILHVYDEEFQKDPVGLMSRVAQPASKKIDQNKLKPEMDEKGNLTTAGFACSQCGQPLFVYKLEQVSEKGKAYTNYFGRCNVAEHEKLIKLAQLKPEKDSDEAVTYSLGKFGQRALDFYSIHVTKESTHPVKPLAQIAGNRYASGPVGKALSDACMGTIASFLSKYQDIIIEHQKVVKGNQKRLESLRELAGKENLEYPSVTLPPQPHTKEGVDAYNEVIARVRMWVNLNLWQKLKLSRDDAKPLLRLKGFPSFPLVERQANEVDWWDMVCNVKKLINEKKEDGKVFWQNLAGYKRQEALRPYLSSEEDRKKGKKFARYQLGDLLLHLEKKHGEDWGKVYDEAWERIDKKVEGLSKHIKLEEERRSEDAQSKAALTDWLRAKASFVIEGKKEADKDEFCRCELKLQKWYGDLRGKPFAIEAENSILDISGFSKQYNCAFIWQKDGVKKLNLYLIINYFKGGKLRFKKIKPEAFEANRFYTVINKKSGEIVPMEVNFNFDDPNLIILPLAFGKRQGREFIWNDLLSLETGSLKLANGRVIEKTLYNRRTRQDEPALFVALTFERREVLDSSNIKPMNLIGVDRGENIPAVIALTDPEGCPLSRFKDSLGNPTHILRIGESYKEKQRTIQAKKEVEQRRAGGYSRKYASKAKNLADDMVRNTARDLLYYAVTQDAMLIFENLSRGFGRQGKRTFMAERQYTRMEDWLTAKLAYEGLPSKTYLSKTLAQYTSKTCSNCGFTITSADYDRVLEKLKKTATGWMTTINGKELKVEGQITYYNRYKRQNVVKDLSVELDRLSEESVNNDISSWTKGRSGEALSLLKKRFSHRPVQEKFVCLNCGFETHADEQAALNIARSWLFLRSQEYKKYQTNKTTGNTDKRAFVETWQSFYRKKLKEVWKPAV

SEQ ID NO: 42721 - protein, 977 aa, synthetic construct
  REGION 1..977: note = engineered CasX variant
QEIKRINKIRRRLVKDSNTKKAGKTGPMKTLLVRVMTPDLRERLENLRKKPENIPQPISNTSRANLNKLLTDYTEMKKAILHVYDEEFQKDPVGLMSRVAQPASKKIDQNKLKPEMDEKGNLTTAGFACSQCGQPLFVYKLEQVSEKGKAYTNYFGRCNVAEHEKLILLAQLKPEKDSDEAVTYSLGKFGQRALDFYSIHVTKESTHPVKPLAQIAGNRYASPVGKALSDACMGTIASFLSKYQDIIIEHQKVVKGNQKRLESLRELAGKENLEYPSVTLPPQPHTKEGVDAYNEVIARVRMWVNLNLWQKLKLSRDDAKPLLRLKGFPSFPLVERQANEVDWWDMVCNVKKLINEKKEDGKVFWQNLAGYKRQEALRPYLSSEEDRKKGKKFARYQLGDLLLHLEKKHGEDWGKVYDEAWERIDKKVEGLSKHIKLEEERRSEDAQSKAALTDWLRAKASFVIEGKKEADKDEFCRCELKLQKWYGDLRGKPFAIEAENSILDISGFSKQYNCAFIWQKDGVKKLNLYLIINYFKGGKLRFKKIKPEAFEANRFYTVINKKSGEIVPMEVNFNFDDPNLIILPLAFGKRQGREFIWNDLLSLETGSLKLANGRVIEKTLYNRRTRQDEPALFVALTFERREVLDSSNIKPMNLIGVDRGENIPAVIALTDPEGCPLSRFKDSLGNPTHILRIGESYKEKQRTIQAKKEVEQRRAGGYSRKYASKAKNLADDMVRNTARDLLYYAVTQDAMLIFENLSRGFGRQGKRTFMAERQYTRMEDWLTAKLAYEGLPSKTYLSKTLAQYTSKTCSNCGFTITSADYDRVLEKLKKTATGWMTTINGKELKVEGQITYYNRYKRQNVVKDLSVELDRLSEESVNNDISSWTKGRSGEALSLLKKRFSHRPVQEKFVCLNCGFETHADEQAALNIARSWLFLRSQEYKKYQTNKTTGNTDKRAFVETWQSFYRKKLKEVWKPAV

SEQ ID NO: 42722 - protein, 978 aa, synthetic construct
  REGION 1..978: note = engineered CasX variant
QEIKRINKIRRRLVKDSNTKKAGKTGPMKTLLVRVMTPDLRERLENLRKKPENIPQPISNTSRANLNKLLTDYTEMKKAILHVYDEEFQKDPVGLMSRVAQPASKKIDQNKLKPEMDEKGNLTTAGFACSQCGQPLFVYKLEQVSEKGKAYTNYFGRCNVAEHEKLILLAQLKPEKDSDEAVTYSLGKFGQRALDFYSIHVTKESTHPVKPLAQIAGNRYASYPVGKALSDACMGTIASFLSKYQDIIIEHQKVVKGNQKRLESLRELAGKENLEYPSVTLPPQPHTKEGVDAYNEVIARVRMWVNLNLWQKLKLSRDDAKPLLRLKGFPSFPLVERQANEVDWWDMVCNVKKLINEKKEDGKVFWQNLAGYKRQEALRPYLSSEEDRKKGKKFARYQLGDLLLHLEKKHGEDWGKVYDEAWERIDKKVEGLSKHIKLEEERRSEDAQSKAALTDWLRAKASFVIEGSKEADKDEFCRCELKLQKWYGDLRGKPFAIEAENSILDISGFSKQYNCAFIWQKDGVKKLNLYLIINYFKGGKLRFKKIKPEAFEANRFYTVINKKSGEIVPMEVNFNFDDPNLIILPLAFGKRQGREFIWNDLLSLETGSLKLANGRVIEKTLYNRRTRQDEPALFVALTFERREVLDSSNIKPMNLIGVDRGENIPAVIALTDPEGCPLSRFKDSLGNPTHILRIGESYKEKQRTIQAKKEVEQRRAGGYSRKYASKAKNLADDMVRNTARDLLYYAVTQDAMLIFENLSRGFGRQGKRTFMAERQYTRMEDWLTAKLAYEGLPSKTYLSKTLAQYTSKTCSNCGFTITSADYDRVLEKLKKTATGWMTTINGKELKVEGQITYYNRYKRQNVVKDLSVELDRLSEESVNNDISSWTKGRSGEALSLLKKRFSHRPVQEKFVCLNCGFETHADEQAALNIARSWLFLRSQEYKKYQTNKTTGNTDKRAFVETWQSFYRKKLKEVWKPAV

SEQ ID NO: 42723 - protein, 978 aa, synthetic construct
  REGION 1..978: note = engineered CasX variant
QEIKRINKIRRRLVKDSNTKKAGKTGPMKTLLVRVMTPDLRERLENLRKKPENIPQPISNTSRANLNKLLTDYTEMKKAILHVYDEEFQKDPVGLMSRVAQPASKKIDQNKLKPEMDEKGNLTTAGFACSQCGQPLFVYKLEQVSEKGKAYTNYFGRCNVAEHEKLILLAQLKPEKDSDEAVTYSLGKFGQRALDFYSIHVTKESTHPVKPLAQIAGNRYASHPVGKALSDACMGTIASFLSKYQDIIIEHQKVVKGNQKRLESLRELAGKENLEYPSVTLPPQPHTKEGVDAYNEVIARVRMWVNLNLWQKLKLSRDDAKPLLRLKGFPSFPLVERQANEVDWWDMVCNVKKLINEKKEDGKVFWQNLAGYKRQEALRPYLSSEEDRKKGKKFARYQLGDLLLHLEKKHGEDWGKVYDEAWERIDKKVEGLSKHIKLEEERRSEDAQSKAALTDWLRAKASFVIEGSKEADKDEFCRCELKLQKWYGDLRGKPFAIEAENSILDISGFSKQYNCAFIWQKDGVKKLNLYLIINYFKGGKLRFKKIKPEAFEANRFYTVINKKSGEIVPMEVNFNFDDPNLIILPLAFGKRQGREFIWNDLLSLETGSLKLANGRVIEKTLYNRRTRQDEPALFVALTFERREVLDSSNIKPMNLIGVDRGENIPAVIALTDPEGCPLSRFKDSLGNPTHILRIGESYKEKQRTIQAKKEVEQRRAGGYSRKYASKAKNLADDMVRNTARDLLYYAVTQDAMLIFENLSRGFGRQGKRTFMAERQYTRMEDWLTAKLAYEGLPSKTYLSKTLAQYTSKTCSNCGFTITSADYDRVLEKLKKTATGWMTTINGKELKVEGQITYYNRYKRQNVVKDLSVELDRLSEESVNNDISSWTKGRSGEALSLLKKRFSHRPVQEKFVCLNCGFETHADEQAALNIARSWLFLRSQEYKKYQTNKTTGNTDKRAFVETWQSFYRKKLKEVWKPAV

SEQ ID NO: 42724 - protein, 978 aa, synthetic construct
  REGION 1..978: note = engineered CasX variant
QEIKRINKIRRRLVKDSNTKKAGKTGPMKTLLVRVMTPDLRERLENLRKKPENIPQPISNTSRANLNKLLTDYTEMKKAILHVYDEEFQKDPVGLMSRVAQPASKKIDQNKLKPEMDEKGNLTTAGFACSQCGQPLFVYKLEQVSEKGKAYTNYFGRCNVAEHEKLILLAQLKPEKDSDEAVTYSLGKFGQRALDFYSIHVTKESTHPVKPLAQIAGNRYASSPVGKALSDACMGTIASFLSKYQDIIIEHQKVVKGNQKRLESLRELAGKENLEYPSVTLPPQPHTKEGVDAYNEVIARVRMWVNLNLWQKLKLSRDDAKPLLRLKGFPSFPLVERQANEVDWWDMVCNVKKLINEKKEDGKVFWQNLAGYKRQEALRPYLSSEEDRKKGKKFARYQLGDLLLHLEKKHGEDWGKVYDEAWERIDKKVEGLSKHIKLEEERRSEDAQSKAALTDWLRAKASFVIEGSKEADKDEFCRCELKLQKWYGDLRGKPFAIEAENSILDISGFSKQYNCAFIWQKDGVKKLNLYLIINYFKGGKLRFKKIKPEAFEANRFYTVINKKSGEIVPMEVNFNFDDPNLIILPLAFGKRQGREFIWNDLLSLETGSLKLANGRVIEKTLYNRRTRQDEPALFVALTFERREVLDSSNIKPMNLIGVDRGENIPAVIALTDPEGCPLSRFKDSLGNPTHILRIGESYKEKQRTIQAKKEVEQRRAGGYSRKYASKAKNLADDMVRNTARDLLYYAVTQDAMLIFENLSRGFGRQGKRTFMAERQYTRMEDWLTAKLAYEGLPSKTYLSKTLAQYTSKTCSNCGFTITSADYDRVLEKLKKTATGWMTTINGKELKVEGQITYYNRYKRQNVVKDLSVELDRLSEESVNNDISSWTKGRSGEALSLLKKRFSHRPVQEKFVCLNCGFETHADEQAALNIARSWLFLRSQEYKKYQTNKTTGNTDKRAFVETWQSFYRKKLKEVWKPAV

SEQ ID NO: 42725 - protein, 978 aa, synthetic construct
  REGION 1..978: note = engineered CasX variant
QEIKRINKIRRRLVKDSNTKKAGKTGPMKTLLVRVMTPDLRERLENLRKKPENIPQPISNTSRANLNKLLTDYTEMKKAILHVYDEEFQKDPVGLMSRVAQPASKKIDQNKLKPEMDEKGNLTTAGFACSQCGQPLFVYKLEQVSEKGKAYTNYFGRCNVAEHEKLILLAQLKPEKDSDEAVTYSLGKFGQRALDFYSIHVTKESTHPVKPLAQIAGNRYASTPVGKALSDACMGTIASFLSKYQDIIIEHQKVVKGNQKRLESLRELAGKENLEYPSVTLPPQPHTKEGVDAYNEVIARVRMWVNLNLWQKLKLSRDDAKPLLRLKGFPSFPLVERQANEVDWWDMVCNVKKLINEKKEDGKVFWQNLAGYKRQEALRPYLSSEEDRKKGKKFARYQLGDLLLHLEKKHGEDWGKVYDEAWERIDKKVEGLSKHIKLEEERRSEDAQSKAALTDWLRAKASFVIEGSKEADKDEFCRCELKLQKWYGDLRGKPFAIEAENSILDISGFSKQYNCAFIWQKDGVKKLNLYLIINYFKGGKLRFKKIKPEAFEANRFYTVINKKSGEIVPMEVNFNFDDPNLIILPLAFGKRQGREFIWNDLLSLETGSLKLANGRVIEKTLYNRRTRQDEPALFVALTFERREVLDSSNIKPMNLIGVDRGENIPAVIALTDPEGCPLSRFKDSLGNPTHILRIGESYKEKQRTIQAKKEVEQRRAGGYSRKYASKAKNLADDMVRNTARDLLYYAVTQDAMLIFENLSRGFGRQGKRTFMAERQYTRMEDWLTAKLAYEGLPSKTYLSKTLAQYTSKTCSNCGFTITSADYDRVLEKLKKTATGWMTTINGKELKVEGQITYYNRYKRQNVVKDLSVELDRLSEESVNNDISSWTKGRSGEALSLLKKRFSHRPVQEKFVCLNCGFETHADEQAALNIARSWLFLRSQEYKKYQTNKTTGNTDKRAFVETWQSFYRKKLKEVWKPAV

SEQ ID NO: 42726 - protein, 978 aa, synthetic construct
  REGION 1..978: note = engineered CasX variant
QEIKRINKIRRRLVKDSNTKKAGKTGPMKTLLVRVMTPDLRERLENLRKKPENIPQPISNTSRANLNKLLTDYTEMKKAILHVYDEEFQKDPVGLMSRVAQPASKKIDQNKLKPEMDEKGNLTTAGFACSQCGQPLFVYKLEQVSEKGKAYTNYFGRCNVAEHEKLILLAQLKPEKDSDEAVTYSLGKFGQRALDFYSIHVTKESTHPVKPLAQIAGNRYASAPVGKALSDACMGTIASFLSKYQDIIIEHQKVVKGNQKRLESLRELAGKENLEYPSVTLPPQPHTKEGVDAYNEVIARVRMWVNLNLWQKLKLSRDDAKPLLRLKGFPSFPLVERQANEVDWWDMVCNVKKLINEKKEDGKVFWQNLAGYKRQEALRPYLSSEEDRKKGKKFARYQLGDLLLHLEKKHGEDWGKVYDEAWERIDKKVEGLSKHIKLEEERRSEDAQSKAALTDWLRAKASFVIEGSKEADKDEFCRCELKLQKWYGDLRGKPFAIEAENSILDISGFSKQYNCAFIWQKDGVKKLNLYLIINYFKGGKLRFKKIKPEAFEANRFYTVINKKSGEIVPMEVNFNFDDPNLIILPLAFGKRQGREFIWNDLLSLETGSLKLANGRVIEKTLYNRRTRQDEPALFVALTFERREVLDSSNIKPMNLIGVDRGENIPAVIALTDPEGCPLSRFKDSLGNPTHILRIGESYKEKQRTIQAKKEVEQRRAGGYSRKYASKAKNLADDMVRNTARDLLYYAVTQDAMLIFENLSRGFGRQGKRTFMAERQYTRMEDWLTAKLAYEGLPSKTYLSKTLAQYTSKTCSNCGFTITSADYDRVLEKLKKTATGWMTTINGKELKVEGQITYYNRYKRQNVVKDLSVELDRLSEESVNNDISSWTKGRSGEALSLLKKRFSHRPVQEKFVCLNCGFETHADEQAALNIARSWLFLRSQEYKKYQTNKTTGNTDKRAFVETWQSFYRKKLKEVWKPAV

SEQ ID NO: 42727 - protein, 978 aa, synthetic construct
  REGION 1..978: note = engineered CasX variant
QEIKRINKIRRRLVKDSNTKKAGKTGPMKTLLVRVMTPDLRERLENLRKKPENIPQPISNTSRANLNKLLTDYTEMKKAILHVYDEEFQKDPVGLMSRVAQPASKKIDQNKLKPEMDEKGNLTTAGFACSQCGQPLFVYKLEQVSEKGKAYTNYFGRCNVAEHEKLILLAQLKPEKDSDEAVTYSLGKFGQRALDFYSIHVTKESTHPVKPLAQIAGNRYASVPVGKALSDACMGTIASFLSKYQDIIIEHQKVVKGNQKRLESLRELAGKENLEYPSVTLPPQPHTKEGVDAYNEVIARVRMWVNLNLWQKLKLSRDDAKPLLRLKGFPSFPLVERQANEVDWWDMVCNVKKLINEKKEDGKVFWQNLAGYKRQEALRPYLSSEEDRKKGKKFARYQLGDLLLHLEKKHGEDWGKVYDEAWERIDKKVEGLSKHIKLEEERRSEDAQSKAALTDWLRAKASFVIEGSKEADKDEFCRCELKLQKWYGDLRGKPFAIEAENSILDISGFSKQYNCAFIWQKDGVKKLNLYLIINYFKGGKLRFKKIKPEAFEANRFYTVINKKSGEIVPMEVNFNFDDPNLIILPLAFGKRQGREFIWNDLLSLETGSLKLANGRVIEKTLYNRRTRQDEPALFVALTFERREVLDSSNIKPMNLIGVDRGENIPAVIALTDPEGCPLSRFKDSLGNPTHILRIGESYKEKQRTIQAKKEVEQRRAGGYSRKYASKAKNLADDMVRNTARDLLYYAVTQDAMLIFENLSRGFGRQGKRTFMAERQYTRMEDWLTAKLAYEGLPSKTYLSKTLAQYTSKTCSNCGFTITSADYDRVLEKLKKTATGWMTTINGKELKVEGQITYYNRYKRQNVVKDLSVELDRLSEESVNNDISSWTKGRSGEALSLLKKRFSHRPVQEKFVCLNCGFETHADEQAALNIARSWLFLRSQEYKKYQTNKTTGNTDKRAFVETWQSFYRKKLKEVWKPAV

SEQ ID NO: 42728 - protein, 978 aa, synthetic construct
  REGION 1..978: note = engineered CasX variant
QEIKRINKIRRRLVKDSNTKKAGKTGPMKTLLVRVMTPDLRERLENLRKKPENIPQPISNTSRANLNKLLTDYTEMKKAILHVYDEEFQKDPVGLMSRVAQPASKKIDQNKLKPEMDEKGNLTTAGFACSQCGQPLFVYKLEQVSEKGKAYTNYFGRCNVAEHEKLIKLAQLKPEKDSDEAVTYSLGKFGQRALDFYSIHVTKESTHPVKPLAQIAGNRYASGPVGKALSDACMGTIASFLSKYQDIIIEHQKVVKGNQKRLESLRELAGKENLEYPSVTLPPQPHTKEGVDAYNEVIARVRMWVNLNLWQKLKLSRDDAKPLLRLKGFPSFPLVERQANEVDWWDMVCNVKKLINEKKEDGKVFWQNLAGYKRQEALRPYLSSEEDRKKGKKFARYQLGDLLLHLEKKHGEDWGKVYDEAWERIDKKVEGLSKHIKLEEERRSEDAQSKAALTDWLRAKASFVIEGSKEADKDEFCRCELKLQKWYGDLRGKPFAIEAENSILDISGFSKQYNCAFIWQKDGVKKLNLYLIINYFKGGKLRFKKIKPEAFEANRFYTVINKKSGEIVPMEVNFNFDDPNLIILPLAFGKRQGREFIWNDLLSLETGSLKLANGRVIEKTLYNRRTRQDEPALFVALTFERREVLDSSNIKPMNLIGVDRGENIPAVIALTDPEGCPLSRFKDSLGNPTHILRIGESYKEKQRTIQAKKEVEQRRAGGYSRKYASKAKNLADDMVRNTARDLLYYAVTQDAMLIFENLSRGFGRQGKRTFMAERQYTRMEDWLTAKLAYEGLPSKTYLSKTLAQYTSKTCSNCGFTITSADYDRVLEKLKKTATGWMTTINGKELKVEGQITYYNRYKRQNVVKDLSVELDRLSEESVNNDISSWTKGRSGEALSLLKKRFSHRPVQEKFVCLNCGFETHADEQAALNIARSWLFLRSQEYKKYQTNKTTGNTDKRAFVETWQSFYRKKLKEVWKPAV

SEQ ID NO: 42729 - protein, 977 aa, synthetic construct
  REGION 1..977: note = engineered CasX variant
QEIKRINKIRRRLVKDSNTKKAGKTGPMKTLLVRVMTPDLRERLENLRKKPENIPQPISNTSRANLNKLLTDYTEMKKAILHVYDEEFQKDPVGLMSRVAQPASKKIDQNKLKPEMDEKGNLTTAGFACSQCGQPLFVYKLEQVSEKGKAYTNYFGRCNVAEHEKLILLAQLKPEKDSDEAVTYSLGKFGQRALDFYSIHVTKESTHPVKPLAQIAGNRYASPVGKALSDACMGTIASFLSKYQDIIIEHQKVVKGNQKRLESLRELAGKENLEYPSVTLPPQPHTKEGVDAYNEVIARVRMWVNLNLWQKLKLSRDDAKPLLRLKGFPSFPLVERQANEVDWWDMVCNVKKLINEKKEDGKVFWQNLAGYKRQEALRPYLSSEEDRKKGKKFARYQLGDLLLHLEKKHGEDWGKVYDEAWERIDKKVEGLSKHIKLEEERRSEDAQSKAALTDWLRAKASFVIEGSKEADKDEFCRCELKLQKWYGDLRGKPFAIEAENSILDISGFSKQYNCAFIWQKDGVKKLNLYLIINYFKGGKLRFKKIKPEAFEANRFYTVINKKSGEIVPMEVNFNFDDPNLIILPLAFGKRQGREFIWNDLLSLETGSLKLANGRVIEKTLYNRRTRQDEPALFVALTFERREVLDSSNIKPMNLIGVDRGENIPAVIALTDPEGCPLSRFKDSLGNPTHILRIGESYKEKQRTIQAKKEVEQRRAGGYSRKYASKAKNLADDMVRNTARDLLYYAVTQDAMLIFENLSRGFGRQGKRTFMAERQYTRMEDWLTAKLAYEGLPSKTYLSKTLAQYTSKTCSNCGFTITSADYDRVLEKLKKTATGWMTTINGKELKVEGQITYYNRYKRQNVVKDLSVELDRLSEESVNNDISSWTKGRSGEALSLLKKRFSHRPVQEKFVCLNCGFETHADEQAALNIARSWLFLRSQEYKKYQTNKTTGNTDKRAFVETWQSFYRKKLKEVWKPAV

SEQ ID NO: 42730 - protein, 979 aa, synthetic construct
  REGION 1..979: note = engineered CasX variant
QEIKRINKIRRRLVKDSNTKKAGKTGPMKTLLVRVMTPDLRERLENLRKKPENIPQPISNTSRANLNKLLTDYTEMKKAILHVYDEEFQKDPVGLMSRVAQPASKKIDQNKLKPEMDEKGNLTTAGFACSQCGQPLFVYKLEQVSEKGKAYTNYFGRCNVAEHEKLILLAQLKPEKDSDEAVTYSLGKFGQRALDFYSIHVTKESTHPVKPLAQIAGNRYASYPVGKALSDACMGTIASFLSKYQDIIIEHQKVVKGNQKRLESLRELAGKENLEYPSVTLPPQPHTKEGVDAYNEVIARVRMWVNLNLWQKLKLSRDDAKPLLRLKGFPSFPLVERQANEVDWWDMVCNVKKLINEKKEDGKVFWQNLAGYKRQEALRPYLSSEEDRKKGKKFARYQLGDLLLHLEKKHGEDWGKVYDEAWERIDKKVEGLSKHIKLEEERRSEDAQSKAALTDWLRAKASFVIEGLKEADDKDEFCRCELKLQKWYGDLRGKPFAIEAENSILDISGFSKQYNCAFIWQKDGVKKLNLYLIINYFKGGKLRFKKIKPEAFEANRFYTVINKKSGEIVPMEVNFNFDDPNLIILPLAFGKRQGREFIWNDLLSLETGSLKLANGRVIEKTLYNRRTRQDEPALFVALTFERREVLDSSNIKPMNLIGVDRGENIPAVIALTDPEGCPLSRFKDSLGNPTHILRIGESYKEKQRTIQAKKEVEQRRAGGYSRKYASKAKNLADDMVRNTARDLLYYAVTQDAMLIFENLSRGFGRQGKRTFMAERQYTRMEDWLTAKLAYEGLPSKTYLSKTLAQYTSKTCSNCGFTITSADYDRVLEKLKKTATGWMTTINGKELKVEGQITYYNRYKRQNVVKDLSVELDRLSEESVNNDISSWTKGRSGEALSLLKKRFSHRPVQEKFVCLNCGFETHADEQAALNIARSWLFLRSQEYKKYQTNKTTGNTDKRAFVETWQSFYRKKLKEVWKPAV

SEQ ID NO: 42731 - protein, 979 aa, synthetic construct
  REGION 1..979: note = engineered CasX variant
QEIKRINKIRRRLVKDSNTKKAGKTGPMKTLLVRVMTPDLRERLENLRKKPENIPQPISNTSRANLNKLLTDYTEMKKAILHVYDEEFQKDPVGLMSRVAQPASKKIDQNKLKPEMDEKGNLTTAGFACSQCGQPLFVYKLEQVSEKGKAYTNYFGRCNVAEHEKLILLAQLKPEKDSDEAVTYSLGKFGQRALDFYSIHVTKESTHPVKPLAQIAGNRYASHPVGKALSDACMGTIASFLSKYQDIIIEHQKVVKGNQKRLESLRELAGKENLEYPSVTLPPQPHTKEGVDAYNEVIARVRMWVNLNLWQKLKLSRDDAKPLLRLKGFPSFPLVERQANEVDWWDMVCNVKKLINEKKEDGKVFWQNLAGYKRQEALRPYLSSEEDRKKGKKFARYQLGDLLLHLEKKHGEDWGKVYDEAWERIDKKVEGLSKHIKLEEERRSEDAQSKAALTDWLRAKASFVIEGLKEADDKDEFCRCELKLQKWYGDLRGKPFAIEAENSILDISGFSKQYNCAFIWQKDGVKKLNLYLIINYFKGGKLRFKKIKPEAFEANRFYTVINKKSGEIVPMEVNFNFDDPNLIILPLAFGKRQGREFIWNDLLSLETGSLKLANGRVIEKTLYNRRTRQDEPALFVALTFERREVLDSSNIKPMNLIGVDRGENIPAVIALTDPEGCPLSRFKDSLGNPTHILRIGESYKEKQRTIQAKKEVEQRRAGGYSRKYASKAKNLADDMVRNTARDLLYYAVTQDAMLIFENLSRGFGRQGKRTFMAERQYTRMEDWLTAKLAYEGLPSKTYLSKTLAQYTSKTCSNCGFTITSADYDRVLEKLKKTATGWMTTINGKELKVEGQITYYNRYKRQNVVKDLSVELDRLSEESVNNDISSWTKGRSGEALSLLKKRFSHRPVQEKFVCLNCGFETHADEQAALNIARSWLFLRSQEYKKYQTNKTTGNTDKRAFVETWQSFYRKKLKEVWKPAV

SEQ ID NO: 42732 - protein, 979 aa, synthetic construct
  REGION 1..979: note = engineered CasX variant
QEIKRINKIRRRLVKDSNTKKAGKTGPMKTLLVRVMTPDLRERLENLRKKPENIPQPISNTSRANLNKLLTDYTEMKKAILHVYDEEFQKDPVGLMSRVAQPASKKIDQNKLKPEMDEKGNLTTAGFACSQCGQPLFVYKLEQVSEKGKAYTNYFGRCNVAEHEKLILLAQLKPEKDSDEAVTYSLGKFGQRALDFYSIHVTKESTHPVKPLAQIAGNRYASSPVGKALSDACMGTIASFLSKYQDIIIEHQKVVKGNQKRLESLRELAGKENLEYPSVTLPPQPHTKEGVDAYNEVIARVRMWVNLNLWQKLKLSRDDAKPLLRLKGFPSFPLVERQANEVDWWDMVCNVKKLINEKKEDGKVFWQNLAGYKRQEALRPYLSSEEDRKKGKKFARYQLGDLLLHLEKKHGEDWGKVYDEAWERIDKKVEGLSKHIKLEEERRSEDAQSKAALTDWLRAKASFVIEGLKEADDKDEFCRCELKLQKWYGDLRGKPFAIEAENSILDISGFSKQYNCAFIWQKDGVKKLNLYLIINYFKGGKLRFKKIKPEAFEANRFYTVINKKSGEIVPMEVNFNFDDPNLIILPLAFGKRQGREFIWNDLLSLETGSLKLANGRVIEKTLYNRRTRQDEPALFVALTFERREVLDSSNIKPMNLIGVDRGENIPAVIALTDPEGCPLSRFKDSLGNPTHILRIGESYKEKQRTIQAKKEVEQRRAGGYSRKYASKAKNLADDMVRNTARDLLYYAVTQDAMLIFENLSRGFGRQGKRTFMAERQYTRMEDWLTAKLAYEGLPSKTYLSKTLAQYTSKTCSNCGFTITSADYDRVLEKLKKTATGWMTTINGKELKVEGQITYYNRYKRQNVVKDLSVELDRLSEESVNNDISSWTKGRSGEALSLLKKRFSHRPVQEKFVCLNCGFETHADEQAALNIARSWLFLRSQEYKKYQTNKTTGNTDKRAFVETWQSFYRKKLKEVWKPAV

SEQ ID NO: 42733 - protein, 979 aa, synthetic construct
  REGION 1..979: note = engineered CasX variant
QEIKRINKIRRRLVKDSNTKKAGKTGPMKTLLVRVMTPDLRERLENLRKKPENIPQPISNTSRANLNKLLTDYTEMKKAILHVYDEEFQKDPVGLMSRVAQPASKKIDQNKLKPEMDEKGNLTTAGFACSQCGQPLFVYKLEQVSEKGKAYTNYFGRCNVAEHEKLILLAQLKPEKDSDEAVTYSLGKFGQRALDFYSIHVTKESTHPVKPLAQIAGNRYASTPVGKALSDACMGTIASFLSKYQDIIIEHQKVVKGNQKRLESLRELAGKENLEYPSVTLPPQPHTKEGVDAYNEVIARVRMWVNLNLWQKLKLSRDDAKPLLRLKGFPSFPLVERQANEVDWWDMVCNVKKLINEKKEDGKVFWQNLAGYKRQEALRPYLSSEEDRKKGKKFARYQLGDLLLHLEKKHGEDWGKVYDEAWERIDKKVEGLSKHIKLEEERRSEDAQSKAALTDWLRAKASFVIEGLKEADDKDEFCRCELKLQKWYGDLRGKPFAIEAENSILDISGFSKQYNCAFIWQKDGVKKLNLYLIINYFKGGKLRFKKIKPEAFEANRFYTVINKKSGEIVPMEVNFNFDDPNLIILPLAFGKRQGREFIWNDLLSLETGSLKLANGRVIEKTLYNRRTRQDEPALFVALTFERREVLDSSNIKPMNLIGVDRGENIPAVIALTDPEGCPLSRFKDSLGNPTHILRIGESYKEKQRTIQAKKEVEQRRAGGYSRKYASKAKNLADDMVRNTARDLLYYAVTQDAMLIFENLSRGFGRQGKRTFMAERQYTRMEDWLTAKLAYEGLPSKTYLSKTLAQYTSKTCSNCGFTITSADYDRVLEKLKKTATGWMTTINGKELKVEGQITYYNRYKRQNVVKDLSVELDRLSEESVNNDISSWTKGRSGEALSLLKKRFSHRPVQEKFVCLNCGFETHADEQAALNIARSWLFLRSQEYKKYQTNKTTGNTDKRAFVETWQSFYRKKLKEVWKPAV

SEQ ID NO: 42734 - protein, 979 aa, synthetic construct
  REGION 1..979: note = engineered CasX variant
QEIKRINKIRRRLVKDSNTKKAGKTGPMKTLLVRVMTPDLRERLENLRKKPENIPQPISNTSRANLNKLLTDYTEMKKAILHVYDEEFQKDPVGLMSRVAQPASKKIDQNKLKPEMDEKGNLTTAGFACSQCGQPLFVYKLEQVSEKGKAYTNYFGRCNVAEHEKLILLAQLKPEKDSDEAVTYSLGKFGQRALDFYSIHVTKESTHPVKPLAQIAGNRYASAPVGKALSDACMGTIASFLSKYQDIIIEHQKVVKGNQKRLESLRELAGKENLEYPSVTLPPQPHTKEGVDAYNEVIARVRMWVNLNLWQKLKLSRDDAKPLLRLKGFPSFPLVERQANEVDWWDMVCNVKKLINEKKEDGKVFWQNLAGYKRQEALRPYLSSEEDRKKGKKFARYQLGDLLLHLEKKHGEDWGKVYDEAWERIDKKVEGLSKHIKLEEERRSEDAQSKAALTDWLRAKASFVIEGLKEADDKDEFCRCELKLQKWYGDLRGKPFAIEAENSILDISGFSKQYNCAFIWQKDGVKKLNLYLIINYFKGGKLRFKKIKPEAFEANRFYTVINKKSGEIVPMEVNFNFDDPNLIILPLAFGKRQGREFIWNDLLSLETGSLKLANGRVIEKTLYNRRTRQDEPALFVALTFERREVLDSSNIKPMNLIGVDRGENIPAVIALTDPEGCPLSRFKDSLGNPTHILRIGESYKEKQRTIQAKKEVEQRRAGGYSRKYASKAKNLADDMVRNTARDLLYYAVTQDAMLIFENLSRGFGRQGKRTFMAERQYTRMEDWLTAKLAYEGLPSKTYLSKTLAQYTSKTCSNCGFTITSADYDRVLEKLKKTATGWMTTINGKELKVEGQITYYNRYKRQNVVKDLSVELDRLSEESVNNDISSWTKGRSGEALSLLKKRFSHRPVQEKFVCLNCGFETHADEQAALNIARSWLFLRSQEYKKYQTNKTTGNTDKRAFVETWQSFYRKKLKEVWKPAV

SEQ ID NO: 42735 - protein, 979 aa, synthetic construct
  REGION 1..979: note = engineered CasX variant
QEIKRINKIRRRLVKDSNTKKAGKTGPMKTLLVRVMTPDLRERLENLRKKPENIPQPISNTSRANLNKLLTDYTEMKKAILHVYDEEFQKDPVGLMSRVAQPASKKIDQNKLKPEMDEKGNLTTAGFACSQCGQPLFVYKLEQVSEKGKAYTNYFGRCNVAEHEKLILLAQLKPEKDSDEAVTYSLGKFGQRALDFYSIHVTKESTHPVKPLAQIAGNRYASVPVGKALSDACMGTIASFLSKYQDIIIEHQKVVKGNQKRLESLRELAGKENLEYPSVTLPPQPHTKEGVDAYNEVIARVRMWVNLNLWQKLKLSRDDAKPLLRLKGFPSFPLVERQANEVDWWDMVCNVKKLINEKKEDGKVFWQNLAGYKRQEALRPYLSSEEDRKKGKKFARYQLGDLLLHLEKKHGEDWGKVYDEAWERIDKKVEGLSKHIKLEEERRSEDAQSKAALTDWLRAKASFVIEGLKEADDKDEFCRCELKLQKWYGDLRGKPFAIEAENSILDISGFSKQYNCAFIWQKDGVKKLNLYLIINYFKGGKLRFKKIKPEAFEANRFYTVINKKSGEIVPMEVNFNFDDPNLIILPLAFGKRQGREFIWNDLLSLETGSLKLANGRVIEKTLYNRRTRQDEPALFVALTFERREVLDSSNIKPMNLIGVDRGENIPAVIALTDPEGCPLSRFKDSLGNPTHILRIGESYKEKQRTIQAKKEVEQRRAGGYSRKYASKAKNLADDMVRNTARDLLYYAVTQDAMLIFENLSRGFGRQGKRTFMAERQYTRMEDWLTAKLAYEGLPSKTYLSKTLAQYTSKTCSNCGFTITSADYDRVLEKLKKTATGWMTTINGKELKVEGQITYYNRYKRQNVVKDLSVELDRLSEESVNNDISSWTKGRSGEALSLLKKRFSHRPVQEKFVCLNCGFETHADEQAALNIARSWLFLRSQEYKKYQTNKTTGNTDKRAFVETWQSFYRKKLKEVWKPAV

SEQ ID NO: 42736 - protein, 979 aa, synthetic construct
  REGION 1..979: note = engineered CasX variant
QEIKRINKIRRRLVKDSNTKKAGKTGPMKTLLVRVMTPDLRERLENLRKKPENIPQPISNTSRANLNKLLTDYTEMKKAILHVYDEEFQKDPVGLMSRVAQPASKKIDQNKLKPEMDEKGNLTTAGFACSQCGQPLFVYKLEQVSEKGKAYTNYFGRCNVAEHEKLIKLAQLKPEKDSDEAVTYSLGKFGQRALDFYSIHVTKESTHPVKPLAQIAGNRYASGPVGKALSDACMGTIASFLSKYQDIIIEHQKVVKGNQKRLESLRELAGKENLEYPSVTLPPQPHTKEGVDAYNEVIARVRMWVNLNLWQKLKLSRDDAKPLLRLKGFPSFPLVERQANEVDWWDMVCNVKKLINEKKEDGKVFWQNLAGYKRQEALRPYLSSEEDRKKGKKFARYQLGDLLLHLEKKHGEDWGKVYDEAWERIDKKVEGLSKHIKLEEERRSEDAQSKAALTDWLRAKASFVIEGLKEADDKDEFCRCELKLQKWYGDLRGKPFAIEAENSILDISGFSKQYNCAFIWQKDGVKKLNLYLIINYFKGGKLRFKKIKPEAFEANRFYTVINKKSGEIVPMEVNFNFDDPNLIILPLAFGKRQGREFIWNDLLSLETGSLKLANGRVIEKTLYNRRTRQDEPALFVALTFERREVLDSSNIKPMNLIGVDRGENIPAVIALTDPEGCPLSRFKDSLGNPTHILRIGESYKEKQRTIQAKKEVEQRRAGGYSRKYASKAKNLADDMVRNTARDLLYYAVTQDAMLIFENLSRGFGRQGKRTFMAERQYTRMEDWLTAKLAYEGLPSKTYLSKTLAQYTSKTCSNCGFTITSADYDRVLEKLKKTATGWMTTINGKELKVEGQITYYNRYKRQNVVKDLSVELDRLSEESVNNDISSWTKGRSGEALSLLKKRFSHRPVQEKFVCLNCGFETHADEQAALNIARSWLFLRSQEYKKYQTNKTTGNTDKRAFVETWQSFYRKKLKEVWKPAV

SEQ ID NO: 42737 - protein, 978 aa, synthetic construct
  REGION 1..978: note = engineered CasX variant
QEIKRINKIRRRLVKDSNTKKAGKTGPMKTLLVRVMTPDLRERLENLRKKPENIPQPISNTSRANLNKLLTDYTEMKKAILHVYDEEFQKDPVGLMSRVAQPASKKIDQNKLKPEMDEKGNLTTAGFACSQCGQPLFVYKLEQVSEKGKAYTNYFGRCNVAEHEKLILLAQLKPEKDSDEAVTYSLGKFGQRALDFYSIHVTKESTHPVKPLAQIAGNRYASPVGKALSDACMGTIASFLSKYQDIIIEHQKVVKGNQKRLESLRELAGKENLEYPSVTLPPQPHTKEGVDAYNEVIARVRMWVNLNLWQKLKLSRDDAKPLLRLKGFPSFPLVERQANEVDWWDMVCNVKKLINEKKEDGKVFWQNLAGYKRQEALRPYLSSEEDRKKGKKFARYQLGDLLLHLEKKHGEDWGKVYDEAWERIDKKVEGLSKHIKLEEERRSEDAQSKAALTDWLRAKASFVIEGLKEADDKDEFCRCELKLQKWYGDLRGKPFAIEAENSILDISGFSKQYNCAFIWQKDGVKKLNLYLIINYFKGGKLRFKKIKPEAFEANRFYTVINKKSGEIVPMEVNFNFDDPNLIILPLAFGKRQGREFIWNDLLSLETGSLKLANGRVIEKTLYNRRTRQDEPALFVALTFERREVLDSSNIKPMNLIGVDRGENIPAVIALTDPEGCPLSRFKDSLGNPTHILRIGESYKEKQRTIQAKKEVEQRRAGGYSRKYASKAKNLADDMVRNTARDLLYYAVTQDAMLIFENLSRGFGRQGKRTFMAERQYTRMEDWLTAKLAYEGLPSKTYLSKTLAQYTSKTCSNCGFTITSADYDRVLEKLKKTATGWMTTINGKELKVEGQITYYNRYKRQNVVKDLSVELDRLSEESVNNDISSWTKGRSGEALSLLKKRFSHRPVQEKFVCLNCGFETHADEQAALNIARSWLFLRSQEYKKYQTNKTTGNTDKRAFVETWQSFYRKKLKEVWKPAV

SEQ ID NO: 42738 - protein, 979 aa, synthetic construct
  REGION 1..979: note = engineered CasX variant
QEIKRINKIRRRLVKDSNTKKAGKTGPMKTLLVRVMTPDLRERLENLRKKPENIPQPISNTSRANLNKLLTDYTEMKKAILHVYDEEFQKDPVGLMSRVAQPASKKIDQNKLKPEMDEKGNLTTAGFACSQCGQPLFVYKLEQVSEKGKAYTNYFGRCNVAEHEKLILLAQLKPEKDSDEAVTYSLGKFGQRALDFYSIHVTKESTHPVKPLAQIAGNRYASYPVGKALSDACMGTIASFLSKYQDIIIEHQKVVKGNQKRLESLRELAGKENLEYPSVTLPPQPHTKEGVDAYNEVIARVRMWVNLNLWQKLKLSRDDAKPLLRLKGFPSFPLVERQANEVDWWDMVCNVKKLINEKKEDGKVFWQNLAGYKRQEALRPYLSSEEDRKKGKKFARYQLGDLLLHLEKKHGEDWGKVYDEAWERIDKKVEGLSKHIKLEEERRSEDAQSKAALTDWLRAKASFVIEGLKEADKDEFCRCELKLQKWYGDLRGKPFAIEAENSILDISGFSKQYNCAFIWQKDGVKKLNLYLIINYFKGGKLRFKKIKPEAFEANRFYTVINKKSGEIVPMEVNFNFDDPNLIILPLAFGKRQGREFIWNDLLSLETGSLKLANGRVIEKTLYNRRTRQDEPALFVALTFERREVLDSSNIKPMNLIGVDRGENIPAVIALTDPEGCPLSRFKDSLGNPTHILRIGESYKEKQRTIQAKKEVEQRRAGGYSRKYASKAKNLADDMVRNTARDLLYYAVTQDAMLIFENLSRGFGRQGKRTFMAERQYTRMEDWLTAKLAYEGLPSKTYLSKTLAQYTSKTCSNCGFTITSADYDRVLEKLKKTATGWMTTINGKELKVEGQITYYNRYKRQNVVKDLSVELDRLSEESVNNDISSWTKGRSGNEALSLLKKRFSHRPVQEKFVCLNCGFETHADEQAALNIARSWLFLRSQEYKKYQTNKTTGNTDKRAFVETWQSFYRKKLKEVWKPAV

SEQ ID NO: 42739 - protein, 979 aa, synthetic construct
  REGION 1..979: note = engineered CasX variant
QEIKRINKIRRRLVKDSNTKKAGKTGPMKTLLVRVMTPDLRERLENLRKKPENIPQPISNTSRANLNKLLTDYTEMKKAILHVYDEEFQKDPVGLMSRVAQPASKKIDQNKLKPEMDEKGNLTTAGFACSQCGQPLFVYKLEQVSEKGKAYTNYFGRCNVAEHEKLILLAQLKPEKDSDEAVTYSLGKFGQRALDFYSIHVTKESTHPVKPLAQIAGNRYASHPVGKALSDACMGTIASFLSKYQDIIIEHQKVVKGNQKRLESLRELAGKENLEYPSVTLPPQPHTKEGVDAYNEVIARVRMWVNLNLWQKLKLSRDDAKPLLRLKGFPSFPLVERQANEVDWWDMVCNVKKLINEKKEDGKVFWQNLAGYKRQEALRPYLSSEEDRKKGKKFARYQLGDLLLHLEKKHGEDWGKVYDEAWERIDKKVEGLSKHIKLEEERRSEDAQSKAALTDWLRAKASFVIEGLKEADKDEFCRCELKLQKWYGDLRGKPFAIEAENSILDISGFSKQYNCAFIWQKDGVKKLNLYLIINYFKGGKLRFKKIKPEAFEANRFYTVINKKSGEIVPMEVNFNFDDPNLIILPLAFGKRQGREFIWNDLLSLETGSLKLANGRVIEKTLYNRRTRQDEPALFVALTFERREVLDSSNIKPMNLIGVDRGENIPAVIALTDPEGCPLSRFKDSLGNPTHILRIGESYKEKQRTIQAKKEVEQRRAGGYSRKYASKAKNLADDMVRNTARDLLYYAVTQDAMLIFENLSRGFGRQGKRTFMAERQYTRMEDWLTAKLAYEGLPSKTYLSKTLAQYTSKTCSNCGFTITSADYDRVLEKLKKTATGWMTTINGKELKVEGQITYYNRYKRQNVVKDLSVELDRLSEESVNNDISSWTKGRSGNEALSLLKKRFSHRPVQEKFVCLNCGFETHADEQAALNIARSWLFLRSQEYKKYQTNKTTGNTDKRAFVETWQSFYRKKLKEVWKPAV

SEQ ID NO: 42740 - protein, 979 aa, synthetic construct
  REGION 1..979: note = engineered CasX variant
QEIKRINKIRRRLVKDSNTKKAGKTGPMKTLLVRVMTPDLRERLENLRKKPENIPQPISNTSRANLNKLLTDYTEMKKAILHVYDEEFQKDPVGLMSRVAQPASKKIDQNKLKPEMDEKGNLTTAGFACSQCGQPLFVYKLEQVSEKGKAYTNYFGRCNVAEHEKLILLAQLKPEKDSDEAVTYSLGKFGQRALDFYSIHVTKESTHPVKPLAQIAGNRYASSPVGKALSDACMGTIASFLSKYQDIIIEHQKVVKGNQKRLESLRELAGKENLEYPSVTLPPQPHTKEGVDAYNEVIARVRMWVNLNLWQKLKLSRDDAKPLLRLKGFPSFPLVERQANEVDWWDMVCNVKKLINEKKEDGKVFWQNLAGYKRQEALRPYLSSEEDRKKGKKFARYQLGDLLLHLEKKHGEDWGKVYDEAWERIDKKVEGLSKHIKLEEERRSEDAQSKAALTDWLRAKASFVIEGLKEADKDEFCRCELKLQKWYGDLRGKPFAIEAENSILDISGFSKQYNCAFIWQKDGVKKLNLYLIINYFKGGKLRFKKIKPEAFEANRFYTVINKKSGEIVPMEVNFNFDDPNLIILPLAFGKRQGREFIWNDLLSLETGSLKLANGRVIEKTLYNRRTRQDEPALFVALTFERREVLDSSNIKPMNLIGVDRGENIPAVIALTDPEGCPLSRFKDSLGNPTHILRIGESYKEKQRTIQAKKEVEQRRAGGYSRKYASKAKNLADDMVRNTARDLLYYAVTQDAMLIFENLSRGFGRQGKRTFMAERQYTRMEDWLTAKLAYEGLPSKTYLSKTLAQYTSKTCSNCGFTITSADYDRVLEKLKKTATGWMTTINGKELKVEGQITYYNRYKRQNVVKDLSVELDRLSEESVNNDISSWTKGRSGNEALSLLKKRFSHRPVQEKFVCLNCGFETHADEQAALNIARSWLFLRSQEYKKYQTNKTTGNTDKRAFVETWQSFYRKKLKEVWKPAV

SEQ ID NO: 42741 - protein, 979 aa, synthetic construct
  REGION 1..979: note = engineered CasX variant
QEIKRINKIRRRLVKDSNTKKAGKTGPMKTLLVRVMTPDLRERLENLRKKPENIPQPISNTSRANLNKLLTDYTEMKKAILHVYDEEFQKDPVGLMSRVAQPASKKIDQNKLKPEMDEKGNLTTAGFACSQCGQPLFVYKLEQVSEKGKAYTNYFGRCNVAEHEKLILLAQLKPEKDSDEAVTYSLGKFGQRALDFYSIHVTKESTHPVKPLAQIAGNRYASTPVGKALSDACMGTIASFLSKYQDIIIEHQKVVKGNQKRLESLRELAGKENLEYPSVTLPPQPHTKEGVDAYNEVIARVRMWVNLNLWQKLKLSRDDAKPLLRLKGFPSFPLVERQANEVDWWDMVCNVKKLINEKKEDGKVFWQNLAGYKRQEALRPYLSSEEDRKKGKKFARYQLGDLLLHLEKKHGEDWGKVYDEAWERIDKKVEGLSKHIKLEEERRSEDAQSKAALTDWLRAKASFVIEGLKEADKDEFCRCELKLQKWYGDLRGKPFAIEAENSILDISGFSKQYNCAFIWQKDGVKKLNLYLIINYFKGGKLRFKKIKPEAFEANRFYTVINKKSGEIVPMEVNFNFDDPNLIILPLAFGKRQGREFIWNDLLSLETGSLKLANGRVIEKTLYNRRTRQDEPALFVALTFERREVLDSSNIKPMNLIGVDRGENIPAVIALTDPEGCPLSRFKDSLGNPTHILRIGESYKEKQRTIQAKKEVEQRRAGGYSRKYASKAKNLADDMVRNTARDLLYYAVTQDAMLIFENLSRGFGRQGKRTFMAERQYTRMEDWLTAKLAYEGLPSKTYLSKTLAQYTSKTCSNCGFTITSADYDRVLEKLKKTATGWMTTINGKELKVEGQITYYNRYKRQNVVKDLSVELDRLSEESVNNDISSWTKGRSGNEALSLLKKRFSHRPVQEKFVCLNCGFETHADEQAALNIARSWLFLRSQEYKKYQTNKTTGNTDKRAFVETWQSFYRKKLKEVWKPAV

SEQ ID NO: 42742 - protein, 979 aa, synthetic construct
  REGION 1..979: note = engineered CasX variant
QEIKRINKIRRRLVKDSNTKKAGKTGPMKTLLVRVMTPDLRERLENLRKKPENIPQPISNTSRANLNKLLTDYTEMKKAILHVYDEEFQKDPVGLMSRVAQPASKKIDQNKLKPEMDEKGNLTTAGFACSQCGQPLFVYKLEQVSEKGKAYTNYFGRCNVAEHEKLILLAQLKPEKDSDEAVTYSLGKFGQRALDFYSIHVTKESTHPVKPLAQIAGNRYASAPVGKALSDACMGTIASFLSKYQDIIIEHQKVVKGNQKRLESLRELAGKENLEYPSVTLPPQPHTKEGVDAYNEVIARVRMWVNLNLWQKLKLSRDDAKPLLRLKGFPSFPLVERQANEVDWWDMVCNVKKLINEKKEDGKVFWQNLAGYKRQEALRPYLSSEEDRKKGKKFARYQLGDLLLHLEKKHGEDWGKVYDEAWERIDKKVEGLSKHIKLEEERRSEDAQSKAALTDWLRAKASFVIEGLKEADKDEFCRCELKLQKWYGDLRGKPFAIEAENSILDISGFSKQYNCAFIWQKDGVKKLNLYLIINYFKGGKLRFKKIKPEAFEANRFYTVINKKSGEIVPMEVNFNFDDPNLIILPLAFGKRQGREFIWNDLLSLETGSLKLANGRVIEKTLYNRRTRQDEPALFVALTFERREVLDSSNIKPMNLIGVDRGENIPAVIALTDPEGCPLSRFKDSLGNPTHILRIGESYKEKQRTIQAKKEVEQRRAGGYSRKYASKAKNLADDMVRNTARDLLYYAVTQDAMLIFENLSRGFGRQGKRTFMAERQYTRMEDWLTAKLAYEGLPSKTYLSKTLAQYTSKTCSNCGFTITSADYDRVLEKLKKTATGWMTTINGKELKVEGQITYYNRYKRQNVVKDLSVELDRLSEESVNNDISSWTKGRSGNEALSLLKKRFSHRPVQEKFVCLNCGFETHADEQAALNIARSWLFLRSQEYKKYQTNKTTGNTDKRAFVETWQSFYRKKLKEVWKPAV

SEQ ID NO: 42743 - protein, 979 aa, synthetic construct
  REGION 1..979: note = engineered CasX variant
QEIKRINKIRRRLVKDSNTKKAGKTGPMKTLLVRVMTPDLRERLENLRKKPENIPQPISNTSRANLNKLLTDYTEMKKAILHVYDEEFQKDPVGLMSRVAQPASKKIDQNKLKPEMDEKGNLTTAGFACSQCGQPLFVYKLEQVSEKGKAYTNYFGRCNVAEHEKLILLAQLKPEKDSDEAVTYSLGKFGQRALDFYSIHVTKESTHPVKPLAQIAGNRYASVPVGKALSDACMGTIASFLSKYQDIIIEHQKVVKGNQKRLESLRELAGKENLEYPSVTLPPQPHTKEGVDAYNEVIARVRMWVNLNLWQKLKLSRDDAKPLLRLKGFPSFPLVERQANEVDWWDMVCNVKKLINEKKEDGKVFWQNLAGYKRQEALRPYLSSEEDRKKGKKFARYQLGDLLLHLEKKHGEDWGKVYDEAWERIDKKVEGLSKHIKLEEERRSEDAQSKAALTDWLRAKASFVIEGLKEADKDEFCRCELKLQKWYGDLRGKPFAIEAENSILDISGFSKQYNCAFIWQKDGVKKLNLYLIINYFKGGKLRFKKIKPEAFEANRFYTVINKKSGEIVPMEVNFNFDDPNLIILPLAFGKRQGREFIWNDLLSLETGSLKLANGRVIEKTLYNRRTRQDEPALFVALTFERREVLDSSNIKPMNLIGVDRGENIPAVIALTDPEGCPLSRFKDSLGNPTHILRIGESYKEKQRTIQAKKEVEQRRAGGYSRKYASKAKNLADDMVRNTARDLLYYAVTQDAMLIFENLSRGFGRQGKRTFMAERQYTRMEDWLTAKLAYEGLPSKTYLSKTLAQYTSKTCSNCGFTITSADYDRVLEKLKKTATGWMTTINGKELKVEGQITYYNRYKRQNVVKDLSVELDRLSEESVNNDISSWTKGRSGNEALSLLKKRFSHRPVQEKFVCLNCGFETHADEQAALNIARSWLFLRSQEYKKYQTNKTTGNTDKRAFVETWQSFYRKKLKEVWKPAV

SEQ ID NO: 42744 - protein, 979 aa, synthetic construct
  REGION 1..979: note = engineered CasX variant
QEIKRINKIRRRLVKDSNTKKAGKTGPMKTLLVRVMTPDLRERLENLRKKPENIPQPISNTSRANLNKLLTDYTEMKKAILHVYDEEFQKDPVGLMSRVAQPASKKIDQNKLKPEMDEKGNLTTAGFACSQCGQPLFVYKLEQVSEKGKAYTNYFGRCNVAEHEKLIKLAQLKPEKDSDEAVTYSLGKFGQRALDFYSIHVTKESTHPVKPLAQIAGNRYASGPVGKALSDACMGTIASFLSKYQDIIIEHQKVVKGNQKRLESLRELAGKENLEYPSVTLPPQPHTKEGVDAYNEVIARVRMWVNLNLWQKLKLSRDDAKPLLRLKGFPSFPLVERQANEVDWWDMVCNVKKLINEKKEDGKVFWQNLAGYKRQEALRPYLSSEEDRKKGKKFARYQLGDLLLHLEKKHGEDWGKVYDEAWERIDKKVEGLSKHIKLEEERRSEDAQSKAALTDWLRAKASFVIEGLKEADKDEFCRCELKLQKWYGDLRGKPFAIEAENSILDISGFSKQYNCAFIWQKDGVKKLNLYLIINYFKGGKLRFKKIKPEAFEANRFYTVINKKSGEIVPMEVNFNFDDPNLIILPLAFGKRQGREFIWNDLLSLETGSLKLANGRVIEKTLYNRRTRQDEPALFVALTFERREVLDSSNIKPMNLIGVDRGENIPAVIALTDPEGCPLSRFKDSLGNPTHILRIGESYKEKQRTIQAKKEVEQRRAGGYSRKYASKAKNLADDMVRNTARDLLYYAVTQDAMLIFENLSRGFGRQGKRTFMAERQYTRMEDWLTAKLAYEGLPSKTYLSKTLAQYTSKTCSNCGFTITSADYDRVLEKLKKTATGWMTTINGKELKVEGQITYYNRYKRQNVVKDLSVELDRLSEESVNNDISSWTKGRSGNEALSLLKKRFSHRPVQEKFVCLNCGFETHADEQAALNIARSWLFLRSQEYKKYQTNKTTGNTDKRAFVETWQSFYRKKLKEVWKPAV

SEQ ID NO: 42745 - protein, 978 aa, synthetic construct
  REGION 1..978: note = engineered CasX variant
QEIKRINKIRRRLVKDSNTKKAGKTGPMKTLLVRVMTPDLRERLENLRKKPENIPQPISNTSRANLNKLLTDYTEMKKAILHVYDEEFQKDPVGLMSRVAQPASKKIDQNKLKPEMDEKGNLTTAGFACSQCGQPLFVYKLEQVSEKGKAYTNYFGRCNVAEHEKLILLAQLKPEKDSDEAVTYSLGKFGQRALDFYSIHVTKESTHPVKPLAQIAGNRYASPVGKALSDACMGTIASFLSKYQDIIIEHQKVVKGNQKRLESLRELAGKENLEYPSVTLPPQPHTKEGVDAYNEVIARVRMWVNLNLWQKLKLSRDDAKPLLRLKGFPSFPLVERQANEVDWWDMVCNVKKLINEKKEDGKVFWQNLAGYKRQEALRPYLSSEEDRKKGKKFARYQLGDLLLHLEKKHGEDWGKVYDEAWERIDKKVEGLSKHIKLEEERRSEDAQSKAALTDWLRAKASFVIEGLKEADKDEFCRCELKLQKWYGDLRGKPFAIEAENSILDISGFSKQYNCAFIWQKDGVKKLNLYLIINYFKGGKLRFKKIKPEAFEANRFYTVINKKSGEIVPMEVNFNFDDPNLIILPLAFGKRQGREFIWNDLLSLETGSLKLANGRVIEKTLYNRRTRQDEPALFVALTFERREVLDSSNIKPMNLIGVDRGENIPAVIALTDPEGCPLSRFKDSLGNPTHILRIGESYKEKQRTIQAKKEVEQRRAGGYSRKYASKAKNLADDMVRNTARDLLYYAVTQDAMLIFENLSRGFGRQGKRTFMAERQYTRMEDWLTAKLAYEGLPSKTYLSKTLAQYTSKTCSNCGFTITSADYDRVLEKLKKTATGWMTTINGKELKVEGQITYYNRYKRQNVVKDLSVELDRLSEESVNNDISSWTKGRSGNEALSLLKKRFSHRPVQEKFVCLNCGFETHADEQAALNIARSWLFLRSQEYKKYQTNKTTGNTDKRAFVETWQSFYRKKLKEVWKPAV

SEQ ID NO: 42746 - protein, 978 aa, synthetic construct
  REGION 1..978: note = engineered CasX variant
QEIKRINKIRRRLVKDSNTKKAGKTGPMKTLLVRVMTPDLRERLENLRKKPENIPQPISNTSRANLNKLLTDYTEMKKAILHVYDEEFQKDPVGLMSRVAQPASKKIDQNKLKPEMDEKGNLTTAGFACSQCGQPLFVYKLEQVSEKGKAYTNYFGRCNVAEHEKLILLAQLKPEKDSDEAVTYSLGKFGQRALDFYSIHVTKESTHPVKPLAQIAGNRYASYPVGKALSDACMGTIASFLSKYQDIIIEHQKVVKGNQKRLESLRELAGKENLEYPSVTLPPQPHTKEGVDAYNEVIARVRMWVNLNLWQKLKLSRDDAKPLLRLKGFPSFPLVERQANEVDWWDMVCNVKKLINEKKEDGKVFWQNLAGYKRQEALRPYLSSEEDRQKGKKFARYQLGDLLLHLEKKHGEDWGKVYDEAWERIDKKVEGLSKHIKLEEERRSEDAQSKAALTDWLRAKASFVIEGLKEADKDEFCRCELKLQKWYGDLRGKPFAIEAENSILDISGFSKQYNCAFIWQKDGVKKLNLYLIINYFKGGKLRFKKIKPEAFEANRFYTVINKKSGEIVPMEVNFNFDDPNLIILPLAFGKRQGREFIWNDLLSLETGSLKLANGRVIEKTLYNRRTRQDEPALFVALTFERREVLDSSNIKPMNLIGVDRGENIPAVIALTDPEGCPLSRFKDSLGNPTHILRIGESYKEKQRTIQAKKEVEQRRAGGYSRKYASKAKNLADDMVRNTARDLLYYAVTQDAMLIFENLSRGFGRQGKRTFMAERQYTRMEDWLTAKLAYEGLPSKTYLSKTLAQYTSKTCSNCGFTITSADYDRVLEKLKKTATGWMTTINGKELKVEGQITYYNRYKRQNVVKDLSVELDRLSEESVNNDISSWTKGRSGEALSLLKKRFSHRPVQEKFVCLNCGFETHADEQAALNIARSWLFLRSQEYKKYQTNKTTGNTDKRAFVETWQSFYRKKLKEVWKPAV

SEQ ID NO: 42747 - protein, 978 aa, synthetic construct
  REGION 1..978: note = engineered CasX variant
QEIKRINKIRRRLVKDSNTKKAGKTGPMKTLLVRVMTPDLRERLENLRKKPENIPQPISNTSRANLNKLLTDYTEMKKAILHVYDEEFQKDPVGLMSRVAQPASKKIDQNKLKPEMDEKGNLTTAGFACSQCGQPLFVYKLEQVSEKGKAYTNYFGRCNVAEHEKLILLAQLKPEKDSDEAVTYSLGKFGQRALDFYSIHVTKESTHPVKPLAQIAGNRYASHPVGKALSDACMGTIASFLSKYQDIIIEHQKVVKGNQKRLESLRELAGKENLEYPSVTLPPQPHTKEGVDAYNEVIARVRMWVNLNLWQKLKLSRDDAKPLLRLKGFPSFPLVERQANEVDWWDMVCNVKKLINEKKEDGKVFWQNLAGYKRQEALRPYLSSEEDRQKGKKFARYQLGDLLLHLEKKHGEDWGKVYDEAWERIDKKVEGLSKHIKLEEERRSEDAQSKAALTDWLRAKASFVIEGLKEADKDEFCRCELKLQKWYGDLRGKPFAIEAENSILDISGFSKQYNCAFIWQKDGVKKLNLYLIINYFKGGKLRFKKIKPEAFEANRFYTVINKKSGEIVPMEVNFNFDDPNLIILPLAFGKRQGREFIWNDLLSLETGSLKLANGRVIEKTLYNRRTRQDEPALFVALTFERREVLDSSNIKPMNLIGVDRGENIPAVIALTDPEGCPLSRFKDSLGNPTHILRIGESYKEKQRTIQAKKEVEQRRAGGYSRKYASKAKNLADDMVRNTARDLLYYAVTQDAMLIFENLSRGFGRQGKRTFMAERQYTRMEDWLTAKLAYEGLPSKTYLSKTLAQYTSKTCSNCGFTITSADYDRVLEKLKKTATGWMTTINGKELKVEGQITYYNRYKRQNVVKDLSVELDRLSEESVNNDISSWTKGRSGEALSLLKKRFSHRPVQEKFVCLNCGFETHADEQAALNIARSWLFLRSQEYKKYQTNKTTGNTDKRAFVETWQSFYRKKLKEVWKPAV

SEQ ID NO: 42748 - protein, 978 aa, synthetic construct
  REGION 1..978: note = engineered CasX variant
QEIKRINKIRRRLVKDSNTKKAGKTGPMKTLLVRVMTPDLRERLENLRKKPENIPQPISNTSRANLNKLLTDYTEMKKAILHVYDEEFQKDPVGLMSRVAQPASKKIDQNKLKPEMDEKGNLTTAGFACSQCGQPLFVYKLEQVSEKGKAYTNYFGRCNVAEHEKLILLAQLKPEKDSDEAVTYSLGKFGQRALDFYSIHVTKESTHPVKPLAQIAGNRYASSPVGKALSDACMGTIASFLSKYQDIIIEHQKVVKGNQKRLESLRELAGKENLEYPSVTLPPQPHTKEGVDAYNEVIARVRMWVNLNLWQKLKLSRDDAKPLLRLKGFPSFPLVERQANEVDWWDMVCNVKKLINEKKEDGKVFWQNLAGYKRQEALRPYLSSEEDRQKGKKFARYQLGDLLLHLEKKHGEDWGKVYDEAWERIDKKVEGLSKHIKLEEERRSEDAQSKAALTDWLRAKASFVIEGLKEADKDEFCRCELKLQKWYGDLRGKPFAIEAENSILDISGFSKQYNCAFIWQKDGVKKLNLYLIINYFKGGKLRFKKIKPEAFEANRFYTVINKKSGEIVPMEVNFNFDDPNLIILPLAFGKRQGREFIWNDLLSLETGSLKLANGRVIEKTLYNRRTRQDEPALFVALTFERREVLDSSNIKPMNLIGVDRGENIPAVIALTDPEGCPLSRFKDSLGNPTHILRIGESYKEKQRTIQAKKEVEQRRAGGYSRKYASKAKNLADDMVRNTARDLLYYAVTQDAMLIFENLSRGFGRQGKRTFMAERQYTRMEDWLTAKLAYEGLPSKTYLSKTLAQYTSKTCSNCGFTITSADYDRVLEKLKKTATGWMTTINGKELKVEGQITYYNRYKRQNVVKDLSVELDRLSEESVNNDISSWTKGRSGEALSLLKKRFSHRPVQEKFVCLNCGFETHADEQAALNIARSWLFLRSQEYKKYQTNKTTGNTDKRAFVETWQSFYRKKLKEVWKPAV

SEQ ID NO: 42749 - protein, 978 aa, synthetic construct
  REGION 1..978: note = engineered CasX variant
QEIKRINKIRRRLVKDSNTKKAGKTGPMKTLLVRVMTPDLRERLENLRKKPENIPQPISNTSRANLNKLLTDYTEMKKAILHVYDEEFQKDPVGLMSRVAQPASKKIDQNKLKPEMDEKGNLTTAGFACSQCGQPLFVYKLEQVSEKGKAYTNYFGRCNVAEHEKLILLAQLKPEKDSDEAVTYSLGKFGQRALDFYSIHVTKESTHPVKPLAQIAGNRYASTPVGKALSDACMGTIASFLSKYQDIIIEHQKVVKGNQKRLESLRELAGKENLEYPSVTLPPQPHTKEGVDAYNEVIARVRMWVNLNLWQKLKLSRDDAKPLLRLKGFPSFPLVERQANEVDWWDMVCNVKKLINEKKEDGKVFWQNLAGYKRQEALRPYLSSEEDRQKGKKFARYQLGDLLLHLEKKHGEDWGKVYDEAWERIDKKVEGLSKHIKLEEERRSEDAQSKAALTDWLRAKASFVIEGLKEADKDEFCRCELKLQKWYGDLRGKPFAIEAENSILDISGFSKQYNCAFIWQKDGVKKLNLYLIINYFKGGKLRFKKIKPEAFEANRFYTVINKKSGEIVPMEVNFNFDDPNLIILPLAFGKRQGREFIWNDLLSLETGSLKLANGRVIEKTLYNRRTRQDEPALFVALTFERREVLDSSNIKPMNLIGVDRGENIPAVIALTDPEGCPLSRFKDSLGNPTHILRIGESYKEKQRTIQAKKEVEQRRAGGYSRKYASKAKNLADDMVRNTARDLLYYAVTQDAMLIFENLSRGFGRQGKRTFMAERQYTRMEDWLTAKLAYEGLPSKTYLSKTLAQYTSKTCSNCGFTITSADYDRVLEKLKKTATGWMTTINGKELKVEGQITYYNRYKRQNVVKDLSVELDRLSEESVNNDISSWTKGRSGEALSLLKKRFSHRPVQEKFVCLNCGFETHADEQAALNIARSWLFLRSQEYKKYQTNKTTGNTDKRAFVETWQSFYRKKLKEVWKPAV

SEQ ID NO: 42750 - protein, 978 aa, synthetic construct
  REGION 1..978: note = engineered CasX variant
QEIKRINKIRRRLVKDSNTKKAGKTGPMKTLLVRVMTPDLRERLENLRKKPENIPQPISNTSRANLNKLLTDYTEMKKAILHVYDEEFQKDPVGLMSRVAQPASKKIDQNKLKPEMDEKGNLTTAGFACSQCGQPLFVYKLEQVSEKGKAYTNYFGRCNVAEHEKLILLAQLKPEKDSDEAVTYSLGKFGQRALDFYSIHVTKESTHPVKPLAQIAGNRYASAPVGKALSDACMGTIASFLSKYQDIIIEHQKVVKGNQKRLESLRELAGKENLEYPSVTLPPQPHTKEGVDAYNEVIARVRMWVNLNLWQKLKLSRDDAKPLLRLKGFPSFPLVERQANEVDWWDMVCNVKKLINEKKEDGKVFWQNLAGYKRQEALRPYLSSEEDRQKGKKFARYQLGDLLLHLEKKHGEDWGKVYDEAWERIDKKVEGLSKHIKLEEERRSEDAQSKAALTDWLRAKASFVIEGLKEADKDEFCRCELKLQKWYGDLRGKPFAIEAENSILDISGFSKQYNCAFIWQKDGVKKLNLYLIINYFKGGKLRFKKIKPEAFEANRFYTVINKKSGEIVPMEVNFNFDDPNLIILPLAFGKRQGREFIWNDLLSLETGSLKLANGRVIEKTLYNRRTRQDEPALFVALTFERREVLDSSNIKPMNLIGVDRGENIPAVIALTDPEGCPLSRFKDSLGNPTHILRIGESYKEKQRTIQAKKEVEQRRAGGYSRKYASKAKNLADDMVRNTARDLLYYAVTQDAMLIFENLSRGFGRQGKRTFMAERQYTRMEDWLTAKLAYEGLPSKTYLSKTLAQYTSKTCSNCGFTITSADYDRVLEKLKKTATGWMTTINGKELKVEGQITYYNRYKRQNVVKDLSVELDRLSEESVNNDISSWTKGRSGEALSLLKKRFSHRPVQEKFVCLNCGFETHADEQAALNIARSWLFLRSQEYKKYQTNKTTGNTDKRAFVETWQSFYRKKLKEVWKPAV

SEQ ID NO: 42751 - protein, 978 aa, synthetic construct
  REGION 1..978: note = engineered CasX variant
QEIKRINKIRRRLVKDSNTKKAGKTGPMKTLLVRVMTPDLRERLENLRKKPENIPQPISNTSRANLNKLLTDYTEMKKAILHVYDEEFQKDPVGLMSRVAQPASKKIDQNKLKPEMDEKGNLTTAGFACSQCGQPLFVYKLEQVSEKGKAYTNYFGRCNVAEHEKLILLAQLKPEKDSDEAVTYSLGKFGQRALDFYSIHVTKESTHPVKPLAQIAGNRYASVPVGKALSDACMGTIASFLSKYQDIIIEHQKVVKGNQKRLESLRELAGKENLEYPSVTLPPQPHTKEGVDAYNEVIARVRMWVNLNLWQKLKLSRDDAKPLLRLKGFPSFPLVERQANEVDWWDMVCNVKKLINEKKEDGKVFWQNLAGYKRQEALRPYLSSEEDRQKGKKFARYQLGDLLLHLEKKHGEDWGKVYDEAWERIDKKVEGLSKHIKLEEERRSEDAQSKAALTDWLRAKASFVIEGLKEADKDEFCRCELKLQKWYGDLRGKPFAIEAENSILDISGFSKQYNCAFIWQKDGVKKLNLYLIINYFKGGKLRFKKIKPEAFEANRFYTVINKKSGEIVPMEVNFNFDDPNLIILPLAFGKRQGREFIWNDLLSLETGSLKLANGRVIEKTLYNRRTRQDEPALFVALTFERREVLDSSNIKPMNLIGVDRGENIPAVIALTDPEGCPLSRFKDSLGNPTHILRIGESYKEKQRTIQAKKEVEQRRAGGYSRKYASKAKNLADDMVRNTARDLLYYAVTQDAMLIFENLSRGFGRQGKRTFMAERQYTRMEDWLTAKLAYEGLPSKTYLSKTLAQYTSKTCSNCGFTITSADYDRVLEKLKKTATGWMTTINGKELKVEGQITYYNRYKRQNVVKDLSVELDRLSEESVNNDISSWTKGRSGEALSLLKKRFSHRPVQEKFVCLNCGFETHADEQAALNIARSWLFLRSQEYKKYQTNKTTGNTDKRAFVETWQSFYRKKLKEVWKPAV

SEQ ID NO: 42752 - protein, 978 aa, synthetic construct
  REGION 1..978: note = engineered CasX variant
QEIKRINKIRRRLVKDSNTKKAGKTGPMKTLLVRVMTPDLRERLENLRKKPENIPQPISNTSRANLNKLLTDYTEMKKAILHVYDEEFQKDPVGLMSRVAQPASKKIDQNKLKPEMDEKGNLTTAGFACSQCGQPLFVYKLEQVSEKGKAYTNYFGRCNVAEHEKLIKLAQLKPEKDSDEAVTYSLGKFGQRALDFYSIHVTKESTHPVKPLAQIAGNRYASGPVGKALSDACMGTIASFLSKYQDIIIEHQKVVKGNQKRLESLRELAGKENLEYPSVTLPPQPHTKEGVDAYNEVIARVRMWVNLNLWQKLKLSRDDAKPLLRLKGFPSFPLVERQANEVDWWDMVCNVKKLINEKKEDGKVFWQNLAGYKRQEALRPYLSSEEDRQKGKKFARYQLGDLLLHLEKKHGEDWGKVYDEAWERIDKKVEGLSKHIKLEEERRSEDAQSKAALTDWLRAKASFVIEGLKEADKDEFCRCELKLQKWYGDLRGKPFAIEAENSILDISGFSKQYNCAFIWQKDGVKKLNLYLIINYFKGGKLRFKKIKPEAFEANRFYTVINKKSGEIVPMEVNFNFDDPNLIILPLAFGKRQGREFIWNDLLSLETGSLKLANGRVIEKTLYNRRTRQDEPALFVALTFERREVLDSSNIKPMNLIGVDRGENIPAVIALTDPEGCPLSRFKDSLGNPTHILRIGESYKEKQRTIQAKKEVEQRRAGGYSRKYASKAKNLADDMVRNTARDLLYYAVTQDAMLIFENLSRGFGRQGKRTFMAERQYTRMEDWLTAKLAYEGLPSKTYLSKTLAQYTSKTCSNCGFTITSADYDRVLEKLKKTATGWMTTINGKELKVEGQITYYNRYKRQNVVKDLSVELDRLSEESVNNDISSWTKGRSGEALSLLKKRFSHRPVQEKFVCLNCGFETHADEQAALNIARSWLFLRSQEYKKYQTNKTTGNTDKRAFVETWQSFYRKKLKEVWKPAV

SEQ ID NO: 42753 - protein, 977 aa, synthetic construct
  REGION 1..977: note = engineered CasX variant
QEIKRINKIRRRLVKDSNTKKAGKTGPMKTLLVRVMTPDLRERLENLRKKPENIPQPISNTSRANLNKLLTDYTEMKKAILHVYDEEFQKDPVGLMSRVAQPASKKIDQNKLKPEMDEKGNLTTAGFACSQCGQPLFVYKLEQVSEKGKAYTNYFGRCNVAEHEKLILLAQLKPEKDSDEAVTYSLGKFGQRALDFYSIHVTKESTHPVKPLAQIAGNRYASPVGKALSDACMGTIASFLSKYQDIIIEHQKVVKGNQKRLESLRELAGKENLEYPSVTLPPQPHTKEGVDAYNEVIARVRMWVNLNLWQKLKLSRDDAKPLLRLKGFPSFPLVERQANEVDWWDMVCNVKKLINEKKEDGKVFWQNLAGYKRQEALRPYLSSEEDRQKGKKFARYQLGDLLLHLEKKHGEDWGKVYDEAWERIDKKVEGLSKHIKLEEERRSEDAQSKAALTDWLRAKASFVIEGLKEADKDEFCRCELKLQKWYGDLRGKPFAIEAENSILDISGFSKQYNCAFIWQKDGVKKLNLYLIINYFKGGKLRFKKIKPEAFEANRFYTVINKKSGEIVPMEVNFNFDDPNLIILPLAFGKRQGREFIWNDLLSLETGSLKLANGRVIEKTLYNRRTRQDEPALFVALTFERREVLDSSNIKPMNLIGVDRGENIPAVIALTDPEGCPLSRFKDSLGNPTHILRIGESYKEKQRTIQAKKEVEQRRAGGYSRKYASKAKNLADDMVRNTARDLLYYAVTQDAMLIFENLSRGFGRQGKRTFMAERQYTRMEDWLTAKLAYEGLPSKTYLSKTLAQYTSKTCSNCGFTITSADYDRVLEKLKKTATGWMTTINGKELKVEGQITYYNRYKRQNVVKDLSVELDRLSEESVNNDISSWTKGRSGEALSLLKKRFSHRPVQEKFVCLNCGFETHADEQAALNIARSWLFLRSQEYKKYQTNKTTGNTDKRAFVETWQSFYRKKLKEVWKPAV

SEQ ID NO: 42754 - protein, 978 aa, synthetic construct
  REGION 1..978: note = engineered CasX variant
QEIKRINKIRRRLVKDSNTKKAGKTGPMKTLLVRVMTPDLRERLENLRKKPENIPQPISNTSRANLNKLLTDYTEMKKAILHVYDEEFQKDPVGLMSRVAQPASKKIDQNKLKPEMDEKGNLTTAGFACSQCGQPLFVYKLEQVSEKGKAYTNYFGRCNVAEHEKLILLAQLKPEKDSDEAVTYSLGKFGQRALDFYSIHVTKESTHPVKPLAQIAGNRYASYPVGKALSDACMGTIASFLSKYQDIIIEHQKVVKGNQKRLESLRELAGKENLEYPSVTLPPQPHTKEGVDAYNEVIARVRMWVNLNLWQKLKLSRDDAKPLLRLKGFPSFPLVERQANEVDWWDMVCNVKKLINEKKEDGKVFWQNLAGYKRQEALRPYLSSEEDRKKGKKFARYQLGDLLLHLEKKHGEDWGKVYDEAWERIDKKVEGLSKHIKLEEERRSEDAQSKAALTDWLRAKASFVIEGLKEADKDEFCRCELKLQKWYGDLRGKPFAIEAENSILDISGFSKQYNCAFIWQKDGVKKLNLYLIINYFKGGKLRFKKIKPEAFEANRFYTVINKKSGEIVPMEVNFNFDDPNLIILPLAFGKRQGREFIWNDLLSLETGSLKLANGRVIEKTLYNRRTRQDEPALFVALTFERREVLDSSNIKPMNLIGVDRGENIPAVIALTDPEGCPLSRFKDSLGNPTHILRIGESYKEKQRTIQAKKEVEQRRAGGYSRKYASKAKNLADDMVRNTARDLLYYAVTQDAMLIFENLSRGFGRQGKRTFMAERQYTRMEDWLTAKLAYEGLPSQTYLSKTLAQYTSKTCSNCGFTITSADYDRVLEKLKKTATGWMTTINGKELKVEGQITYYNRYKRQNVVKDLSVELDRLSEESVNNDISSWTKGRSGEALSLLKKRFSHRPVQEKFVCLNCGFETHADEQAALNIARSWLFLRSQEYKKYQTNKTTGNTDKRAFVETWQSFYRKKLKEVWKPAV

SEQ ID NO: 42755 - protein, 978 aa, synthetic construct
  REGION 1..978: note = engineered CasX variant
QEIKRINKIRRRLVKDSNTKKAGKTGPMKTLLVRVMTPDLRERLENLRKKPENIPQPISNTSRANLNKLLTDYTEMKKAILHVYDEEFQKDPVGLMSRVAQPASKKIDQNKLKPEMDEKGNLTTAGFACSQCGQPLFVYKLEQVSEKGKAYTNYFGRCNVAEHEKLILLAQLKPEKDSDEAVTYSLGKFGQRALDFYSIHVTKESTHPVKPLAQIAGNRYASHPVGKALSDACMGTIASFLSKYQDIIIEHQKVVKGNQKRLESLRELAGKENLEYPSVTLPPQPHTKEGVDAYNEVIARVRMWVNLNLWQKLKLSRDDAKPLLRLKGFPSFPLVERQANEVDWWDMVCNVKKLINEKKEDGKVFWQNLAGYKRQEALRPYLSSEEDRKKGKKFARYQLGDLLLHLEKKHGEDWGKVYDEAWERIDKKVEGLSKHIKLEEERRSEDAQSKAALTDWLRAKASFVIEGLKEADKDEFCRCELKLQKWYGDLRGKPFAIEAENSILDISGFSKQYNCAFIWQKDGVKKLNLYLIINYFKGGKLRFKKIKPEAFEANRFYTVINKKSGEIVPMEVNFNFDDPNLIILPLAFGKRQGREFIWNDLLSLETGSLKLANGRVIEKTLYNRRTRQDEPALFVALTFERREVLDSSNIKPMNLIGVDRGENIPAVIALTDPEGCPLSRFKDSLGNPTHILRIGESYKEKQRTIQAKKEVEQRRAGGYSRKYASKAKNLADDMVRNTARDLLYYAVTQDAMLIFENLSRGFGRQGKRTFMAERQYTRMEDWLTAKLAYEGLPSQTYLSKTLAQYTSKTCSNCGFTITSADYDRVLEKLKKTATGWMTTINGKELKVEGQITYYNRYKRQNVVKDLSVELDRLSEESVNNDISSWTKGRSGEALSLLKKRFSHRPVQEKFVCLNCGFETHADEQAALNIARSWLFLRSQEYKKYQTNKTTGNTDKRAFVETWQSFYRKKLKEVWKPAV

SEQ ID NO: 42756 - protein, 978 aa, synthetic construct
  REGION 1..978: note = engineered CasX variant
QEIKRINKIRRRLVKDSNTKKAGKTGPMKTLLVRVMTPDLRERLENLRKKPENIPQPISNTSRANLNKLLTDYTEMKKAILHVYDEEFQKDPVGLMSRVAQPASKKIDQNKLKPEMDEKGNLTTAGFACSQCGQPLFVYKLEQVSEKGKAYTNYFGRCNVAEHEKLILLAQLKPEKDSDEAVTYSLGKFGQRALDFYSIHVTKESTHPVKPLAQIAGNRYASSPVGKALSDACMGTIASFLSKYQDIIIEHQKVVKGNQKRLESLRELAGKENLEYPSVTLPPQPHTKEGVDAYNEVIARVRMWVNLNLWQKLKLSRDDAKPLLRLKGFPSFPLVERQANEVDWWDMVCNVKKLINEKKEDGKVFWQNLAGYKRQEALRPYLSSEEDRKKGKKFARYQLGDLLLHLEKKHGEDWGKVYDEAWERIDKKVEGLSKHIKLEEERRSEDAQSKAALTDWLRAKASFVIEGLKEADKDEFCRCELKLQKWYGDLRGKPFAIEAENSILDISGFSKQYNCAFIWQKDGVKKLNLYLIINYFKGGKLRFKKIKPEAFEANRFYTVINKKSGEIVPMEVNFNFDDPNLIILPLAFGKRQGREFIWNDLLSLETGSLKLANGRVIEKTLYNRRTRQDEPALFVALTFERREVLDSSNIKPMNLIGVDRGENIPAVIALTDPEGCPLSRFKDSLGNPTHILRIGESYKEKQRTIQAKKEVEQRRAGGYSRKYASKAKNLADDMVRNTARDLLYYAVTQDAMLIFENLSRGFGRQGKRTFMAERQYTRMEDWLTAKLAYEGLPSQTYLSKTLAQYTSKTCSNCGFTITSADYDRVLEKLKKTATGWMTTINGKELKVEGQITYYNRYKRQNVVKDLSVELDRLSEESVNNDISSWTKGRSGEALSLLKKRFSHRPVQEKFVCLNCGFETHADEQAALNIARSWLFLRSQEYKKYQTNKTTGNTDKRAFVETWQSFYRKKLKEVWKPAV

SEQ ID NO: 42757 - protein, 978 aa, synthetic construct
  REGION 1..978: note = engineered CasX variant
QEIKRINKIRRRLVKDSNTKKAGKTGPMKTLLVRVMTPDLRERLENLRKKPENIPQPISNTSRANLNKLLTDYTEMKKAILHVYDEEFQKDPVGLMSRVAQPASKKIDQNKLKPEMDEKGNLTTAGFACSQCGQPLFVYKLEQVSEKGKAYTNYFGRCNVAEHEKLILLAQLKPEKDSDEAVTYSLGKFGQRALDFYSIHVTKESTHPVKPLAQIAGNRYASTPVGKALSDACMGTIASFLSKYQDIIIEHQKVVKGNQKRLESLRELAGKENLEYPSVTLPPQPHTKEGVDAYNEVIARVRMWVNLNLWQKLKLSRDDAKPLLRLKGFPSFPLVERQANEVDWWDMVCNVKKLINEKKEDGKVFWQNLAGYKRQEALRPYLSSEEDRKKGKKFARYQLGDLLLHLEKKHGEDWGKVYDEAWERIDKKVEGLSKHIKLEEERRSEDAQSKAALTDWLRAKASFVIEGLKEADKDEFCRCELKLQKWYGDLRGKPFAIEAENSILDISGFSKQYNCAFIWQKDGVKKLNLYLIINYFKGGKLRFKKIKPEAFEANRFYTVINKKSGEIVPMEVNFNFDDPNLIILPLAFGKRQGREFIWNDLLSLETGSLKLANGRVIEKTLYNRRTRQDEPALFVALTFERREVLDSSNIKPMNLIGVDRGENIPAVIALTDPEGCPLSRFKDSLGNPTHILRIGESYKEKQRTIQAKKEVEQRRAGGYSRKYASKAKNLADDMVRNTARDLLYYAVTQDAMLIFENLSRGFGRQGKRTFMAERQYTRMEDWLTAKLAYEGLPSQTYLSKTLAQYTSKTCSNCGFTITSADYDRVLEKLKKTATGWMTTINGKELKVEGQITYYNRYKRQNVVKDLSVELDRLSEESVNNDISSWTKGRSGEALSLLKKRFSHRPVQEKFVCLNCGFETHADEQAALNIARSWLFLRSQEYKKYQTNKTTGNTDKRAFVETWQSFYRKKLKEVWKPAV

SEQ ID NO: 42758 - protein, 978 aa, synthetic construct
  REGION 1..978: note = engineered CasX variant
QEIKRINKIRRRLVKDSNTKKAGKTGPMKTLLVRVMTPDLRERLENLRKKPENIPQPISNTSRANLNKLLTDYTEMKKAILHVYDEEFQKDPVGLMSRVAQPASKKIDQNKLKPEMDEKGNLTTAGFACSQCGQPLFVYKLEQVSEKGKAYTNYFGRCNVAEHEKLILLAQLKPEKDSDEAVTYSLGKFGQRALDFYSIHVTKESTHPVKPLAQIAGNRYASAPVGKALSDACMGTIASFLSKYQDIIIEHQKVVKGNQKRLESLRELAGKENLEYPSVTLPPQPHTKEGVDAYNEVIARVRMWVNLNLWQKLKLSRDDAKPLLRLKGFPSFPLVERQANEVDWWDMVCNVKKLINEKKEDGKVFWQNLAGYKRQEALRPYLSSEEDRKKGKKFARYQLGDLLLHLEKKHGEDWGKVYDEAWERIDKKVEGLSKHIKLEEERRSEDAQSKAALTDWLRAKASFVIEGLKEADKDEFCRCELKLQKWYGDLRGKPFAIEAENSILDISGFSKQYNCAFIWQKDGVKKLNLYLIINYFKGGKLRFKKIKPEAFEANRFYTVINKKSGEIVPMEVNFNFDDPNLIILPLAFGKRQGREFIWNDLLSLETGSLKLANGRVIEKTLYNRRTRQDEPALFVALTFERREVLDSSNIKPMNLIGVDRGENIPAVIALTDPEGCPLSRFKDSLGNPTHILRIGESYKEKQRTIQAKKEVEQRRAGGYSRKYASKAKNLADDMVRNTARDLLYYAVTQDAMLIFENLSRGFGRQGKRTFMAERQYTRMEDWLTAKLAYEGLPSQTYLSKTLAQYTSKTCSNCGFTITSADYDRVLEKLKKTATGWMTTINGKELKVEGQITYYNRYKRQNVVKDLSVELDRLSEESVNNDISSWTKGRSGEALSLLKKRFSHRPVQEKFVCLNCGFETHADEQAALNIARSWLFLRSQEYKKYQTNKTTGNTDKRAFVETWQSFYRKKLKEVWKPAV

SEQ ID NO: 42759 - protein, 978 aa, synthetic construct
  REGION 1..978: note = engineered CasX variant
QEIKRINKIRRRLVKDSNTKKAGKTGPMKTLLVRVMTPDLRERLENLRKKPENIPQPISNTSRANLNKLLTDYTEMKKAILHVYDEEFQKDPVGLMSRVAQPASKKIDQNKLKPEMDEKGNLTTAGFACSQCGQPLFVYKLEQVSEKGKAYTNYFGRCNVAEHEKLILLAQLKPEKDSDEAVTYSLGKFGQRALDFYSIHVTKESTHPVKPLAQIAGNRYASVPVGKALSDACMGTIASFLSKYQDIIIEHQKVVKGNQKRLESLRELAGKENLEYPSVTLPPQPHTKEGVDAYNEVIARVRMWVNLNLWQKLKLSRDDAKPLLRLKGFPSFPLVERQANEVDWWDMVCNVKKLINEKKEDGKVFWQNLAGYKRQEALRPYLSSEEDRKKGKKFARYQLGDLLLHLEKKHGEDWGKVYDEAWERIDKKVEGLSKHIKLEEERRSEDAQSKAALTDWLRAKASFVIEGLKEADKDEFCRCELKLQKWYGDLRGKPFAIEAENSILDISGFSKQYNCAFIWQKDGVKKLNLYLIINYFKGGKLRFKKIKPEAFEANRFYTVINKKSGEIVPMEVNFNFDDPNLIILPLAFGKRQGREFIWNDLLSLETGSLKLANGRVIEKTLYNRRTRQDEPALFVALTFERREVLDSSNIKPMNLIGVDRGENIPAVIALTDPEGCPLSRFKDSLGNPTHILRIGESYKEKQRTIQAKKEVEQRRAGGYSRKYASKAKNLADDMVRNTARDLLYYAVTQDAMLIFENLSRGFGRQGKRTFMAERQYTRMEDWLTAKLAYEGLPSQTYLSKTLAQYTSKTCSNCGFTITSADYDRVLEKLKKTATGWMTTINGKELKVEGQITYYNRYKRQNVVKDLSVELDRLSEESVNNDISSWTKGRSGEALSLLKKRFSHRPVQEKFVCLNCGFETHADEQAALNIARSWLFLRSQEYKKYQTNKTTGNTDKRAFVETWQSFYRKKLKEVWKPAV

SEQ ID NO: 42760 - protein, 978 aa, synthetic construct
  REGION 1..978: note = engineered CasX variant
QEIKRINKIRRRLVKDSNTKKAGKTGPMKTLLVRVMTPDLRERLENLRKKPENIPQPISNTSRANLNKLLTDYTEMKKAILHVYDEEFQKDPVGLMSRVAQPASKKIDQNKLKPEMDEKGNLTTAGFACSQCGQPLFVYKLEQVSEKGKAYTNYFGRCNVAEHEKLIKLAQLKPEKDSDEAVTYSLGKFGQRALDFYSIHVTKESTHPVKPLAQIAGNRYASGPVGKALSDACMGTIASFLSKYQDIIIEHQKVVKGNQKRLESLRELAGKENLEYPSVTLPPQPHTKEGVDAYNEVIARVRMWVNLNLWQKLKLSRDDAKPLLRLKGFPSFPLVERQANEVDWWDMVCNVKKLINEKKEDGKVFWQNLAGYKRQEALRPYLSSEEDRKKGKKFARYQLGDLLLHLEKKHGEDWGKVYDEAWERIDKKVEGLSKHIKLEEERRSEDAQSKAALTDWLRAKASFVIEGLKEADKDEFCRCELKLQKWYGDLRGKPFAIEAENSILDISGFSKQYNCAFIWQKDGVKKLNLYLIINYFKGGKLRFKKIKPEAFEANRFYTVINKKSGEIVPMEVNFNFDDPNLIILPLAFGKRQGREFIWNDLLSLETGSLKLANGRVIEKTLYNRRTRQDEPALFVALTFERREVLDSSNIKPMNLIGVDRGENIPAVIALTDPEGCPLSRFKDSLGNPTHILRIGESYKEKQRTIQAKKEVEQRRAGGYSRKYASKAKNLADDMVRNTARDLLYYAVTQDAMLIFENLSRGFGRQGKRTFMAERQYTRMEDWLTAKLAYEGLPSQTYLSKTLAQYTSKTCSNCGFTITSADYDRVLEKLKKTATGWMTTINGKELKVEGQITYYNRYKRQNVVKDLSVELDRLSEESVNNDISSWTKGRSGEALSLLKKRFSHRPVQEKFVCLNCGFETHADEQAALNIARSWLFLRSQEYKKYQTNKTTGNTDKRAFVETWQSFYRKKLKEVWKPAV

SEQ ID NO: 42761 - protein, 977 aa, synthetic construct
  REGION 1..977: note = engineered CasX variant
QEIKRINKIRRRLVKDSNTKKAGKTGPMKTLLVRVMTPDLRERLENLRKKPENIPQPISNTSRANLNKLLTDYTEMKKAILHVYDEEFQKDPVGLMSRVAQPASKKIDQNKLKPEMDEKGNLTTAGFACSQCGQPLFVYKLEQVSEKGKAYTNYFGRCNVAEHEKLILLAQLKPEKDSDEAVTYSLGKFGQRALDFYSIHVTKESTHPVKPLAQIAGNRYASPVGKALSDACMGTIASFLSKYQDIIIEHQKVVKGNQKRLESLRELAGKENLEYPSVTLPPQPHTKEGVDAYNEVIARVRMWVNLNLWQKLKLSRDDAKPLLRLKGFPSFPLVERQANEVDWWDMVCNVKKLINEKKEDGKVFWQNLAGYKRQEALRPYLSSEEDRKKGKKFARYQLGDLLLHLEKKHGEDWGKVYDEAWERIDKKVEGLSKHIKLEEERRSEDAQSKAALTDWLRAKASFVIEGLKEADKDEFCRCELKLQKWYGDLRGKPFAIEAENSILDISGFSKQYNCAFIWQKDGVKKLNLYLIINYFKGGKLRFKKIKPEAFEANRFYTVINKKSGEIVPMEVNFNFDDPNLIILPLAFGKRQGREFIWNDLLSLETGSLKLANGRVIEKTLYNRRTRQDEPALFVALTFERREVLDSSNIKPMNLIGVDRGENIPAVIALTDPEGCPLSRFKDSLGNPTHILRIGESYKEKQRTIQAKKEVEQRRAGGYSRKYASKAKNLADDMVRNTARDLLYYAVTQDAMLIFENLSRGFGRQGKRTFMAERQYTRMEDWLTAKLAYEGLPSQTYLSKTLAQYTSKTCSNCGFTITSADYDRVLEKLKKTATGWMTTINGKELKVEGQITYYNRYKRQNVVKDLSVELDRLSEESVNNDISSWTKGRSGEALSLLKKRFSHRPVQEKFVCLNCGFETHADEQAALNIARSWLFLRSQEYKKYQTNKTTGNTDKRAFVETWQSFYRKKLKEVWKPAV

SEQ ID NO: 42762 - protein, 978 aa, synthetic construct
  REGION 1..978: note = engineered CasX variant
QEIKRINKIRRRLVKDSNTKKAGKTGPMKTLLVRVMTPDLRERLENLRKKPENIPQPISNTSRANLNKLLTDYTEMKKAILHVYDEEFQKDPVGLMSRVAQPASKKIDQNKLKPEMDEKGNLTTAGFACSQCGQPLFVYKLEQVSEKGKAYTNYFGRCNVAEHEKLILLAQLKPEKDSDEAVTYSLGKFGQRALDFYSIHVTKESTHPVKPLAQIAGNRYASYPVGKALSDACMGTIASFLSKYQDIIIEHQKVVKGNQKRLESLRELAGKENLEYPSVTLPPQPHTKEGVDAYNEVIARVRMWVNLNLWQKLKLSRDDAKPLLRLKGFPSFPLVERQANEVDWWDMVCNVKKLINEKKEDGKVFWQNLAGYKRQEALRPYLSSEEDRKKGKKFARYQLGDLLLHLEKKHGEDWGKVYDEAWERIDKKVEGLSKHIKLEEERRSEDAQSKAALTDWLRAKASFVIEGLKEADKDEFCRCELKLQKWYGDLRGKPFAIEAENSILDISGFSKQYNCAFIWQKDGVKKLNLYLIINYFKGGKLRFKKIKPEAFEANRFYTVINKKSGEIVPMEVNFNFDDPNLIILPLAFGKRQGREFIWNDLLSLETGSLKLANGRVIEKTLYNRRTRQDEPALFVALTFERREVLDSSNIKPMNLIGVDRGENIPAVIALTDPEGCPLSRFKDSLGNPTHILRIGESYKEKQRTIQAKKEVEQRRAGGYSRKYASKAKNLADDMVRNTARDLLYYAVTQDAMLIFENLSRGFGRQGKRTFMAERQYTRMEDWLTAKLAYNGLPSKTYLSKTLAQYTSKTCSNCGFTITSADYDRVLEKLKKTATGWMTTINGKELKVEGQITYYNRYKRQNVVKDLSVELDRLSEESVNNDISSWTKGRSGEALSLLKKRFSHRPVQEKFVCLNCGFETHADEQAALNIARSWLFLRSQEYKKYQTNKTTGNTDKRAFVETWQSFYRKKLKEVWKPAV

SEQ ID NO: 42763 - protein, 978 aa, synthetic construct
  REGION 1..978: note = engineered CasX variant
QEIKRINKIRRRLVKDSNTKKAGKTGPMKTLLVRVMTPDLRERLENLRKKPENIPQPISNTSRANLNKLLTDYTEMKKAILHVYDEEFQKDPVGLMSRVAQPASKKIDQNKLKPEMDEKGNLTTAGFACSQCGQPLFVYKLEQVSEKGKAYTNYFGRCNVAEHEKLILLAQLKPEKDSDEAVTYSLGKFGQRALDFYSIHVTKESTHPVKPLAQIAGNRYASHPVGKALSDACMGTIASFLSKYQDIIIEHQKVVKGNQKRLESLRELAGKENLEYPSVTLPPQPHTKEGVDAYNEVIARVRMWVNLNLWQKLKLSRDDAKPLLRLKGFPSFPLVERQANEVDWWDMVCNVKKLINEKKEDGKVFWQNLAGYKRQEALRPYLSSEEDRKKGKKFARYQLGDLLLHLEKKHGEDWGKVYDEAWERIDKKVEGLSKHIKLEEERRSEDAQSKAALTDWLRAKASFVIEGLKEADKDEFCRCELKLQKWYGDLRGKPFAIEAENSILDISGFSKQYNCAFIWQKDGVKKLNLYLIINYFKGGKLRFKKIKPEAFEANRFYTVINKKSGEIVPMEVNFNFDDPNLIILPLAFGKRQGREFIWNDLLSLETGSLKLANGRVIEKTLYNRRTRQDEPALFVALTFERREVLDSSNIKPMNLIGVDRGENIPAVIALTDPEGCPLSRFKDSLGNPTHILRIGESYKEKQRTIQAKKEVEQRRAGGYSRKYASKAKNLADDMVRNTARDLLYYAVTQDAMLIFENLSRGFGRQGKRTFMAERQYTRMEDWLTAKLAYNGLPSKTYLSKTLAQYTSKTCSNCGFTITSADYDRVLEKLKKTATGWMTTINGKELKVEGQITYYNRYKRQNVVKDLSVELDRLSEESVNNDISSWTKGRSGEALSLLKKRFSHRPVQEKFVCLNCGFETHADEQAALNIARSWLFLRSQEYKKYQTNKTTGNTDKRAFVETWQSFYRKKLKEVWKPAV

SEQ ID NO: 42764 - protein, 978 aa, synthetic construct
  REGION 1..978: note = engineered CasX variant
QEIKRINKIRRRLVKDSNTKKAGKTGPMKTLLVRVMTPDLRERLENLRKKPENIPQPISNTSRANLNKLLTDYTEMKKAILHVYDEEFQKDPVGLMSRVAQPASKKIDQNKLKPEMDEKGNLTTAGFACSQCGQPLFVYKLEQVSEKGKAYTNYFGRCNVAEHEKLILLAQLKPEKDSDEAVTYSLGKFGQRALDFYSIHVTKESTHPVKPLAQIAGNRYASSPVGKALSDACMGTIASFLSKYQDIIIEHQKVVKGNQKRLESLRELAGKENLEYPSVTLPPQPHTKEGVDAYNEVIARVRMWVNLNLWQKLKLSRDDAKPLLRLKGFPSFPLVERQANEVDWWDMVCNVKKLINEKKEDGKVFWQNLAGYKRQEALRPYLSSEEDRKKGKKFARYQLGDLLLHLEKKHGEDWGKVYDEAWERIDKKVEGLSKHIKLEEERRSEDAQSKAALTDWLRAKASFVIEGLKEADKDEFCRCELKLQKWYGDLRGKPFAIEAENSILDISGFSKQYNCAFIWQKDGVKKLNLYLIINYFKGGKLRFKKIKPEAFEANRFYTVINKKSGEIVPMEVNFNFDDPNLIILPLAFGKRQGREFIWNDLLSLETGSLKLANGRVIEKTLYNRRTRQDEPALFVALTFERREVLDSSNIKPMNLIGVDRGENIPAVIALTDPEGCPLSRFKDSLGNPTHILRIGESYKEKQRTIQAKKEVEQRRAGGYSRKYASKAKNLADDMVRNTARDLLYYAVTQDAMLIFENLSRGFGRQGKRTFMAERQYTRMEDWLTAKLAYNGLPSKTYLSKTLAQYTSKTCSNCGFTITSADYDRVLEKLKKTATGWMTTINGKELKVEGQITYYNRYKRQNVVKDLSVELDRLSEESVNNDISSWTKGRSGEALSLLKKRFSHRPVQEKFVCLNCGFETHADEQAALNIARSWLFLRSQEYKKYQTNKTTGNTDKRAFVETWQSFYRKKLKEVWKPAV

SEQ ID NO: 42765 - protein, 978 aa, synthetic construct
  REGION 1..978: note = engineered CasX variant
QEIKRINKIRRRLVKDSNTKKAGKTGPMKTLLVRVMTPDLRERLENLRKKPENIPQPISNTSRANLNKLLTDYTEMKKAILHVYDEEFQKDPVGLMSRVAQPASKKIDQNKLKPEMDEKGNLTTAGFACSQCGQPLFVYKLEQVSEKGKAYTNYFGRCNVAEHEKLILLAQLKPEKDSDEAVTYSLGKFGQRALDFYSIHVTKESTHPVKPLAQIAGNRYASTPVGKALSDACMGTIASFLSKYQDIIIEHQKVVKGNQKRLESLRELAGKENLEYPSVTLPPQPHTKEGVDAYNEVIARVRMWVNLNLWQKLKLSRDDAKPLLRLKGFPSFPLVERQANEVDWWDMVCNVKKLINEKKEDGKVFWQNLAGYKRQEALRPYLSSEEDRKKGKKFARYQLGDLLLHLEKKHGEDWGKVYDEAWERIDKKVEGLSKHIKLEEERRSEDAQSKAALTDWLRAKASFVIEGLKEADKDEFCRCELKLQKWYGDLRGKPFAIEAENSILDISGFSKQYNCAFIWQKDGVKKLNLYLIINYFKGGKLRFKKIKPEAFEANRFYTVINKKSGEIVPMEVNFNFDDPNLIILPLAFGKRQGREFIWNDLLSLETGSLKLANGRVIEKTLYNRRTRQDEPALFVALTFERREVLDSSNIKPMNLIGVDRGENIPAVIALTDPEGCPLSRFKDSLGNPTHILRIGESYKEKQRTIQAKKEVEQRRAGGYSRKYASKAKNLADDMVRNTARDLLYYAVTQDAMLIFENLSRGFGRQGKRTFMAERQYTRMEDWLTAKLAYNGLPSKTYLSKTLAQYTSKTCSNCGFTITSADYDRVLEKLKKTATGWMTTINGKELKVEGQITYYNRYKRQNVVKDLSVELDRLSEESVNNDISSWTKGRSGEALSLLKKRFSHRPVQEKFVCLNCGFETHADEQAALNIARSWLFLRSQEYKKYQTNKTTGNTDKRAFVETWQSFYRKKLKEVWKPAV

SEQ ID NO: 42766 - protein, 978 aa, synthetic construct
  REGION 1..978: note = engineered CasX variant
QEIKRINKIRRRLVKDSNTKKAGKTGPMKTLLVRVMTPDLRERLENLRKKPENIPQPISNTSRANLNKLLTDYTEMKKAILHVYDEEFQKDPVGLMSRVAQPASKKIDQNKLKPEMDEKGNLTTAGFACSQCGQPLFVYKLEQVSEKGKAYTNYFGRCNVAEHEKLILLAQLKPEKDSDEAVTYSLGKFGQRALDFYSIHVTKESTHPVKPLAQIAGNRYASAPVGKALSDACMGTIASFLSKYQDIIIEHQKVVKGNQKRLESLRELAGKENLEYPSVTLPPQPHTKEGVDAYNEVIARVRMWVNLNLWQKLKLSRDDAKPLLRLKGFPSFPLVERQANEVDWWDMVCNVKKLINEKKEDGKVFWQNLAGYKRQEALRPYLSSEEDRKKGKKFARYQLGDLLLHLEKKHGEDWGKVYDEAWERIDKKVEGLSKHIKLEEERRSEDAQSKAALTDWLRAKASFVIEGLKEADKDEFCRCELKLQKWYGDLRGKPFAIEAENSILDISGFSKQYNCAFIWQKDGVKKLNLYLIINYFKGGKLRFKKIKPEAFEANRFYTVINKKSGEIVPMEVNFNFDDPNLIILPLAFGKRQGREFIWNDLLSLETGSLKLANGRVIEKTLYNRRTRQDEPALFVALTFERREVLDSSNIKPMNLIGVDRGENIPAVIALTDPEGCPLSRFKDSLGNPTHILRIGESYKEKQRTIQAKKEVEQRRAGGYSRKYASKAKNLADDMVRNTARDLLYYAVTQDAMLIFENLSRGFGRQGKRTFMAERQYTRMEDWLTAKLAYNGLPSKTYLSKTLAQYTSKTCSNCGFTITSADYDRVLEKLKKTATGWMTTINGKELKVEGQITYYNRYKRQNVVKDLSVELDRLSEESVNNDISSWTKGRSGEALSLLKKRFSHRPVQEKFVCLNCGFETHADEQAALNIARSWLFLRSQEYKKYQTNKTTGNTDKRAFVETWQSFYRKKLKEVWKPAV

SEQ ID NO: 42767 - protein, 978 aa, synthetic construct
  REGION 1..978: note = engineered CasX variant
QEIKRINKIRRRLVKDSNTKKAGKTGPMKTLLVRVMTPDLRERLENLRKKPENIPQPISNTSRANLNKLLTDYTEMKKAILHVYDEEFQKDPVGLMSRVAQPASKKIDQNKLKPEMDEKGNLTTAGFACSQCGQPLFVYKLEQVSEKGKAYTNYFGRCNVAEHEKLILLAQLKPEKDSDEAVTYSLGKFGQRALDFYSIHVTKESTHPVKPLAQIAGNRYASVPVGKALSDACMGTIASFLSKYQDIIIEHQKVVKGNQKRLESLRELAGKENLEYPSVTLPPQPHTKEGVDAYNEVIARVRMWVNLNLWQKLKLSRDDAKPLLRLKGFPSFPLVERQANEVDWWDMVCNVKKLINEKKEDGKVFWQNLAGYKRQEALRPYLSSEEDRKKGKKFARYQLGDLLLHLEKKHGEDWGKVYDEAWERIDKKVEGLSKHIKLEEERRSEDAQSKAALTDWLRAKASFVIEGLKEADKDEFCRCELKLQKWYGDLRGKPFAIEAENSILDISGFSKQYNCAFIWQKDGVKKLNLYLIINYFKGGKLRFKKIKPEAFEANRFYTVINKKSGEIVPMEVNFNFDDPNLIILPLAFGKRQGREFIWNDLLSLETGSLKLANGRVIEKTLYNRRTRQDEPALFVALTFERREVLDSSNIKPMNLIGVDRGENIPAVIALTDPEGCPLSRFKDSLGNPTHILRIGESYKEKQRTIQAKKEVEQRRAGGYSRKYASKAKNLADDMVRNTARDLLYYAVTQDAMLIFENLSRGFGRQGKRTFMAERQYTRMEDWLTAKLAYNGLPSKTYLSKTLAQYTSKTCSNCGFTITSADYDRVLEKLKKTATGWMTTINGKELKVEGQITYYNRYKRQNVVKDLSVELDRLSEESVNNDISSWTKGRSGEALSLLKKRFSHRPVQEKFVCLNCGFETHADEQAALNIARSWLFLRSQEYKKYQTNKTTGNTDKRAFVETWQSFYRKKLKEVWKPAV

SEQ ID NO: 42768 - protein, 978 aa, synthetic construct
  REGION 1..978: note = engineered CasX variant
QEIKRINKIRRRLVKDSNTKKAGKTGPMKTLLVRVMTPDLRERLENLRKKPENIPQPISNTSRANLNKLLTDYTEMKKAILHVYDEEFQKDPVGLMSRVAQPASKKIDQNKLKPEMDEKGNLTTAGFACSQCGQPLFVYKLEQVSEKGKAYTNYFGRCNVAEHEKLIKLAQLKPEKDSDEAVTYSLGKFGQRALDFYSIHVTKESTHPVKPLAQIAGNRYASGPVGKALSDACMGTIASFLSKYQDIIIEHQKVVKGNQKRLESLRELAGKENLEYPSVTLPPQPHTKEGVDAYNEVIARVRMWVNLNLWQKLKLSRDDAKPLLRLKGFPSFPLVERQANEVDWWDMVCNVKKLINEKKEDGKVFWQNLAGYKRQEALRPYLSSEEDRKKGKKFARYQLGDLLLHLEKKHGEDWGKVYDEAWERIDKKVEGLSKHIKLEEERRSEDAQSKAALTDWLRAKASFVIEGLKEADKDEFCRCELKLQKWYGDLRGKPFAIEAENSILDISGFSKQYNCAFIWQKDGVKKLNLYLIINYFKGGKLRFKKIKPEAFEANRFYTVINKKSGEIVPMEVNFNFDDPNLIILPLAFGKRQGREFIWNDLLSLETGSLKLANGRVIEKTLYNRRTRQDEPALFVALTFERREVLDSSNIKPMNLIGVDRGENIPAVIALTDPEGCPLSRFKDSLGNPTHILRIGESYKEKQRTIQAKKEVEQRRAGGYSRKYASKAKNLADDMVRNTARDLLYYAVTQDAMLIFENLSRGFGRQGKRTFMAERQYTRMEDWLTAKLAYNGLPSKTYLSKTLAQYTSKTCSNCGFTITSADYDRVLEKLKKTATGWMTTINGKELKVEGQITYYNRYKRQNVVKDLSVELDRLSEESVNNDISSWTKGRSGEALSLLKKRFSHRPVQEKFVCLNCGFETHADEQAALNIARSWLFLRSQEYKKYQTNKTTGNTDKRAFVETWQSFYRKKLKEVWKPAV

SEQ ID NO: 42769 - protein, 977 aa, synthetic construct
  REGION 1..977: note = engineered CasX variant
QEIKRINKIRRRLVKDSNTKKAGKTGPMKTLLVRVMTPDLRERLENLRKKPENIPQPISNTSRANLNKLLTDYTEMKKAILHVYDEEFQKDPVGLMSRVAQPASKKIDQNKLKPEMDEKGNLTTAGFACSQCGQPLFVYKLEQVSEKGKAYTNYFGRCNVAEHEKLILLAQLKPEKDSDEAVTYSLGKFGQRALDFYSIHVTKESTHPVKPLAQIAGNRYASPVGKALSDACMGTIASFLSKYQDIIIEHQKVVKGNQKRLESLRELAGKENLEYPSVTLPPQPHTKEGVDAYNEVIARVRMWVNLNLWQKLKLSRDDAKPLLRLKGFPSFPLVERQANEVDWWDMVCNVKKLINEKKEDGKVFWQNLAGYKRQEALRPYLSSEEDRKKGKKFARYQLGDLLLHLEKKHGEDWGKVYDEAWERIDKKVEGLSKHIKLEEERRSEDAQSKAALTDWLRAKASFVIEGLKEADKDEFCRCELKLQKWYGDLRGKPFAIEAENSILDISGFSKQYNCAFIWQKDGVKKLNLYLIINYFKGGKLRFKKIKPEAFEANRFYTVINKKSGEIVPMEVNFNFDDPNLIILPLAFGKRQGREFIWNDLLSLETGSLKLANGRVIEKTLYNRRTRQDEPALFVALTFERREVLDSSNIKPMNLIGVDRGENIPAVIALTDPEGCPLSRFKDSLGNPTHILRIGESYKEKQRTIQAKKEVEQRRAGGYSRKYASKAKNLADDMVRNTARDLLYYAVTQDAMLIFENLSRGFGRQGKRTFMAERQYTRMEDWLTAKLAYNGLPSKTYLSKTLAQYTSKTCSNCGFTITSADYDRVLEKLKKTATGWMTTINGKELKVEGQITYYNRYKRQNVVKDLSVELDRLSEESVNNDISSWTKGRSGEALSLLKKRFSHRPVQEKFVCLNCGFETHADEQAALNIARSWLFLRSQEYKKYQTNKTTGNTDKRAFVETWQSFYRKKLKEVWKPAV

SEQ ID NO: 42770 - protein, 978 aa, synthetic construct
  REGION 1..978: note = engineered CasX variant
QEIKRINKIRRRLVKDSNTKKAGKTGPMKTLLVRVMTPDLRERLENLRKKPENIPQPISNTSRANLNKLLTDYTEMKKAILHVYDEEFQKDPVGLMSRVAQPASKKIDQNKLKPEMDEKGNLTTAGFACSQCGQPLFVYKLEQVSEKGKAYTNYFGRCNVAEHEKLIQLAQLKPEKDSDEAVTYSLGKFGQRALDFYSIHVTKESTHPVKPLAQIAGNRYASYPVGKALSDACMGTIASFLSKYQDIIIEHQKVVKGNQKRLESLRELAGKENLEYPSVTLPPQPHTKEGVDAYNEVIARVRMWVNLNLWQKLKLSRDDAKPLLRLKGFPSFPLVERQANEVDWWDMVCNVKKLINEKKEDGKVFWQNLAGYKRQEALRPYLSSEEDRKKGKKFARYQLGDLLLHLEKKHGEDWGKVYDEAWERIDKKVEGLSKHIKLEEERRSEDAQSKAALTDWLRAKASFVIEGLKEADKDEFCRCELKLQKWYGDLRGKPFAIEAENSILDISGFSKQYNCAFIWQKDGVKKLNLYLIINYFKGGKLRFKKIKPEAFEANRFYTVINKKSGEIVPMEVNFNFDDPNLIILPLAFGKRQGREFIWNDLLSLETGSLKLANGRVIEKTLYNRRTRQDEPALFVALTFERREVLDSSNIKPMNLIGVDRGENIPAVIALTDPEGCPLSRFKDSLGNPTHILRIGESYKEKQRTIQAKKEVEQRRAGGYSRKYASKAKNLADDMVRNTARDLLYYAVTQDAMLIFENLSRGFGRQGKRTFMAERQYTRMEDWLTAKLAYEGLPSKTYLSKTLAQYTSKTCSNCGFTITSADYDRVLEKLKKTATGWMTTINGKELKVEGQITYYNRYKRQNVVKDLSVELDRLSEESVNNDISSWTKGRSGEALSLLKKRFSHRPVQEKFVCLNCGFETHADEQAALNIARSWLFLRSQEYKKYQTNKTTGNTDKRAFVETWQSFYRKKLKEVWKPAV

SEQ ID NO: 42771 - protein, 978 aa, synthetic construct
  REGION 1..978: note = engineered CasX variant
QEIKRINKIRRRLVKDSNTKKAGKTGPMKTLLVRVMTPDLRERLENLRKKPENIPQPISNTSRANLNKLLTDYTEMKKAILHVYDEEFQKDPVGLMSRVAQPASKKIDQNKLKPEMDEKGNLTTAGFACSQCGQPLFVYKLEQVSEKGKAYTNYFGRCNVAEHEKLIQLAQLKPEKDSDEAVTYSLGKFGQRALDFYSIHVTKESTHPVKPLAQIAGNRYASHPVGKALSDACMGTIASFLSKYQDIIIEHQKVVKGNQKRLESLRELAGKENLEYPSVTLPPQPHTKEGVDAYNEVIARVRMWVNLNLWQKLKLSRDDAKPLLRLKGFPSFPLVERQANEVDWWDMVCNVKKLINEKKEDGKVFWQNLAGYKRQEALRPYLSSEEDRKKGKKFARYQLGDLLLHLEKKHGEDWGKVYDEAWERIDKKVEGLSKHIKLEEERRSEDAQSKAALTDWLRAKASFVIEGLKEADKDEFCRCELKLQKWYGDLRGKPFAIEAENSILDISGFSKQYNCAFIWQKDGVKKLNLYLIINYFKGGKLRFKKIKPEAFEANRFYTVINKKSGEIVPMEVNFNFDDPNLIILPLAFGKRQGREFIWNDLLSLETGSLKLANGRVIEKTLYNRRTRQDEPALFVALTFERREVLDSSNIKPMNLIGVDRGENIPAVIALTDPEGCPLSRFKDSLGNPTHILRIGESYKEKQRTIQAKKEVEQRRAGGYSRKYASKAKNLADDMVRNTARDLLYYAVTQDAMLIFENLSRGFGRQGKRTFMAERQYTRMEDWLTAKLAYEGLPSKTYLSKTLAQYTSKTCSNCGFTITSADYDRVLEKLKKTATGWMTTINGKELKVEGQITYYNRYKRQNVVKDLSVELDRLSEESVNNDISSWTKGRSGEALSLLKKRFSHRPVQEKFVCLNCGFETHADEQAALNIARSWLFLRSQEYKKYQTNKTTGNTDKRAFVETWQSFYRKKLKEVWKPAV

SEQ ID NO: 42772 - protein, 978 aa, synthetic construct
  REGION 1..978: note = engineered CasX variant
QEIKRINKIRRRLVKDSNTKKAGKTGPMKTLLVRVMTPDLRERLENLRKKPENIPQPISNTSRANLNKLLTDYTEMKKAILHVYDEEFQKDPVGLMSRVAQPASKKIDQNKLKPEMDEKGNLTTAGFACSQCGQPLFVYKLEQVSEKGKAYTNYFGRCNVAEHEKLIQLAQLKPEKDSDEAVTYSLGKFGQRALDFYSIHVTKESTHPVKPLAQIAGNRYASSPVGKALSDACMGTIASFLSKYQDIIIEHQKVVKGNQKRLESLRELAGKENLEYPSVTLPPQPHTKEGVDAYNEVIARVRMWVNLNLWQKLKLSRDDAKPLLRLKGFPSFPLVERQANEVDWWDMVCNVKKLINEKKEDGKVFWQNLAGYKRQEALRPYLSSEEDRKKGKKFARYQLGDLLLHLEKKHGEDWGKVYDEAWERIDKKVEGLSKHIKLEEERRSEDAQSKAALTDWLRAKASFVIEGLKEADKDEFCRCELKLQKWYGDLRGKPFAIEAENSILDISGFSKQYNCAFIWQKDGVKKLNLYLIINYFKGGKLRFKKIKPEAFEANRFYTVINKKSGEIVPMEVNFNFDDPNLIILPLAFGKRQGREFIWNDLLSLETGSLKLANGRVIEKTLYNRRTRQDEPALFVALTFERREVLDSSNIKPMNLIGVDRGENIPAVIALTDPEGCPLSRFKDSLGNPTHILRIGESYKEKQRTIQAKKEVEQRRAGGYSRKYASKAKNLADDMVRNTARDLLYYAVTQDAMLIFENLSRGFGRQGKRTFMAERQYTRMEDWLTAKLAYEGLPSKTYLSKTLAQYTSKTCSNCGFTITSADYDRVLEKLKKTATGWMTTINGKELKVEGQITYYNRYKRQNVVKDLSVELDRLSEESVNNDISSWTKGRSGEALSLLKKRFSHRPVQEKFVCLNCGFETHADEQAALNIARSWLFLRSQEYKKYQTNKTTGNTDKRAFVETWQSFYRKKLKEVWKPAV

SEQ ID NO: 42773 - protein, 978 aa, synthetic construct
  REGION 1..978: note = engineered CasX variant
QEIKRINKIRRRLVKDSNTKKAGKTGPMKTLLVRVMTPDLRERLENLRKKPENIPQPISNTSRANLNKLLTDYTEMKKAILHVYDEEFQKDPVGLMSRVAQPASKKIDQNKLKPEMDEKGNLTTAGFACSQCGQPLFVYKLEQVSEKGKAYTNYFGRCNVAEHEKLIQLAQLKPEKDSDEAVTYSLGKFGQRALDFYSIHVTKESTHPVKPLAQIAGNRYASTPVGKALSDACMGTIASFLSKYQDIIIEHQKVVKGNQKRLESLRELAGKENLEYPSVTLPPQPHTKEGVDAYNEVIARVRMWVNLNLWQKLKLSRDDAKPLLRLKGFPSFPLVERQANEVDWWDMVCNVKKLINEKKEDGKVFWQNLAGYKRQEALRPYLSSEEDRKKGKKFARYQLGDLLLHLEKKHGEDWGKVYDEAWERIDKKVEGLSKHIKLEEERRSEDAQSKAALTDWLRAKASFVIEGLKEADKDEFCRCELKLQKWYGDLRGKPFAIEAENSILDISGFSKQYNCAFIWQKDGVKKLNLYLIINYFKGGKLRFKKIKPEAFEANRFYTVINKKSGEIVPMEVNFNFDDPNLIILPLAFGKRQGREFIWNDLLSLETGSLKLANGRVIEKTLYNRRTRQDEPALFVALTFERREVLDSSNIKPMNLIGVDRGENIPAVIALTDPEGCPLSRFKDSLGNPTHILRIGESYKEKQRTIQAKKEVEQRRAGGYSRKYASKAKNLADDMVRNTARDLLYYAVTQDAMLIFENLSRGFGRQGKRTFMAERQYTRMEDWLTAKLAYEGLPSKTYLSKTLAQYTSKTCSNCGFTITSADYDRVLEKLKKTATGWMTTINGKELKVEGQITYYNRYKRQNVVKDLSVELDRLSEESVNNDISSWTKGRSGEALSLLKKRFSHRPVQEKFVCLNCGFETHADEQAALNIARSWLFLRSQEYKKYQTNKTTGNTDKRAFVETWQSFYRKKLKEVWKPAV

SEQ ID NO: 42774 - protein, 978 aa, synthetic construct
  REGION 1..978: note = engineered CasX variant
QEIKRINKIRRRLVKDSNTKKAGKTGPMKTLLVRVMTPDLRERLENLRKKPENIPQPISNTSRANLNKLLTDYTEMKKAILHVYDEEFQKDPVGLMSRVAQPASKKIDQNKLKPEMDEKGNLTTAGFACSQCGQPLFVYKLEQVSEKGKAYTNYFGRCNVAEHEKLIQLAQLKPEKDSDEAVTYSLGKFGQRALDFYSIHVTKESTHPVKPLAQIAGNRYASAPVGKALSDACMGTIASFLSKYQDIIIEHQKVVKGNQKRLESLRELAGKENLEYPSVTLPPQPHTKEGVDAYNEVIARVRMWVNLNLWQKLKLSRDDAKPLLRLKGFPSFPLVERQANEVDWWDMVCNVKKLINEKKEDGKVFWQNLAGYKRQEALRPYLSSEEDRKKGKKFARYQLGDLLLHLEKKHGEDWGKVYDEAWERIDKKVEGLSKHIKLEEERRSEDAQSKAALTDWLRAKASFVIEGLKEADKDEFCRCELKLQKWYGDLRGKPFAIEAENSILDISGFSKQYNCAFIWQKDGVKKLNLYLIINYFKGGKLRFKKIKPEAFEANRFYTVINKKSGEIVPMEVNFNFDDPNLIILPLAFGKRQGREFIWNDLLSLETGSLKLANGRVIEKTLYNRRTRQDEPALFVALTFERREVLDSSNIKPMNLIGVDRGENIPAVIALTDPEGCPLSRFKDSLGNPTHILRIGESYKEKQRTIQAKKEVEQRRAGGYSRKYASKAKNLADDMVRNTARDLLYYAVTQDAMLIFENLSRGFGRQGKRTFMAERQYTRMEDWLTAKLAYEGLPSKTYLSKTLAQYTSKTCSNCGFTITSADYDRVLEKLKKTATGWMTTINGKELKVEGQITYYNRYKRQNVVKDLSVELDRLSEESVNNDISSWTKGRSGEALSLLKKRFSHRPVQEKFVCLNCGFETHADEQAALNIARSWLFLRSQEYKKYQTNKTTGNTDKRAFVETWQSFYRKKLKEVWKPAV

SEQ ID NO: 42775 - protein, 978 aa, synthetic construct
  REGION 1..978: note = engineered CasX variant
QEIKRINKIRRRLVKDSNTKKAGKTGPMKTLLVRVMTPDLRERLENLRKKPENIPQPISNTSRANLNKLLTDYTEMKKAILHVYDEEFQKDPVGLMSRVAQPASKKIDQNKLKPEMDEKGNLTTAGFACSQCGQPLFVYKLEQVSEKGKAYTNYFGRCNVAEHEKLIQLAQLKPEKDSDEAVTYSLGKFGQRALDFYSIHVTKESTHPVKPLAQIAGNRYASVPVGKALSDACMGTIASFLSKYQDIIIEHQKVVKGNQKRLESLRELAGKENLEYPSVTLPPQPHTKEGVDAYNEVIARVRMWVNLNLWQKLKLSRDDAKPLLRLKGFPSFPLVERQANEVDWWDMVCNVKKLINEKKEDGKVFWQNLAGYKRQEALRPYLSSEEDRKKGKKFARYQLGDLLLHLEKKHGEDWGKVYDEAWERIDKKVEGLSKHIKLEEERRSEDAQSKAALTDWLRAKASFVIEGLKEADKDEFCRCELKLQKWYGDLRGKPFAIEAENSILDISGFSKQYNCAFIWQKDGVKKLNLYLIINYFKGGKLRFKKIKPEAFEANRFYTVINKKSGEIVPMEVNFNFDDPNLIILPLAFGKRQGREFIWNDLLSLETGSLKLANGRVIEKTLYNRRTRQDEPALFVALTFERREVLDSSNIKPMNLIGVDRGENIPAVIALTDPEGCPLSRFKDSLGNPTHILRIGESYKEKQRTIQAKKEVEQRRAGGYSRKYASKAKNLADDMVRNTARDLLYYAVTQDAMLIFENLSRGFGRQGKRTFMAERQYTRMEDWLTAKLAYEGLPSKTYLSKTLAQYTSKTCSNCGFTITSADYDRVLEKLKKTATGWMTTINGKELKVEGQITYYNRYKRQNVVKDLSVELDRLSEESVNNDISSWTKGRSGEALSLLKKRFSHRPVQEKFVCLNCGFETHADEQAALNIARSWLFLRSQEYKKYQTNKTTGNTDKRAFVETWQSFYRKKLKEVWKPAV

SEQ ID NO: 42776 - protein, 979 aa, synthetic construct
  REGION 1..979: note = engineered CasX variant
QEIKRINKIRRRLVKDSNTKKAGKTGPMKTLLVRVMTPDLRERLENLRKKPENIPQPISNTSRANLNKLLTDYTEMKKAILHVYDEEFQKDPVGLMSRVAQPASKKIDQNKLKPEMDEKGNLTTAGFACSQCGQPLFVYKLEQVSEKGKAYTNYFGRCNVAEHEKLIQKLAQLKPEKDSDEAVTYSLGKFGQRALDFYSIHVTKESTHPVKPLAQIAGNRYASGPVGKALSDACMGTIASFLSKYQDIIIEHQKVVKGNQKRLESLRELAGKENLEYPSVTLPPQPHTKEGVDAYNEVIARVRMWVNLNLWQKLKLSRDDAKPLLRLKGFPSFPLVERQANEVDWWDMVCNVKKLINEKKEDGKVFWQNLAGYKRQEALRPYLSSEEDRKKGKKFARYQLGDLLLHLEKKHGEDWGKVYDEAWERIDKKVEGLSKHIKLEEERRSEDAQSKAALTDWLRAKASFVIEGLKEADKDEFCRCELKLQKWYGDLRGKPFAIEAENSILDISGFSKQYNCAFIWQKDGVKKLNLYLIINYFKGGKLRFKKIKPEAFEANRFYTVINKKSGEIVPMEVNFNFDDPNLIILPLAFGKRQGREFIWNDLLSLETGSLKLANGRVIEKTLYNRRTRQDEPALFVALTFERREVLDSSNIKPMNLIGVDRGENIPAVIALTDPEGCPLSRFKDSLGNPTHILRIGESYKEKQRTIQAKKEVEQRRAGGYSRKYASKAKNLADDMVRNTARDLLYYAVTQDAMLIFENLSRGFGRQGKRTFMAERQYTRMEDWLTAKLAYEGLPSKTYLSKTLAQYTSKTCSNCGFTITSADYDRVLEKLKKTATGWMTTINGKELKVEGQITYYNRYKRQNVVKDLSVELDRLSEESVNNDISSWTKGRSGEALSLLKKRFSHRPVQEKFVCLNCGFETHADEQAALNIARSWLFLRSQEYKKYQTNKTTGNTDKRAFVETWQSFYRKKLKEVWKPAV

SEQ ID NO: 42777 - protein, 977 aa, synthetic construct
  REGION 1..977: note = engineered CasX variant
QEIKRINKIRRRLVKDSNTKKAGKTGPMKTLLVRVMTPDLRERLENLRKKPENIPQPISNTSRANLNKLLTDYTEMKKAILHVYDEEFQKDPVGLMSRVAQPASKKIDQNKLKPEMDEKGNLTTAGFACSQCGQPLFVYKLEQVSEKGKAYTNYFGRCNVAEHEKLIQLAQLKPEKDSDEAVTYSLGKFGQRALDFYSIHVTKESTHPVKPLAQIAGNRYASPVGKALSDACMGTIASFLSKYQDIIIEHQKVVKGNQKRLESLRELAGKENLEYPSVTLPPQPHTKEGVDAYNEVIARVRMWVNLNLWQKLKLSRDDAKPLLRLKGFPSFPLVERQANEVDWWDMVCNVKKLINEKKEDGKVFWQNLAGYKRQEALRPYLSSEEDRKKGKKFARYQLGDLLLHLEKKHGEDWGKVYDEAWERIDKKVEGLSKHIKLEEERRSEDAQSKAALTDWLRAKASFVIEGLKEADKDEFCRCELKLQKWYGDLRGKPFAIEAENSILDISGFSKQYNCAFIWQKDGVKKLNLYLIINYFKGGKLRFKKIKPEAFEANRFYTVINKKSGEIVPMEVNFNFDDPNLIILPLAFGKRQGREFIWNDLLSLETGSLKLANGRVIEKTLYNRRTRQDEPALFVALTFERREVLDSSNIKPMNLIGVDRGENIPAVIALTDPEGCPLSRFKDSLGNPTHILRIGESYKEKQRTIQAKKEVEQRRAGGYSRKYASKAKNLADDMVRNTARDLLYYAVTQDAMLIFENLSRGFGRQGKRTFMAERQYTRMEDWLTAKLAYEGLPSKTYLSKTLAQYTSKTCSNCGFTITSADYDRVLEKLKKTATGWMTTINGKELKVEGQITYYNRYKRQNVVKDLSVELDRLSEESVNNDISSWTKGRSGEALSLLKKRFSHRPVQEKFVCLNCGFETHADEQAALNIARSWLFLRSQEYKKYQTNKTTGNTDKRAFVETWQSFYRKKLKEVWKPAV

SEQ ID NO: 42778 - protein, 978 aa, synthetic construct
  REGION 1..978: note = engineered CasX variant
QEIKRINKIRRRLVKDSNTKKAGKTGPMKTLLVRVMTPDLRERLENLRKKPENIPQPISNTSRANLNKLLTDYTEMKKAILHVYDEEFQKDPVGLMSRVAQPASKKIDQNKLKPEMDEKGNLTTAGFACSQCGQPLFVYKLEQVSEKGKAYTNYFGRCNVAEHEKLILLAQLKPEKDSDEAVTYSLGKFGQRALDFYSIHVTKESTHPVKPLAQIAGNRYASYPVGKALSDACMGTIASFLSKYQDIIIEHQKVVKGNQKRLESLRELAGKENLEYPSVTLPPQPHTKEGVDAYNEVIARVRMWVNLNLWQKLKLSRDDAKPLLRLKGFPSFPLVERQANEVDWWDMVCNVKKLINEKKEDGKVFWQNLAIYKRQEALRPYLSSEEDRKKGKKFARYQLGDLLLHLEKKHGEDWGKVYDEAWERIDKKVEGLSKHIKLEEERRSEDAQSKAALTDWLRAKASFVIEGLKEADKDEFCRCELKLQKWYGDLRGKPFAIEAENSILDISGFSKQYNCAFIWQKDGVKKLNLYLIINYFKGGKLRFKKIKPEAFEANRFYTVINKKSGEIVPMEVNFNFDDPNLIILPLAFGKRQGREFIWNDLLSLETGSLKLANGRVIEKTLYNRRTRQDEPALFVALTFERREVLDSSNIKPMNLIGVDRGENIPAVIALTDPEGCPLSRFKDSLGNPTHILRIGESYKEKQRTIQAKKEVEQRRAGGYSRKYASKAKNLADDMVRNTARDLLYYAVTQDAMLIFENLSRGFGRQGKRTFMAERQYTRMEDWLTAKLAYEGLPSKTYLSKTLAQYTSKTCSNCGFTITSADYDRVLEKLKKTATGWMTTINGKELKVEGQITYYNRYKRQNVVKDLSVELDRLSEESVNNDISSWTKGRSGEALSLLKKRFSHRPVQEKFVCLNCGFETHADEQAALNIARSWLFLRSQEYKKYQTNKTTGNTDKRAFVETWQSFYRKKLKEVWKPAV

SEQ ID NO: 42779 - protein, 978 aa, synthetic construct
  REGION 1..978: note = engineered CasX variant
QEIKRINKIRRRLVKDSNTKKAGKTGPMKTLLVRVMTPDLRERLENLRKKPENIPQPISNTSRANLNKLLTDYTEMKKAILHVYDEEFQKDPVGLMSRVAQPASKKIDQNKLKPEMDEKGNLTTAGFACSQCGQPLFVYKLEQVSEKGKAYTNYFGRCNVAEHEKLILLAQLKPEKDSDEAVTYSLGKFGQRALDFYSIHVTKESTHPVKPLAQIAGNRYASHPVGKALSDACMGTIASFLSKYQDIIIEHQKVVKGNQKRLESLRELAGKENLEYPSVTLPPQPHTKEGVDAYNEVIARVRMWVNLNLWQKLKLSRDDAKPLLRLKGFPSFPLVERQANEVDWWDMVCNVKKLINEKKEDGKVFWQNLAIYKRQEALRPYLSSEEDRKKGKKFARYQLGDLLLHLEKKHGEDWGKVYDEAWERIDKKVEGLSKHIKLEEERRSEDAQSKAALTDWLRAKASFVIEGLKEADKDEFCRCELKLQKWYGDLRGKPFAIEAENSILDISGFSKQYNCAFIWQKDGVKKLNLYLIINYFKGGKLRFKKIKPEAFEANRFYTVINKKSGEIVPMEVNFNFDDPNLIILPLAFGKRQGREFIWNDLLSLETGSLKLANGRVIEKTLYNRRTRQDEPALFVALTFERREVLDSSNIKPMNLIGVDRGENIPAVIALTDPEGCPLSRFKDSLGNPTHILRIGESYKEKQRTIQAKKEVEQRRAGGYSRKYASKAKNLADDMVRNTARDLLYYAVTQDAMLIFENLSRGFGRQGKRTFMAERQYTRMEDWLTAKLAYEGLPSKTYLSKTLAQYTSKTCSNCGFTITSADYDRVLEKLKKTATGWMTTINGKELKVEGQITYYNRYKRQNVVKDLSVELDRLSEESVNNDISSWTKGRSGEALSLLKKRFSHRPVQEKFVCLNCGFETHADEQAALNIARSWLFLRSQEYKKYQTNKTTGNTDKRAFVETWQSFYRKKLKEVWKPAV

SEQ ID NO: 42780 - protein, 978 aa, synthetic construct
  REGION 1..978: note = engineered CasX variant
QEIKRINKIRRRLVKDSNTKKAGKTGPMKTLLVRVMTPDLRERLENLRKKPENIPQPISNTSRANLNKLLTDYTEMKKAILHVYDEEFQKDPVGLMSRVAQPASKKIDQNKLKPEMDEKGNLTTAGFACSQCGQPLFVYKLEQVSEKGKAYTNYFGRCNVAEHEKLILLAQLKPEKDSDEAVTYSLGKFGQRALDFYSIHVTKESTHPVKPLAQIAGNRYASSPVGKALSDACMGTIASFLSKYQDIIIEHQKVVKGNQKRLESLRELAGKENLEYPSVTLPPQPHTKEGVDAYNEVIARVRMWVNLNLWQKLKLSRDDAKPLLRLKGFPSFPLVERQANEVDWWDMVCNVKKLINEKKEDGKVFWQNLAIYKRQEALRPYLSSEEDRKKGKKFARYQLGDLLLHLEKKHGEDWGKVYDEAWERIDKKVEGLSKHIKLEEERRSEDAQSKAALTDWLRAKASFVIEGLKEADKDEFCRCELKLQKWYGDLRGKPFAIEAENSILDISGFSKQYNCAFIWQKDGVKKLNLYLIINYFKGGKLRFKKIKPEAFEANRFYTVINKKSGEIVPMEVNFNFDDPNLIILPLAFGKRQGREFIWNDLLSLETGSLKLANGRVIEKTLYNRRTRQDEPALFVALTFERREVLDSSNIKPMNLIGVDRGENIPAVIALTDPEGCPLSRFKDSLGNPTHILRIGESYKEKQRTIQAKKEVEQRRAGGYSRKYASKAKNLADDMVRNTARDLLYYAVTQDAMLIFENLSRGFGRQGKRTFMAERQYTRMEDWLTAKLAYEGLPSKTYLSKTLAQYTSKTCSNCGFTITSADYDRVLEKLKKTATGWMTTINGKELKVEGQITYYNRYKRQNVVKDLSVELDRLSEESVNNDISSWTKGRSGEALSLLKKRFSHRPVQEKFVCLNCGFETHADEQAALNIARSWLFLRSQEYKKYQTNKTTGNTDKRAFVETWQSFYRKKLKEVWKPAV

SEQ ID NO: 42781 - protein, 978 aa, synthetic construct
  REGION 1..978: note = engineered CasX variant
QEIKRINKIRRRLVKDSNTKKAGKTGPMKTLLVRVMTPDLRERLENLRKKPENIPQPISNTSRANLNKLLTDYTEMKKAILHVYDEEFQKDPVGLMSRVAQPASKKIDQNKLKPEMDEKGNLTTAGFACSQCGQPLFVYKLEQVSEKGKAYTNYFGRCNVAEHEKLILLAQLKPEKDSDEAVTYSLGKFGQRALDFYSIHVTKESTHPVKPLAQIAGNRYASTPVGKALSDACMGTIASFLSKYQDIIIEHQKVVKGNQKRLESLRELAGKENLEYPSVTLPPQPHTKEGVDAYNEVIARVRMWVNLNLWQKLKLSRDDAKPLLRLKGFPSFPLVERQANEVDWWDMVCNVKKLINEKKEDGKVFWQNLAIYKRQEALRPYLSSEEDRKKGKKFARYQLGDLLLHLEKKHGEDWGKVYDEAWERIDKKVEGLSKHIKLEEERRSEDAQSKAALTDWLRAKASFVIEGLKEADKDEFCRCELKLQKWYGDLRGKPFAIEAENSILDISGFSKQYNCAFIWQKDGVKKLNLYLIINYFKGGKLRFKKIKPEAFEANRFYTVINKKSGEIVPMEVNFNFDDPNLIILPLAFGKRQGREFIWNDLLSLETGSLKLANGRVIEKTLYNRRTRQDEPALFVALTFERREVLDSSNIKPMNLIGVDRGENIPAVIALTDPEGCPLSRFKDSLGNPTHILRIGESYKEKQRTIQAKKEVEQRRAGGYSRKYASKAKNLADDMVRNTARDLLYYAVTQDAMLIFENLSRGFGRQGKRTFMAERQYTRMEDWLTAKLAYEGLPSKTYLSKTLAQYTSKTCSNCGFTITSADYDRVLEKLKKTATGWMTTINGKELKVEGQITYYNRYKRQNVVKDLSVELDRLSEESVNNDISSWTKGRSGEALSLLKKRFSHRPVQEKFVCLNCGFETHADEQAALNIARSWLFLRSQEYKKYQTNKTTGNTDKRAFVETWQSFYRKKLKEVWKPAV

SEQ ID NO: 42782 - protein, 978 aa, synthetic construct
  REGION 1..978: note = engineered CasX variant
QEIKRINKIRRRLVKDSNTKKAGKTGPMKTLLVRVMTPDLRERLENLRKKPENIPQPISNTSRANLNKLLTDYTEMKKAILHVYDEEFQKDPVGLMSRVAQPASKKIDQNKLKPEMDEKGNLTTAGFACSQCGQPLFVYKLEQVSEKGKAYTNYFGRCNVAEHEKLILLAQLKPEKDSDEAVTYSLGKFGQRALDFYSIHVTKESTHPVKPLAQIAGNRYASAPVGKALSDACMGTIASFLSKYQDIIIEHQKVVKGNQKRLESLRELAGKENLEYPSVTLPPQPHTKEGVDAYNEVIARVRMWVNLNLWQKLKLSRDDAKPLLRLKGFPSFPLVERQANEVDWWDMVCNVKKLINEKKEDGKVFWQNLAIYKRQEALRPYLSSEEDRKKGKKFARYQLGDLLLHLEKKHGEDWGKVYDEAWERIDKKVEGLSKHIKLEEERRSEDAQSKAALTDWLRAKASFVIEGLKEADKDEFCRCELKLQKWYGDLRGKPFAIEAENSILDISGFSKQYNCAFIWQKDGVKKLNLYLIINYFKGGKLRFKKIKPEAFEANRFYTVINKKSGEIVPMEVNFNFDDPNLIILPLAFGKRQGREFIWNDLLSLETGSLKLANGRVIEKTLYNRRTRQDEPALFVALTFERREVLDSSNIKPMNLIGVDRGENIPAVIALTDPEGCPLSRFKDSLGNPTHILRIGESYKEKQRTIQAKKEVEQRRAGGYSRKYASKAKNLADDMVRNTARDLLYYAVTQDAMLIFENLSRGFGRQGKRTFMAERQYTRMEDWLTAKLAYEGLPSKTYLSKTLAQYTSKTCSNCGFTITSADYDRVLEKLKKTATGWMTTINGKELKVEGQITYYNRYKRQNVVKDLSVELDRLSEESVNNDISSWTKGRSGEALSLLKKRFSHRPVQEKFVCLNCGFETHADEQAALNIARSWLFLRSQEYKKYQTNKTTGNTDKRAFVETWQSFYRKKLKEVWKPAV

SEQ ID NO: 42783 - protein, 978 aa, synthetic construct
  REGION 1..978: note = engineered CasX variant
QEIKRINKIRRRLVKDSNTKKAGKTGPMKTLLVRVMTPDLRERLENLRKKPENIPQPISNTSRANLNKLLTDYTEMKKAILHVYDEEFQKDPVGLMSRVAQPASKKIDQNKLKPEMDEKGNLTTAGFACSQCGQPLFVYKLEQVSEKGKAYTNYFGRCNVAEHEKLILLAQLKPEKDSDEAVTYSLGKFGQRALDFYSIHVTKESTHPVKPLAQIAGNRYASVPVGKALSDACMGTIASFLSKYQDIIIEHQKVVKGNQKRLESLRELAGKENLEYPSVTLPPQPHTKEGVDAYNEVIARVRMWVNLNLWQKLKLSRDDAKPLLRLKGFPSFPLVERQANEVDWWDMVCNVKKLINEKKEDGKVFWQNLAIYKRQEALRPYLSSEEDRKKGKKFARYQLGDLLLHLEKKHGEDWGKVYDEAWERIDKKVEGLSKHIKLEEERRSEDAQSKAALTDWLRAKASFVIEGLKEADKDEFCRCELKLQKWYGDLRGKPFAIEAENSILDISGFSKQYNCAFIWQKDGVKKLNLYLIINYFKGGKLRFKKIKPEAFEANRFYTVINKKSGEIVPMEVNFNFDDPNLIILPLAFGKRQGREFIWNDLLSLETGSLKLANGRVIEKTLYNRRTRQDEPALFVALTFERREVLDSSNIKPMNLIGVDRGENIPAVIALTDPEGCPLSRFKDSLGNPTHILRIGESYKEKQRTIQAKKEVEQRRAGGYSRKYASKAKNLADDMVRNTARDLLYYAVTQDAMLIFENLSRGFGRQGKRTFMAERQYTRMEDWLTAKLAYEGLPSKTYLSKTLAQYTSKTCSNCGFTITSADYDRVLEKLKKTATGWMTTINGKELKVEGQITYYNRYKRQNVVKDLSVELDRLSEESVNNDISSWTKGRSGEALSLLKKRFSHRPVQEKFVCLNCGFETHADEQAALNIARSWLFLRSQEYKKYQTNKTTGNTDKRAFVETWQSFYRKKLKEVWKPAV

SEQ ID NO: 42784 - protein, 978 aa, synthetic construct
  REGION 1..978: note = engineered CasX variant
QEIKRINKIRRRLVKDSNTKKAGKTGPMKTLLVRVMTPDLRERLENLRKKPENIPQPISNTSRANLNKLLTDYTEMKKAILHVYDEEFQKDPVGLMSRVAQPASKKIDQNKLKPEMDEKGNLTTAGFACSQCGQPLFVYKLEQVSEKGKAYTNYFGRCNVAEHEKLIKLAQLKPEKDSDEAVTYSLGKFGQRALDFYSIHVTKESTHPVKPLAQIAGNRYASGPVGKALSDACMGTIASFLSKYQDIIIEHQKVVKGNQKRLESLRELAGKENLEYPSVTLPPQPHTKEGVDAYNEVIARVRMWVNLNLWQKLKLSRDDAKPLLRLKGFPSFPLVERQANEVDWWDMVCNVKKLINEKKEDGKVFWQNLAIYKRQEALRPYLSSEEDRKKGKKFARYQLGDLLLHLEKKHGEDWGKVYDEAWERIDKKVEGLSKHIKLEEERRSEDAQSKAALTDWLRAKASFVIEGLKEADKDEFCRCELKLQKWYGDLRGKPFAIEAENSILDISGFSKQYNCAFIWQKDGVKKLNLYLIINYFKGGKLRFKKIKPEAFEANRFYTVINKKSGEIVPMEVNFNFDDPNLIILPLAFGKRQGREFIWNDLLSLETGSLKLANGRVIEKTLYNRRTRQDEPALFVALTFERREVLDSSNIKPMNLIGVDRGENIPAVIALTDPEGCPLSRFKDSLGNPTHILRIGESYKEKQRTIQAKKEVEQRRAGGYSRKYASKAKNLADDMVRNTARDLLYYAVTQDAMLIFENLSRGFGRQGKRTFMAERQYTRMEDWLTAKLAYEGLPSKTYLSKTLAQYTSKTCSNCGFTITSADYDRVLEKLKKTATGWMTTINGKELKVEGQITYYNRYKRQNVVKDLSVELDRLSEESVNNDISSWTKGRSGEALSLLKKRFSHRPVQEKFVCLNCGFETHADEQAALNIARSWLFLRSQEYKKYQTNKTTGNTDKRAFVETWQSFYRKKLKEVWKPAV

SEQ ID NO: 42785 - protein, 977 aa, synthetic construct
  REGION 1..977: note = engineered CasX variant
QEIKRINKIRRRLVKDSNTKKAGKTGPMKTLLVRVMTPDLRERLENLRKKPENIPQPISNTSRANLNKLLTDYTEMKKAILHVYDEEFQKDPVGLMSRVAQPASKKIDQNKLKPEMDEKGNLTTAGFACSQCGQPLFVYKLEQVSEKGKAYTNYFGRCNVAEHEKLILLAQLKPEKDSDEAVTYSLGKFGQRALDFYSIHVTKESTHPVKPLAQIAGNRYASPVGKALSDACMGTIASFLSKYQDIIIEHQKVVKGNQKRLESLRELAGKENLEYPSVTLPPQPHTKEGVDAYNEVIARVRMWVNLNLWQKLKLSRDDAKPLLRLKGFPSFPLVERQANEVDWWDMVCNVKKLINEKKEDGKVFWQNLAIYKRQEALRPYLSSEEDRKKGKKFARYQLGDLLLHLEKKHGEDWGKVYDEAWERIDKKVEGLSKHIKLEEERRSEDAQSKAALTDWLRAKASFVIEGLKEADKDEFCRCELKLQKWYGDLRGKPFAIEAENSILDISGFSKQYNCAFIWQKDGVKKLNLYLIINYFKGGKLRFKKIKPEAFEANRFYTVINKKSGEIVPMEVNFNFDDPNLIILPLAFGKRQGREFIWNDLLSLETGSLKLANGRVIEKTLYNRRTRQDEPALFVALTFERREVLDSSNIKPMNLIGVDRGENIPAVIALTDPEGCPLSRFKDSLGNPTHILRIGESYKEKQRTIQAKKEVEQRRAGGYSRKYASKAKNLADDMVRNTARDLLYYAVTQDAMLIFENLSRGFGRQGKRTFMAERQYTRMEDWLTAKLAYEGLPSKTYLSKTLAQYTSKTCSNCGFTITSADYDRVLEKLKKTATGWMTTINGKELKVEGQITYYNRYKRQNVVKDLSVELDRLSEESVNNDISSWTKGRSGEALSLLKKRFSHRPVQEKFVCLNCGFETHADEQAALNIARSWLFLRSQEYKKYQTNKTTGNTDKRAFVETWQSFYRKKLKEVWKPAV

SEQ ID NO: 42786 - protein, 978 aa, synthetic construct
  REGION 1..978: note = engineered CasX variant
QEIKRINKIRRRLVKDSNTKKAGKTGPMKTLLVRVMTPDLRERLENLRKKPENIPQPISNTSRANLNKLLTDYTEMKKAILHVYDEEFQKDPVGLMSRVAQPASKKIDQNKLKPEMDEKGNLTTAGFACSQCGQPLFVYKLEQVSEKGKAYTNYFGRCNVAEHEKLILLAQLKPEKDSDEAVTYSLGKFGQRALDFYSIHVTKESTHPVKPLAQIAGNRYASYPVGKALSDACMGTIASFLSKYQDIIIEHQKVVKGNQKRLESLRELAGKENLEYPSVTLPPQPHTKEGVDAYNEVIARVRMWVNLNLWQKLKLSRDDAKPLLRLKGFPSFPLVERQANEVDWWDMVCNVKKLINEKKEDGKVFWQNLAGYKRQEALRPYLSSEEDREKGKKFARYQLGDLLLHLEKKHGEDWGKVYDEAWERIDKKVEGLSKHIKLEEERRSEDAQSKAALTDWLRAKASFVIEGLKEADKDEFCRCELKLQKWYGDLRGKPFAIEAENSILDISGFSKQYNCAFIWQKDGVKKLNLYLIINYFKGGKLRFKKIKPEAFEANRFYTVINKKSGEIVPMEVNFNFDDPNLIILPLAFGKRQGREFIWNDLLSLETGSLKLANGRVIEKTLYNRRTRQDEPALFVALTFERREVLDSSNIKPMNLIGVDRGENIPAVIALTDPEGCPLSRFKDSLGNPTHILRIGESYKEKQRTIQAKKEVEQRRAGGYSRKYASKAKNLADDMVRNTARDLLYYAVTQDAMLIFENLSRGFGRQGKRTFMAERQYTRMEDWLTAKLAYEGLPSKTYLSKTLAQYTSKTCSNCGFTITSADYDRVLEKLKKTATGWMTTINGKELKVEGQITYYNRYKRQNVVKDLSVELDRLSEESVNNDISSWTKGRSGEALSLLKKRFSHRPVQEKFVCLNCGFETHADEQAALNIARSWLFLRSQEYKKYQTNKTTGNTDKRAFVETWQSFYRKKLKEVWKPAV

SEQ ID NO: 42787 - protein, 978 aa, synthetic construct
  REGION 1..978: note = engineered CasX variant
QEIKRINKIRRRLVKDSNTKKAGKTGPMKTLLVRVMTPDLRERLENLRKKPENIPQPISNTSRANLNKLLTDYTEMKKAILHVYDEEFQKDPVGLMSRVAQPASKKIDQNKLKPEMDEKGNLTTAGFACSQCGQPLFVYKLEQVSEKGKAYTNYFGRCNVAEHEKLILLAQLKPEKDSDEAVTYSLGKFGQRALDFYSIHVTKESTHPVKPLAQIAGNRYASHPVGKALSDACMGTIASFLSKYQDIIIEHQKVVKGNQKRLESLRELAGKENLEYPSVTLPPQPHTKEGVDAYNEVIARVRMWVNLNLWQKLKLSRDDAKPLLRLKGFPSFPLVERQANEVDWWDMVCNVKKLINEKKEDGKVFWQNLAGYKRQEALRPYLSSEEDREKGKKFARYQLGDLLLHLEKKHGEDWGKVYDEAWERIDKKVEGLSKHIKLEEERRSEDAQSKAALTDWLRAKASFVIEGLKEADKDEFCRCELKLQKWYGDLRGKPFAIEAENSILDISGFSKQYNCAFIWQKDGVKKLNLYLIINYFKGGKLRFKKIKPEAFEANRFYTVINKKSGEIVPMEVNFNFDDPNLIILPLAFGKRQGREFIWNDLLSLETGSLKLANGRVIEKTLYNRRTRQDEPALFVALTFERREVLDSSNIKPMNLIGVDRGENIPAVIALTDPEGCPLSRFKDSLGNPTHILRIGESYKEKQRTIQAKKEVEQRRAGGYSRKYASKAKNLADDMVRNTARDLLYYAVTQDAMLIFENLSRGFGRQGKRTFMAERQYTRMEDWLTAKLAYEGLPSKTYLSKTLAQYTSKTCSNCGFTITSADYDRVLEKLKKTATGWMTTINGKELKVEGQITYYNRYKRQNVVKDLSVELDRLSEESVNNDISSWTKGRSGEALSLLKKRFSHRPVQEKFVCLNCGFETHADEQAALNIARSWLFLRSQEYKKYQTNKTTGNTDKRAFVETWQSFYRKKLKEVWKPAV

SEQ ID NO: 42788 - protein, 978 aa, synthetic construct
  REGION 1..978: note = engineered CasX variant
QEIKRINKIRRRLVKDSNTKKAGKTGPMKTLLVRVMTPDLRERLENLRKKPENIPQPISNTSRANLNKLLTDYTEMKKAILHVYDEEFQKDPVGLMSRVAQPASKKIDQNKLKPEMDEKGNLTTAGFACSQCGQPLFVYKLEQVSEKGKAYTNYFGRCNVAEHEKLILLAQLKPEKDSDEAVTYSLGKFGQRALDFYSIHVTKESTHPVKPLAQIAGNRYASSPVGKALSDACMGTIASFLSKYQDIIIEHQKVVKGNQKRLESLRELAGKENLEYPSVTLPPQPHTKEGVDAYNEVIARVRMWVNLNLWQKLKLSRDDAKPLLRLKGFPSFPLVERQANEVDWWDMVCNVKKLINEKKEDGKVFWQNLAGYKRQEALRPYLSSEEDREKGKKFARYQLGDLLLHLEKKHGEDWGKVYDEAWERIDKKVEGLSKHIKLEEERRSEDAQSKAALTDWLRAKASFVIEGLKEADKDEFCRCELKLQKWYGDLRGKPFAIEAENSILDISGFSKQYNCAFIWQKDGVKKLNLYLIINYFKGGKLRFKKIKPEAFEANRFYTVINKKSGEIVPMEVNFNFDDPNLIILPLAFGKRQGREFIWNDLLSLETGSLKLANGRVIEKTLYNRRTRQDEPALFVALTFERREVLDSSNIKPMNLIGVDRGENIPAVIALTDPEGCPLSRFKDSLGNPTHILRIGESYKEKQRTIQAKKEVEQRRAGGYSRKYASKAKNLADDMVRNTARDLLYYAVTQDAMLIFENLSRGFGRQGKRTFMAERQYTRMEDWLTAKLAYEGLPSKTYLSKTLAQYTSKTCSNCGFTITSADYDRVLEKLKKTATGWMTTINGKELKVEGQITYYNRYKRQNVVKDLSVELDRLSEESVNNDISSWTKGRSGEALSLLKKRFSHRPVQEKFVCLNCGFETHADEQAALNIARSWLFLRSQEYKKYQTNKTTGNTDKRAFVETWQSFYRKKLKEVWKPAV

SEQ ID NO: 42789 - protein, 978 aa, synthetic construct
  REGION 1..978: note = engineered CasX variant
QEIKRINKIRRRLVKDSNTKKAGKTGPMKTLLVRVMTPDLRERLENLRKKPENIPQPISNTSRANLNKLLTDYTEMKKAILHVYDEEFQKDPVGLMSRVAQPASKKIDQNKLKPEMDEKGNLTTAGFACSQCGQPLFVYKLEQVSEKGKAYTNYFGRCNVAEHEKLILLAQLKPEKDSDEAVTYSLGKFGQRALDFYSIHVTKESTHPVKPLAQIAGNRYASTPVGKALSDACMGTIASFLSKYQDIIIEHQKVVKGNQKRLESLRELAGKENLEYPSVTLPPQPHTKEGVDAYNEVIARVRMWVNLNLWQKLKLSRDDAKPLLRLKGFPSFPLVERQANEVDWWDMVCNVKKLINEKKEDGKVFWQNLAGYKRQEALRPYLSSEEDREKGKKFARYQLGDLLLHLEKKHGEDWGKVYDEAWERIDKKVEGLSKHIKLEEERRSEDAQSKAALTDWLRAKASFVIEGLKEADKDEFCRCELKLQKWYGDLRGKPFAIEAENSILDISGFSKQYNCAFIWQKDGVKKLNLYLIINYFKGGKLRFKKIKPEAFEANRFYTVINKKSGEIVPMEVNFNFDDPNLIILPLAFGKRQGREFIWNDLLSLETGSLKLANGRVIEKTLYNRRTRQDEPALFVALTFERREVLDSSNIKPMNLIGVDRGENIPAVIALTDPEGCPLSRFKDSLGNPTHILRIGESYKEKQRTIQAKKEVEQRRAGGYSRKYASKAKNLADDMVRNTARDLLYYAVTQDAMLIFENLSRGFGRQGKRTFMAERQYTRMEDWLTAKLAYEGLPSKTYLSKTLAQYTSKTCSNCGFTITSADYDRVLEKLKKTATGWMTTINGKELKVEGQITYYNRYKRQNVVKDLSVELDRLSEESVNNDISSWTKGRSGEALSLLKKRFSHRPVQEKFVCLNCGFETHADEQAALNIARSWLFLRSQEYKKYQTNKTTGNTDKRAFVETWQSFYRKKLKEVWKPAV

SEQ ID NO: 42790 - protein, 978 aa, synthetic construct
  REGION 1..978: note = engineered CasX variant
QEIKRINKIRRRLVKDSNTKKAGKTGPMKTLLVRVMTPDLRERLENLRKKPENIPQPISNTSRANLNKLLTDYTEMKKAILHVYDEEFQKDPVGLMSRVAQPASKKIDQNKLKPEMDEKGNLTTAGFACSQCGQPLFVYKLEQVSEKGKAYTNYFGRCNVAEHEKLILLAQLKPEKDSDEAVTYSLGKFGQRALDFYSIHVTKESTHPVKPLAQIAGNRYASAPVGKALSDACMGTIASFLSKYQDIIIEHQKVVKGNQKRLESLRELAGKENLEYPSVTLPPQPHTKEGVDAYNEVIARVRMWVNLNLWQKLKLSRDDAKPLLRLKGFPSFPLVERQANEVDWWDMVCNVKKLINEKKEDGKVFWQNLAGYKRQEALRPYLSSEEDREKGKKFARYQLGDLLLHLEKKHGEDWGKVYDEAWERIDKKVEGLSKHIKLEEERRSEDAQSKAALTDWLRAKASFVIEGLKEADKDEFCRCELKLQKWYGDLRGKPFAIEAENSILDISGFSKQYNCAFIWQKDGVKKLNLYLIINYFKGGKLRFKKIKPEAFEANRFYTVINKKSGEIVPMEVNFNFDDPNLIILPLAFGKRQGREFIWNDLLSLETGSLKLANGRVIEKTLYNRRTRQDEPALFVALTFERREVLDSSNIKPMNLIGVDRGENIPAVIALTDPEGCPLSRFKDSLGNPTHILRIGESYKEKQRTIQAKKEVEQRRAGGYSRKYASKAKNLADDMVRNTARDLLYYAVTQDAMLIFENLSRGFGRQGKRTFMAERQYTRMEDWLTAKLAYEGLPSKTYLSKTLAQYTSKTCSNCGFTITSADYDRVLEKLKKTATGWMTTINGKELKVEGQITYYNRYKRQNVVKDLSVELDRLSEESVNNDISSWTKGRSGEALSLLKKRFSHRPVQEKFVCLNCGFETHADEQAALNIARSWLFLRSQEYKKYQTNKTTGNTDKRAFVETWQSFYRKKLKEVWKPAV

SEQ ID NO: 42791 - protein, 978 aa, synthetic construct
  REGION 1..978: note = engineered CasX variant
QEIKRINKIRRRLVKDSNTKKAGKTGPMKTLLVRVMTPDLRERLENLRKKPENIPQPISNTSRANLNKLLTDYTEMKKAILHVYDEEFQKDPVGLMSRVAQPASKKIDQNKLKPEMDEKGNLTTAGFACSQCGQPLFVYKLEQVSEKGKAYTNYFGRCNVAEHEKLILLAQLKPEKDSDEAVTYSLGKFGQRALDFYSIHVTKESTHPVKPLAQIAGNRYASVPVGKALSDACMGTIASFLSKYQDIIIEHQKVVKGNQKRLESLRELAGKENLEYPSVTLPPQPHTKEGVDAYNEVIARVRMWVNLNLWQKLKLSRDDAKPLLRLKGFPSFPLVERQANEVDWWDMVCNVKKLINEKKEDGKVFWQNLAGYKRQEALRPYLSSEEDREKGKKFARYQLGDLLLHLEKKHGEDWGKVYDEAWERIDKKVEGLSKHIKLEEERRSEDAQSKAALTDWLRAKASFVIEGLKEADKDEFCRCELKLQKWYGDLRGKPFAIEAENSILDISGFSKQYNCAFIWQKDGVKKLNLYLIINYFKGGKLRFKKIKPEAFEANRFYTVINKKSGEIVPMEVNFNFDDPNLIILPLAFGKRQGREFIWNDLLSLETGSLKLANGRVIEKTLYNRRTRQDEPALFVALTFERREVLDSSNIKPMNLIGVDRGENIPAVIALTDPEGCPLSRFKDSLGNPTHILRIGESYKEKQRTIQAKKEVEQRRAGGYSRKYASKAKNLADDMVRNTARDLLYYAVTQDAMLIFENLSRGFGRQGKRTFMAERQYTRMEDWLTAKLAYEGLPSKTYLSKTLAQYTSKTCSNCGFTITSADYDRVLEKLKKTATGWMTTINGKELKVEGQITYYNRYKRQNVVKDLSVELDRLSEESVNNDISSWTKGRSGEALSLLKKRFSHRPVQEKFVCLNCGFETHADEQAALNIARSWLFLRSQEYKKYQTNKTTGNTDKRAFVETWQSFYRKKLKEVWKPAV

SEQ ID NO: 42792 - protein, 978 aa, synthetic construct
  REGION 1..978: note = engineered CasX variant
QEIKRINKIRRRLVKDSNTKKAGKTGPMKTLLVRVMTPDLRERLENLRKKPENIPQPISNTSRANLNKLLTDYTEMKKAILHVYDEEFQKDPVGLMSRVAQPASKKIDQNKLKPEMDEKGNLTTAGFACSQCGQPLFVYKLEQVSEKGKAYTNYFGRCNVAEHEKLIKLAQLKPEKDSDEAVTYSLGKFGQRALDFYSIHVTKESTHPVKPLAQIAGNRYASGPVGKALSDACMGTIASFLSKYQDIIIEHQKVVKGNQKRLESLRELAGKENLEYPSVTLPPQPHTKEGVDAYNEVIARVRMWVNLNLWQKLKLSRDDAKPLLRLKGFPSFPLVERQANEVDWWDMVCNVKKLINEKKEDGKVFWQNLAGYKRQEALRPYLSSEEDREKGKKFARYQLGDLLLHLEKKHGEDWGKVYDEAWERIDKKVEGLSKHIKLEEERRSEDAQSKAALTDWLRAKASFVIEGLKEADKDEFCRCELKLQKWYGDLRGKPFAIEAENSILDISGFSKQYNCAFIWQKDGVKKLNLYLIINYFKGGKLRFKKIKPEAFEANRFYTVINKKSGEIVPMEVNFNFDDPNLIILPLAFGKRQGREFIWNDLLSLETGSLKLANGRVIEKTLYNRRTRQDEPALFVALTFERREVLDSSNIKPMNLIGVDRGENIPAVIALTDPEGCPLSRFKDSLGNPTHILRIGESYKEKQRTIQAKKEVEQRRAGGYSRKYASKAKNLADDMVRNTARDLLYYAVTQDAMLIFENLSRGFGRQGKRTFMAERQYTRMEDWLTAKLAYEGLPSKTYLSKTLAQYTSKTCSNCGFTITSADYDRVLEKLKKTATGWMTTINGKELKVEGQITYYNRYKRQNVVKDLSVELDRLSEESVNNDISSWTKGRSGEALSLLKKRFSHRPVQEKFVCLNCGFETHADEQAALNIARSWLFLRSQEYKKYQTNKTTGNTDKRAFVETWQSFYRKKLKEVWKPAV

SEQ ID NO: 42793 - protein, 977 aa, synthetic construct
  REGION 1..977: note = engineered CasX variant
QEIKRINKIRRRLVKDSNTKKAGKTGPMKTLLVRVMTPDLRERLENLRKKPENIPQPISNTSRANLNKLLTDYTEMKKAILHVYDEEFQKDPVGLMSRVAQPASKKIDQNKLKPEMDEKGNLTTAGFACSQCGQPLFVYKLEQVSEKGKAYTNYFGRCNVAEHEKLILLAQLKPEKDSDEAVTYSLGKFGQRALDFYSIHVTKESTHPVKPLAQIAGNRYASPVGKALSDACMGTIASFLSKYQDIIIEHQKVVKGNQKRLESLRELAGKENLEYPSVTLPPQPHTKEGVDAYNEVIARVRMWVNLNLWQKLKLSRDDAKPLLRLKGFPSFPLVERQANEVDWWDMVCNVKKLINEKKEDGKVFWQNLAGYKRQEALRPYLSSEEDREKGKKFARYQLGDLLLHLEKKHGEDWGKVYDEAWERIDKKVEGLSKHIKLEEERRSEDAQSKAALTDWLRAKASFVIEGLKEADKDEFCRCELKLQKWYGDLRGKPFAIEAENSILDISGFSKQYNCAFIWQKDGVKKLNLYLIINYFKGGKLRFKKIKPEAFEANRFYTVINKKSGEIVPMEVNFNFDDPNLIILPLAFGKRQGREFIWNDLLSLETGSLKLANGRVIEKTLYNRRTRQDEPALFVALTFERREVLDSSNIKPMNLIGVDRGENIPAVIALTDPEGCPLSRFKDSLGNPTHILRIGESYKEKQRTIQAKKEVEQRRAGGYSRKYASKAKNLADDMVRNTARDLLYYAVTQDAMLIFENLSRGFGRQGKRTFMAERQYTRMEDWLTAKLAYEGLPSKTYLSKTLAQYTSKTCSNCGFTITSADYDRVLEKLKKTATGWMTTINGKELKVEGQITYYNRYKRQNVVKDLSVELDRLSEESVNNDISSWTKGRSGEALSLLKKRFSHRPVQEKFVCLNCGFETHADEQAALNIARSWLFLRSQEYKKYQTNKTTGNTDKRAFVETWQSFYRKKLKEVWKPAV

SEQ ID NO: 42794 - protein, 978 aa, synthetic construct
  REGION 1..978: note = engineered CasX variant
QEIKRINKIRRRLVKDSNTKKAGKTGPMKTLLVRVMTPDLRERLENLRKKPENIPQPISNTSRANLNKLLTDYTEMKKAILHVYDEEFQKDPVGLMSRVAQPASKKIDQNKLKPEMDEKGNLTTAGFACSQCGQPLFVYKLEQVSEKGKAYTNYFGRCNVAEHEKLILLAQLKPEKDSDEAVTYSLGKFGQRALDFYSIHVTKESTHPVKPLAQIAGNRYASYPVGKALSDACMGTIASFLSKYQDIIIEHQKVVKGNQKRLESLRELAGKENLEYPSVTLPPQPHTKEGVDAYNEVIARVRMWVNLNLWQKLKLSRDDAKPLLRLKGFPSFPLVERQANEVDWWDMVCNVKKLINEKKEDGKVFWQNLAGYKRQEALRPYLSSEEDRKKGKKFARYQLGDLLLHLEKKHGEDWGKVYDEAWERIDKKVEGLSKHIKLEEERRSEDAQSKAALTDWLRAKASFVIEGLKEADKDEFCRCELKLQKWYGDLRGKPFAIEAENSILDISGFSKQYNCAFIWQKDGVKKLNLYLIINYFKGGKLRFKKIKPEAFEANRFYTVINKKSGEIVIMEVNFNFDDPNLIILPLAFGKRQGREFIWNDLLSLETGSLKLANGRVIEKTLYNRRTRQDEPALFVALTFERREVLDSSNIKPMNLIGVDRGENIPAVIALTDPEGCPLSRFKDSLGNPTHILRIGESYKEKQRTIQAKKEVEQRRAGGYSRKYASKAKNLADDMVRNTARDLLYYAVTQDAMLIFENLSRGFGRQGKRTFMAERQYTRMEDWLTAKLAYEGLPSKTYLSKTLAQYTSKTCSNCGFTITSADYDRVLEKLKKTATGWMTTINGKELKVEGQITYYNRYKRQNVVKDLSVELDRLSEESVNNDISSWTKGRSGEALSLLKKRFSHRPVQEKFVCLNCGFETHADEQAALNIARSWLFLRSQEYKKYQTNKTTGNTDKRAFVETWQSFYRKKLKEVWKPAV

SEQ ID NO: 42795 - protein, 978 aa, synthetic construct
  REGION 1..978: note = engineered CasX variant
QEIKRINKIRRRLVKDSNTKKAGKTGPMKTLLVRVMTPDLRERLENLRKKPENIPQPISNTSRANLNKLLTDYTEMKKAILHVYDEEFQKDPVGLMSRVAQPASKKIDQNKLKPEMDEKGNLTTAGFACSQCGQPLFVYKLEQVSEKGKAYTNYFGRCNVAEHEKLILLAQLKPEKDSDEAVTYSLGKFGQRALDFYSIHVTKESTHPVKPLAQIAGNRYASHPVGKALSDACMGTIASFLSKYQDIIIEHQKVVKGNQKRLESLRELAGKENLEYPSVTLPPQPHTKEGVDAYNEVIARVRMWVNLNLWQKLKLSRDDAKPLLRLKGFPSFPLVERQANEVDWWDMVCNVKKLINEKKEDGKVFWQNLAGYKRQEALRPYLSSEEDRKKGKKFARYQLGDLLLHLEKKHGEDWGKVYDEAWERIDKKVEGLSKHIKLEEERRSEDAQSKAALTDWLRAKASFVIEGLKEADKDEFCRCELKLQKWYGDLRGKPFAIEAENSILDISGFSKQYNCAFIWQKDGVKKLNLYLIINYFKGGKLRFKKIKPEAFEANRFYTVINKKSGEIVIMEVNFNFDDPNLIILPLAFGKRQGREFIWNDLLSLETGSLKLANGRVIEKTLYNRRTRQDEPALFVALTFERREVLDSSNIKPMNLIGVDRGENIPAVIALTDPEGCPLSRFKDSLGNPTHILRIGESYKEKQRTIQAKKEVEQRRAGGYSRKYASKAKNLADDMVRNTARDLLYYAVTQDAMLIFENLSRGFGRQGKRTFMAERQYTRMEDWLTAKLAYEGLPSKTYLSKTLAQYTSKTCSNCGFTITSADYDRVLEKLKKTATGWMTTINGKELKVEGQITYYNRYKRQNVVKDLSVELDRLSEESVNNDISSWTKGRSGEALSLLKKRFSHRPVQEKFVCLNCGFETHADEQAALNIARSWLFLRSQEYKKYQTNKTTGNTDKRAFVETWQSFYRKKLKEVWKPAV

SEQ ID NO: 42796 - protein, 978 aa, synthetic construct
  REGION 1..978: note = engineered CasX variant
QEIKRINKIRRRLVKDSNTKKAGKTGPMKTLLVRVMTPDLRERLENLRKKPENIPQPISNTSRANLNKLLTDYTEMKKAILHVYDEEFQKDPVGLMSRVAQPASKKIDQNKLKPEMDEKGNLTTAGFACSQCGQPLFVYKLEQVSEKGKAYTNYFGRCNVAEHEKLILLAQLKPEKDSDEAVTYSLGKFGQRALDFYSIHVTKESTHPVKPLAQIAGNRYASSPVGKALSDACMGTIASFLSKYQDIIIEHQKVVKGNQKRLESLRELAGKENLEYPSVTLPPQPHTKEGVDAYNEVIARVRMWVNLNLWQKLKLSRDDAKPLLRLKGFPSFPLVERQANEVDWWDMVCNVKKLINEKKEDGKVFWQNLAGYKRQEALRPYLSSEEDRKKGKKFARYQLGDLLLHLEKKHGEDWGKVYDEAWERIDKKVEGLSKHIKLEEERRSEDAQSKAALTDWLRAKASFVIEGLKEADKDEFCRCELKLQKWYGDLRGKPFAIEAENSILDISGFSKQYNCAFIWQKDGVKKLNLYLIINYFKGGKLRFKKIKPEAFEANRFYTVINKKSGEIVIMEVNFNFDDPNLIILPLAFGKRQGREFIWNDLLSLETGSLKLANGRVIEKTLYNRRTRQDEPALFVALTFERREVLDSSNIKPMNLIGVDRGENIPAVIALTDPEGCPLSRFKDSLGNPTHILRIGESYKEKQRTIQAKKEVEQRRAGGYSRKYASKAKNLADDMVRNTARDLLYYAVTQDAMLIFENLSRGFGRQGKRTFMAERQYTRMEDWLTAKLAYEGLPSKTYLSKTLAQYTSKTCSNCGFTITSADYDRVLEKLKKTATGWMTTINGKELKVEGQITYYNRYKRQNVVKDLSVELDRLSEESVNNDISSWTKGRSGEALSLLKKRFSHRPVQEKFVCLNCGFETHADEQAALNIARSWLFLRSQEYKKYQTNKTTGNTDKRAFVETWQSFYRKKLKEVWKPAV

SEQ ID NO: 42797 - protein, 978 aa, synthetic construct
  REGION 1..978: note = engineered CasX variant
QEIKRINKIRRRLVKDSNTKKAGKTGPMKTLLVRVMTPDLRERLENLRKKPENIPQPISNTSRANLNKLLTDYTEMKKAILHVYDEEFQKDPVGLMSRVAQPASKKIDQNKLKPEMDEKGNLTTAGFACSQCGQPLFVYKLEQVSEKGKAYTNYFGRCNVAEHEKLILLAQLKPEKDSDEAVTYSLGKFGQRALDFYSIHVTKESTHPVKPLAQIAGNRYASTPVGKALSDACMGTIASFLSKYQDIIIEHQKVVKGNQKRLESLRELAGKENLEYPSVTLPPQPHTKEGVDAYNEVIARVRMWVNLNLWQKLKLSRDDAKPLLRLKGFPSFPLVERQANEVDWWDMVCNVKKLINEKKEDGKVFWQNLAGYKRQEALRPYLSSEEDRKKGKKFARYQLGDLLLHLEKKHGEDWGKVYDEAWERIDKKVEGLSKHIKLEEERRSEDAQSKAALTDWLRAKASFVIEGLKEADKDEFCRCELKLQKWYGDLRGKPFAIEAENSILDISGFSKQYNCAFIWQKDGVKKLNLYLIINYFKGGKLRFKKIKPEAFEANRFYTVINKKSGEIVIMEVNFNFDDPNLIILPLAFGKRQGREFIWNDLLSLETGSLKLANGRVIEKTLYNRRTRQDEPALFVALTFERREVLDSSNIKPMNLIGVDRGENIPAVIALTDPEGCPLSRFKDSLGNPTHILRIGESYKEKQRTIQAKKEVEQRRAGGYSRKYASKAKNLADDMVRNTARDLLYYAVTQDAMLIFENLSRGFGRQGKRTFMAERQYTRMEDWLTAKLAYEGLPSKTYLSKTLAQYTSKTCSNCGFTITSADYDRVLEKLKKTATGWMTTINGKELKVEGQITYYNRYKRQNVVKDLSVELDRLSEESVNNDISSWTKGRSGEALSLLKKRFSHRPVQEKFVCLNCGFETHADEQAALNIARSWLFLRSQEYKKYQTNKTTGNTDKRAFVETWQSFYRKKLKEVWKPAV

SEQ ID NO: 42798 - protein, 978 aa, synthetic construct
  REGION 1..978: note = engineered CasX variant
QEIKRINKIRRRLVKDSNTKKAGKTGPMKTLLVRVMTPDLRERLENLRKKPENIPQPISNTSRANLNKLLTDYTEMKKAILHVYDEEFQKDPVGLMSRVAQPASKKIDQNKLKPEMDEKGNLTTAGFACSQCGQPLFVYKLEQVSEKGKAYTNYFGRCNVAEHEKLILLAQLKPEKDSDEAVTYSLGKFGQRALDFYSIHVTKESTHPVKPLAQIAGNRYASAPVGKALSDACMGTIASFLSKYQDIIIEHQKVVKGNQKRLESLRELAGKENLEYPSVTLPPQPHTKEGVDAYNEVIARVRMWVNLNLWQKLKLSRDDAKPLLRLKGFPSFPLVERQANEVDWWDMVCNVKKLINEKKEDGKVFWQNLAGYKRQEALRPYLSSEEDRKKGKKFARYQLGDLLLHLEKKHGEDWGKVYDEAWERIDKKVEGLSKHIKLEEERRSEDAQSKAALTDWLRAKASFVIEGLKEADKDEFCRCELKLQKWYGDLRGKPFAIEAENSILDISGFSKQYNCAFIWQKDGVKKLNLYLIINYFKGGKLRFKKIKPEAFEANRFYTVINKKSGEIVIMEVNFNFDDPNLIILPLAFGKRQGREFIWNDLLSLETGSLKLANGRVIEKTLYNRRTRQDEPALFVALTFERREVLDSSNIKPMNLIGVDRGENIPAVIALTDPEGCPLSRFKDSLGNPTHILRIGESYKEKQRTIQAKKEVEQRRAGGYSRKYASKAKNLADDMVRNTARDLLYYAVTQDAMLIFENLSRGFGRQGKRTFMAERQYTRMEDWLTAKLAYEGLPSKTYLSKTLAQYTSKTCSNCGFTITSADYDRVLEKLKKTATGWMTTINGKELKVEGQITYYNRYKRQNVVKDLSVELDRLSEESVNNDISSWTKGRSGEALSLLKKRFSHRPVQEKFVCLNCGFETHADEQAALNIARSWLFLRSQEYKKYQTNKTTGNTDKRAFVETWQSFYRKKLKEVWKPAV

SEQ ID NO: 42799 - protein, 978 aa, synthetic construct
  REGION 1..978: note = engineered CasX variant
QEIKRINKIRRRLVKDSNTKKAGKTGPMKTLLVRVMTPDLRERLENLRKKPENIPQPISNTSRANLNKLLTDYTEMKKAILHVYDEEFQKDPVGLMSRVAQPASKKIDQNKLKPEMDEKGNLTTAGFACSQCGQPLFVYKLEQVSEKGKAYTNYFGRCNVAEHEKLILLAQLKPEKDSDEAVTYSLGKFGQRALDFYSIHVTKESTHPVKPLAQIAGNRYASVPVGKALSDACMGTIASFLSKYQDIIIEHQKVVKGNQKRLESLRELAGKENLEYPSVTLPPQPHTKEGVDAYNEVIARVRMWVNLNLWQKLKLSRDDAKPLLRLKGFPSFPLVERQANEVDWWDMVCNVKKLINEKKEDGKVFWQNLAGYKRQEALRPYLSSEEDRKKGKKFARYQLGDLLLHLEKKHGEDWGKVYDEAWERIDKKVEGLSKHIKLEEERRSEDAQSKAALTDWLRAKASFVIEGLKEADKDEFCRCELKLQKWYGDLRGKPFAIEAENSILDISGFSKQYNCAFIWQKDGVKKLNLYLIINYFKGGKLRFKKIKPEAFEANRFYTVINKKSGEIVIMEVNFNFDDPNLIILPLAFGKRQGREFIWNDLLSLETGSLKLANGRVIEKTLYNRRTRQDEPALFVALTFERREVLDSSNIKPMNLIGVDRGENIPAVIALTDPEGCPLSRFKDSLGNPTHILRIGESYKEKQRTIQAKKEVEQRRAGGYSRKYASKAKNLADDMVRNTARDLLYYAVTQDAMLIFENLSRGFGRQGKRTFMAERQYTRMEDWLTAKLAYEGLPSKTYLSKTLAQYTSKTCSNCGFTITSADYDRVLEKLKKTATGWMTTINGKELKVEGQITYYNRYKRQNVVKDLSVELDRLSEESVNNDISSWTKGRSGEALSLLKKRFSHRPVQEKFVCLNCGFETHADEQAALNIARSWLFLRSQEYKKYQTNKTTGNTDKRAFVETWQSFYRKKLKEVWKPAV

SEQ ID NO: 42800 - protein, 978 aa, synthetic construct
  REGION 1..978: note = engineered CasX variant
QEIKRINKIRRRLVKDSNTKKAGKTGPMKTLLVRVMTPDLRERLENLRKKPENIPQPISNTSRANLNKLLTDYTEMKKAILHVYDEEFQKDPVGLMSRVAQPASKKIDQNKLKPEMDEKGNLTTAGFACSQCGQPLFVYKLEQVSEKGKAYTNYFGRCNVAEHEKLIKLAQLKPEKDSDEAVTYSLGKFGQRALDFYSIHVTKESTHPVKPLAQIAGNRYASGPVGKALSDACMGTIASFLSKYQDIIIEHQKVVKGNQKRLESLRELAGKENLEYPSVTLPPQPHTKEGVDAYNEVIARVRMWVNLNLWQKLKLSRDDAKPLLRLKGFPSFPLVERQANEVDWWDMVCNVKKLINEKKEDGKVFWQNLAGYKRQEALRPYLSSEEDRKKGKKFARYQLGDLLLHLEKKHGEDWGKVYDEAWERIDKKVEGLSKHIKLEEERRSEDAQSKAALTDWLRAKASFVIEGLKEADKDEFCRCELKLQKWYGDLRGKPFAIEAENSILDISGFSKQYNCAFIWQKDGVKKLNLYLIINYFKGGKLRFKKIKPEAFEANRFYTVINKKSGEIVIMEVNFNFDDPNLIILPLAFGKRQGREFIWNDLLSLETGSLKLANGRVIEKTLYNRRTRQDEPALFVALTFERREVLDSSNIKPMNLIGVDRGENIPAVIALTDPEGCPLSRFKDSLGNPTHILRIGESYKEKQRTIQAKKEVEQRRAGGYSRKYASKAKNLADDMVRNTARDLLYYAVTQDAMLIFENLSRGFGRQGKRTFMAERQYTRMEDWLTAKLAYEGLPSKTYLSKTLAQYTSKTCSNCGFTITSADYDRVLEKLKKTATGWMTTINGKELKVEGQITYYNRYKRQNVVKDLSVELDRLSEESVNNDISSWTKGRSGEALSLLKKRFSHRPVQEKFVCLNCGFETHADEQAALNIARSWLFLRSQEYKKYQTNKTTGNTDKRAFVETWQSFYRKKLKEVWKPAV

SEQ ID NO: 42801 - protein, 977 aa, synthetic construct
  REGION 1..977: note = engineered CasX variant
QEIKRINKIRRRLVKDSNTKKAGKTGPMKTLLVRVMTPDLRERLENLRKKPENIPQPISNTSRANLNKLLTDYTEMKKAILHVYDEEFQKDPVGLMSRVAQPASKKIDQNKLKPEMDEKGNLTTAGFACSQCGQPLFVYKLEQVSEKGKAYTNYFGRCNVAEHEKLILLAQLKPEKDSDEAVTYSLGKFGQRALDFYSIHVTKESTHPVKPLAQIAGNRYASPVGKALSDACMGTIASFLSKYQDIIIEHQKVVKGNQKRLESLRELAGKENLEYPSVTLPPQPHTKEGVDAYNEVIARVRMWVNLNLWQKLKLSRDDAKPLLRLKGFPSFPLVERQANEVDWWDMVCNVKKLINEKKEDGKVFWQNLAGYKRQEALRPYLSSEEDRKKGKKFARYQLGDLLLHLEKKHGEDWGKVYDEAWERIDKKVEGLSKHIKLEEERRSEDAQSKAALTDWLRAKASFVIEGLKEADKDEFCRCELKLQKWYGDLRGKPFAIEAENSILDISGFSKQYNCAFIWQKDGVKKLNLYLIINYFKGGKLRFKKIKPEAFEANRFYTVINKKSGEIVIMEVNFNFDDPNLIILPLAFGKRQGREFIWNDLLSLETGSLKLANGRVIEKTLYNRRTRQDEPALFVALTFERREVLDSSNIKPMNLIGVDRGENIPAVIALTDPEGCPLSRFKDSLGNPTHILRIGESYKEKQRTIQAKKEVEQRRAGGYSRKYASKAKNLADDMVRNTARDLLYYAVTQDAMLIFENLSRGFGRQGKRTFMAERQYTRMEDWLTAKLAYEGLPSKTYLSKTLAQYTSKTCSNCGFTITSADYDRVLEKLKKTATGWMTTINGKELKVEGQITYYNRYKRQNVVKDLSVELDRLSEESVNNDISSWTKGRSGEALSLLKKRFSHRPVQEKFVCLNCGFETHADEQAALNIARSWLFLRSQEYKKYQTNKTTGNTDKRAFVETWQSFYRKKLKEVWKPAV

SEQ ID NO: 42802 - protein, 978 aa, synthetic construct
  REGION 1..978: note = engineered CasX variant
QEIKRINKIRRRLVKDSNTKKAGKTGPMKTLLVRVMTPDLRERLENLRKKPENIPQPISNTSRANLNKLLTDYTEMKKAILHVYWEEFQKDPVGLMSRVAQPASKKIDQNKLKPEMDEKGNLTTAGFACSQCGQPLFVYKLEQVSEKGKAYTNYFGRCNVAEHEKLIKLAQLKPEKDSDEAVTYSLGKFGQRALDFYSIHVTKESTHPVKPLAQIAGNRYASYPVGKALSGACMGTIASFLSKYQDIIIEHQKVVKGNQKRLESLRELAGKENLEYPSVTLPPQPHTKEGVDAYNEVIARVRMWVNLNLWQKLKLSRDDAKPLLRLKGFPSFPLVERQANEVDWWDMVCNVKKLINEKKEDGKVFWQNLAGYKRQEALRPYLSSEEDRKKGKKFARYQLGDLLLHLEKKHGEDWGKVYDEAWERIDKKVEGLSKHIKLEEERRSEDAQSKAALTDWLRAKASFVIEGLKEADKDEFCRCELKLQKWYGDLRGKPFAIEAENSILDISGFSKQYNCAFIWQKDGVKKLNLYLIINYFKGGKLRFKKIKPEAFEANRFYTVINKKSGEIVPMEVNFNFDDPNLIILPLAFGKRQGREFIWNDLLSLETGSLKLANGRVIEKTLYNRRTRQDEPALFVALTFERREVLDSSNIKPMNLIGVDRGENIPAVIALTDPEGCPLSRFKDSLGNPTHILRIGESYKEKQRTIQAKKEVEQRRAGGYSRKYASKAKNLADDMVRNTARDLLYYAVTQDAMLIFENLSRGFGRQGKRTFMAERQYTRMEDWLTAKLAYEGLPSKTYLSKTLAQYTSKTCSNCGFTITSADYDRVLEKLKKTATGWMTTINGKELKVEGQITYYNRYKRQNVVKDLSVELDRLSEESVNNDISSWTKGRSGEALSLLKKRFSHRPVQEKFVCLNCGFETHADEQAALNIARSWLFLRSQEYKKYQTNKTTGNTDKRAFVETWQSFYRKKLKEVWKPAV

SEQ ID NO: 42803 - protein, 978 aa, synthetic construct
  REGION 1..978: note = engineered CasX variant
QEIKRINKIRRRLVKDSNTKKAGKTGPMKTLLVRVMTPDLRERLENLRKKPENIPQPISNTSRANLNKLLTDYTEMKKAILHVYWEEFQKDPVGLMSRVAQPASKKIDQNKLKPEMDEKGNLTTAGFACSQCGQPLFVYKLEQVSEKGKAYTNYFGRCNVAEHEKLIKLAQLKPEKDSDEAVTYSLGKFGQRALDFYSIHVTKESTHPVKPLAQIAGNRYASHPVGKALSGACMGTIASFLSKYQDIIIEHQKVVKGNQKRLESLRELAGKENLEYPSVTLPPQPHTKEGVDAYNEVIARVRMWVNLNLWQKLKLSRDDAKPLLRLKGFPSFPLVERQANEVDWWDMVCNVKKLINEKKEDGKVFWQNLAGYKRQEALRPYLSSEEDRKKGKKFARYQLGDLLLHLEKKHGEDWGKVYDEAWERIDKKVEGLSKHIKLEEERRSEDAQSKAALTDWLRAKASFVIEGLKEADKDEFCRCELKLQKWYGDLRGKPFAIEAENSILDISGFSKQYNCAFIWQKDGVKKLNLYLIINYFKGGKLRFKKIKPEAFEANRFYTVINKKSGEIVPMEVNFNFDDPNLIILPLAFGKRQGREFIWNDLLSLETGSLKLANGRVIEKTLYNRRTRQDEPALFVALTFERREVLDSSNIKPMNLIGVDRGENIPAVIALTDPEGCPLSRFKDSLGNPTHILRIGESYKEKQRTIQAKKEVEQRRAGGYSRKYASKAKNLADDMVRNTARDLLYYAVTQDAMLIFENLSRGFGRQGKRTFMAERQYTRMEDWLTAKLAYEGLPSKTYLSKTLAQYTSKTCSNCGFTITSADYDRVLEKLKKTATGWMTTINGKELKVEGQITYYNRYKRQNVVKDLSVELDRLSEESVNNDISSWTKGRSGEALSLLKKRFSHRPVQEKFVCLNCGFETHADEQAALNIARSWLFLRSQEYKKYQTNKTTGNTDKRAFVETWQSFYRKKLKEVWKPAV

SEQ ID NO: 42804 - protein, 978 aa, synthetic construct
  REGION 1..978: note = engineered CasX variant
QEIKRINKIRRRLVKDSNTKKAGKTGPMKTLLVRVMTPDLRERLENLRKKPENIPQPISNTSRANLNKLLTDYTEMKKAILHVYWEEFQKDPVGLMSRVAQPASKKIDQNKLKPEMDEKGNLTTAGFACSQCGQPLFVYKLEQVSEKGKAYTNYFGRCNVAEHEKLIKLAQLKPEKDSDEAVTYSLGKFGQRALDFYSIHVTKESTHPVKPLAQIAGNRYASTPVGKALSGACMGTIASFLSKYQDIIIEHQKVVKGNQKRLESLRELAGKENLEYPSVTLPPQPHTKEGVDAYNEVIARVRMWVNLNLWQKLKLSRDDAKPLLRLKGFPSFPLVERQANEVDWWDMVCNVKKLINEKKEDGKVFWQNLAGYKRQEALRPYLSSEEDRKKGKKFARYQLGDLLLHLEKKHGEDWGKVYDEAWERIDKKVEGLSKHIKLEEERRSEDAQSKAALTDWLRAKASFVIEGLKEADKDEFCRCELKLQKWYGDLRGKPFAIEAENSILDISGFSKQYNCAFIWQKDGVKKLNLYLIINYFKGGKLRFKKIKPEAFEANRFYTVINKKSGEIVPMEVNFNFDDPNLIILPLAFGKRQGREFIWNDLLSLETGSLKLANGRVIEKTLYNRRTRQDEPALFVALTFERREVLDSSNIKPMNLIGVDRGENIPAVIALTDPEGCPLSRFKDSLGNPTHILRIGESYKEKQRTIQAKKEVEQRRAGGYSRKYASKAKNLADDMVRNTARDLLYYAVTQDAMLIFENLSRGFGRQGKRTFMAERQYTRMEDWLTAKLAYEGLPSKTYLSKTLAQYTSKTCSNCGFTITSADYDRVLEKLKKTATGWMTTINGKELKVEGQITYYNRYKRQNVVKDLSVELDRLSEESVNNDISSWTKGRSGEALSLLKKRFSHRPVQEKFVCLNCGFETHADEQAALNIARSWLFLRSQEYKKYQTNKTTGNTDKRAFVETWQSFYRKKLKEVWKPAV

SEQ ID NO: 42805 - protein, 978 aa, synthetic construct
  REGION 1..978: note = engineered CasX variant
QEIKRINKIRRRLVKDSNTKKAGKTGPMKTLLVRVMTPDLRERLENLRKKPENIPQPISNTSRANLNKLLTDYTEMKKAILHVYWEEFQKDPVGLMSRVAQPASKKIDQNKLKPEMDEKGNLTTAGFACSQCGQPLFVYKLEQVSEKGKAYTNYFGRCNVAEHEKLIKLAQLKPEKDSDEAVTYSLGKFGQRALDFYSIHVTKESTHPVKPLAQIAGNRYASAPVGKALSGACMGTIASFLSKYQDIIIEHQKVVKGNQKRLESLRELAGKENLEYPSVTLPPQPHTKEGVDAYNEVIARVRMWVNLNLWQKLKLSRDDAKPLLRLKGFPSFPLVERQANEVDWWDMVCNVKKLINEKKEDGKVFWQNLAGYKRQEALRPYLSSEEDRKKGKKFARYQLGDLLLHLEKKHGEDWGKVYDEAWERIDKKVEGLSKHIKLEEERRSEDAQSKAALTDWLRAKASFVIEGLKEADKDEFCRCELKLQKWYGDLRGKPFAIEAENSILDISGFSKQYNCAFIWQKDGVKKLNLYLIINYFKGGKLRFKKIKPEAFEANRFYTVINKKSGEIVPMEVNFNFDDPNLIILPLAFGKRQGREFIWNDLLSLETGSLKLANGRVIEKTLYNRRTRQDEPALFVALTFERREVLDSSNIKPMNLIGVDRGENIPAVIALTDPEGCPLSRFKDSLGNPTHILRIGESYKEKQRTIQAKKEVEQRRAGGYSRKYASKAKNLADDMVRNTARDLLYYAVTQDAMLIFENLSRGFGRQGKRTFMAERQYTRMEDWLTAKLAYEGLPSKTYLSKTLAQYTSKTCSNCGFTITSADYDRVLEKLKKTATGWMTTINGKELKVEGQITYYNRYKRQNVVKDLSVELDRLSEESVNNDISSWTKGRSGEALSLLKKRFSHRPVQEKFVCLNCGFETHADEQAALNIARSWLFLRSQEYKKYQTNKTTGNTDKRAFVETWQSFYRKKLKEVWKPAV

SEQ ID NO: 42806 - protein, 978 aa, synthetic construct
  REGION 1..978: note = engineered CasX variant
QEIKRINKIRRRLVKDSNTKKAGKTGPMKTLLVRVMTPDLRERLENLRKKPENIPQPISNTSRANLNKLLTDYTEMKKAILHVYWEEFQKDPVGLMSRVAQPASKKIDQNKLKPEMDEKGNLTTAGFACSQCGQPLFVYKLEQVSEKGKAYTNYFGRCNVAEHEKLIKLAQLKPEKDSDEAVTYSLGKFGQRALDFYSIHVTKESTHPVKPLAQIAGNRYASVPVGKALSGACMGTIASFLSKYQDIIIEHQKVVKGNQKRLESLRELAGKENLEYPSVTLPPQPHTKEGVDAYNEVIARVRMWVNLNLWQKLKLSRDDAKPLLRLKGFPSFPLVERQANEVDWWDMVCNVKKLINEKKEDGKVFWQNLAGYKRQEALRPYLSSEEDRKKGKKFARYQLGDLLLHLEKKHGEDWGKVYDEAWERIDKKVEGLSKHIKLEEERRSEDAQSKAALTDWLRAKASFVIEGLKEADKDEFCRCELKLQKWYGDLRGKPFAIEAENSILDISGFSKQYNCAFIWQKDGVKKLNLYLIINYFKGGKLRFKKIKPEAFEANRFYTVINKKSGEIVPMEVNFNFDDPNLIILPLAFGKRQGREFIWNDLLSLETGSLKLANGRVIEKTLYNRRTRQDEPALFVALTFERREVLDSSNIKPMNLIGVDRGENIPAVIALTDPEGCPLSRFKDSLGNPTHILRIGESYKEKQRTIQAKKEVEQRRAGGYSRKYASKAKNLADDMVRNTARDLLYYAVTQDAMLIFENLSRGFGRQGKRTFMAERQYTRMEDWLTAKLAYEGLPSKTYLSKTLAQYTSKTCSNCGFTITSADYDRVLEKLKKTATGWMTTINGKELKVEGQITYYNRYKRQNVVKDLSVELDRLSEESVNNDISSWTKGRSGEALSLLKKRFSHRPVQEKFVCLNCGFETHADEQAALNIARSWLFLRSQEYKKYQTNKTTGNTDKRAFVETWQSFYRKKLKEVWKPAV

SEQ ID NO: 42807 - protein, 979 aa, synthetic construct
  REGION 1..979: note = engineered CasX variant
QEIKRINKIRRRLVKDSNTKKAGKTGPMKTLLVRVMTPDLRERLENLRKKPENIPQPISNTSRANLNKLLTDYTEMKKAILHVYWEEFQKDPVGLMSRVAQPASKKIDQNKLKPEMDEKGNLTTAGFACSQCGQPLFVYKLEQVSEKGKAYTNYFGRCNVAEHEKLIKKLAQLKPEKDSDEAVTYSLGKFGQRALDFYSIHVTKESTHPVKPLAQIAGNRYASGPVGKALSGACMGTIASFLSKYQDIIIEHQKVVKGNQKRLESLRELAGKENLEYPSVTLPPQPHTKEGVDAYNEVIARVRMWVNLNLWQKLKLSRDDAKPLLRLKGFPSFPLVERQANEVDWWDMVCNVKKLINEKKEDGKVFWQNLAGYKRQEALRPYLSSEEDRKKGKKFARYQLGDLLLHLEKKHGEDWGKVYDEAWERIDKKVEGLSKHIKLEEERRSEDAQSKAALTDWLRAKASFVIEGLKEADKDEFCRCELKLQKWYGDLRGKPFAIEAENSILDISGFSKQYNCAFIWQKDGVKKLNLYLIINYFKGGKLRFKKIKPEAFEANRFYTVINKKSGEIVPMEVNFNFDDPNLIILPLAFGKRQGREFIWNDLLSLETGSLKLANGRVIEKTLYNRRTRQDEPALFVALTFERREVLDSSNIKPMNLIGVDRGENIPAVIALTDPEGCPLSRFKDSLGNPTHILRIGESYKEKQRTIQAKKEVEQRRAGGYSRKYASKAKNLADDMVRNTARDLLYYAVTQDAMLIFENLSRGFGRQGKRTFMAERQYTRMEDWLTAKLAYEGLPSKTYLSKTLAQYTSKTCSNCGFTITSADYDRVLEKLKKTATGWMTTINGKELKVEGQITYYNRYKRQNVVKDLSVELDRLSEESVNNDISSWTKGRSGEALSLLKKRFSHRPVQEKFVCLNCGFETHADEQAALNIARSWLFLRSQEYKKYQTNKTTGNTDKRAFVETWQSFYRKKLKEVWKPAV

SEQ ID NO: 42808 - protein, 977 aa, synthetic construct
  REGION 1..977: note = engineered CasX variant
QEIKRINKIRRRLVKDSNTKKAGKTGPMKTLLVRVMTPDLRERLENLRKKPENIPQPISNTSRANLNKLLTDYTEMKKAILHVYWEEFQKDPVGLMSRVAQPASKKIDQNKLKPEMDEKGNLTTAGFACSQCGQPLFVYKLEQVSEKGKAYTNYFGRCNVAEHEKLIKLAQLKPEKDSDEAVTYSLGKFGQRALDFYSIHVTKESTHPVKPLAQIAGNRYASPVGKALSGACMGTIASFLSKYQDIIIEHQKVVKGNQKRLESLRELAGKENLEYPSVTLPPQPHTKEGVDAYNEVIARVRMWVNLNLWQKLKLSRDDAKPLLRLKGFPSFPLVERQANEVDWWDMVCNVKKLINEKKEDGKVFWQNLAGYKRQEALRPYLSSEEDRKKGKKFARYQLGDLLLHLEKKHGEDWGKVYDEAWERIDKKVEGLSKHIKLEEERRSEDAQSKAALTDWLRAKASFVIEGLKEADKDEFCRCELKLQKWYGDLRGKPFAIEAENSILDISGFSKQYNCAFIWQKDGVKKLNLYLIINYFKGGKLRFKKIKPEAFEANRFYTVINKKSGEIVPMEVNFNFDDPNLIILPLAFGKRQGREFIWNDLLSLETGSLKLANGRVIEKTLYNRRTRQDEPALFVALTFERREVLDSSNIKPMNLIGVDRGENIPAVIALTDPEGCPLSRFKDSLGNPTHILRIGESYKEKQRTIQAKKEVEQRRAGGYSRKYASKAKNLADDMVRNTARDLLYYAVTQDAMLIFENLSRGFGRQGKRTFMAERQYTRMEDWLTAKLAYEGLPSKTYLSKTLAQYTSKTCSNCGFTITSADYDRVLEKLKKTATGWMTTINGKELKVEGQITYYNRYKRQNVVKDLSVELDRLSEESVNNDISSWTKGRSGEALSLLKKRFSHRPVQEKFVCLNCGFETHADEQAALNIARSWLFLRSQEYKKYQTNKTTGNTDKRAFVETWQSFYRKKLKEVWKPAV

SEQ ID NO: 42809 - protein, 978 aa, synthetic construct
  REGION 1..978: note = engineered CasX variant
QEIKRINKIRRRLVKDSNTKKAGKTGPMKTLLVRVMTPDLRERLENLRKKPENIPQPISNTSRANLNKLLTDYTEMKKAILHVYWEEFQKDPVGLMSRVAQPASKKIDQNKLKPEMDEKGNLTTAGFACSQCGQPLFVYKLEQVSEKGKAYTNYFGRCNVAEHEKLIKLAQLKPEKDSDEAVTYSLGKFGQRALDFYSIHVTKESTHPVKPLAQIAGNRYASYPVGKALSDACMGTIASFLSKYQDIIIEHQKVVKGNQKRLESLRELAGKENLEYPSVTLPPQPHTKEGVDAYNEVIARVRMWVNLNLWQKLKLSRDDAKPLLRLKNFPSFPLVERQANEVDWWDMVCNVKKLINEKKEDGKVFWQNLAGYKRQEALRPYLSSEEDRKKGKKFARYQLGDLLLHLEKKHGEDWGKVYDEAWERIDKKVEGLSKHIKLEEERRSEDAQSKAALTDWLRAKASFVIEGLKEADKDEFCRCELKLQKWYGDLRGKPFAIEAENSILDISGFSKQYNCAFIWQKDGVKKLNLYLIINYFKGGKLRFKKIKPEAFEANRFYTVINKKSGEIVPMEVNFNFDDPNLIILPLAFGKRQGREFIWNDLLSLETGSLKLANGRVIEKTLYNRRTRQDEPALFVALTFERREVLDSSNIKPMNLIGVDRGENIPAVIALTDPEGCPLSRFKDSLGNPTHILRIGESYKEKQRTIQAKKEVEQRRAGGYSRKYASKAKNLADDMVRNTARDLLYYAVTQDAMLIFENLSRGFGRQGKRTFMAERQYTRMEDWLTAKLAYEGLPSKTYLSKTLAQYTSKTCSNCGFTITSADYDRVLEKLKKTATGWMTTINGKELKVEGQITYYNRYKRQNVVKDLSVELDRLSEESVNNDISSWTKGRSGEALSLLKKRFSHRPVQEKFVCLNCGFETHADEQAALNIARSWLFLRSQEYKKYQTNKTTGNTDKRAFVETWQSFYRKKLKEVWKPAV

SEQ ID NO: 42810 - protein, 978 aa, synthetic construct
  REGION 1..978: note = engineered CasX variant
QEIKRINKIRRRLVKDSNTKKAGKTGPMKTLLVRVMTPDLRERLENLRKKPENIPQPISNTSRANLNKLLTDYTEMKKAILHVYWEEFQKDPVGLMSRVAQPASKKIDQNKLKPEMDEKGNLTTAGFACSQCGQPLFVYKLEQVSEKGKAYTNYFGRCNVAEHEKLIKLAQLKPEKDSDEAVTYSLGKFGQRALDFYSIHVTKESTHPVKPLAQIAGNRYASHPVGKALSDACMGTIASFLSKYQDIIIEHQKVVKGNQKRLESLRELAGKENLEYPSVTLPPQPHTKEGVDAYNEVIARVRMWVNLNLWQKLKLSRDDAKPLLRLKNFPSFPLVERQANEVDWWDMVCNVKKLINEKKEDGKVFWQNLAGYKRQEALRPYLSSEEDRKKGKKFARYQLGDLLLHLEKKHGEDWGKVYDEAWERIDKKVEGLSKHIKLEEERRSEDAQSKAALTDWLRAKASFVIEGLKEADKDEFCRCELKLQKWYGDLRGKPFAIEAENSILDISGFSKQYNCAFIWQKDGVKKLNLYLIINYFKGGKLRFKKIKPEAFEANRFYTVINKKSGEIVPMEVNFNFDDPNLIILPLAFGKRQGREFIWNDLLSLETGSLKLANGRVIEKTLYNRRTRQDEPALFVALTFERREVLDSSNIKPMNLIGVDRGENIPAVIALTDPEGCPLSRFKDSLGNPTHILRIGESYKEKQRTIQAKKEVEQRRAGGYSRKYASKAKNLADDMVRNTARDLLYYAVTQDAMLIFENLSRGFGRQGKRTFMAERQYTRMEDWLTAKLAYEGLPSKTYLSKTLAQYTSKTCSNCGFTITSADYDRVLEKLKKTATGWMTTINGKELKVEGQITYYNRYKRQNVVKDLSVELDRLSEESVNNDISSWTKGRSGEALSLLKKRFSHRPVQEKFVCLNCGFETHADEQAALNIARSWLFLRSQEYKKYQTNKTTGNTDKRAFVETWQSFYRKKLKEVWKPAV

SEQ ID NO: 42811 - protein, 978 aa, synthetic construct
  REGION 1..978: note = engineered CasX variant
QEIKRINKIRRRLVKDSNTKKAGKTGPMKTLLVRVMTPDLRERLENLRKKPENIPQPISNTSRANLNKLLTDYTEMKKAILHVYWEEFQKDPVGLMSRVAQPASKKIDQNKLKPEMDEKGNLTTAGFACSQCGQPLFVYKLEQVSEKGKAYTNYFGRCNVAEHEKLIKLAQLKPEKDSDEAVTYSLGKFGQRALDFYSIHVTKESTHPVKPLAQIAGNRYASTPVGKALSDACMGTIASFLSKYQDIIIEHQKVVKGNQKRLESLRELAGKENLEYPSVTLPPQPHTKEGVDAYNEVIARVRMWVNLNLWQKLKLSRDDAKPLLRLKNFPSFPLVERQANEVDWWDMVCNVKKLINEKKEDGKVFWQNLAGYKRQEALRPYLSSEEDRKKGKKFARYQLGDLLLHLEKKHGEDWGKVYDEAWERIDKKVEGLSKHIKLEEERRSEDAQSKAALTDWLRAKASFVIEGLKEADKDEFCRCELKLQKWYGDLRGKPFAIEAENSILDISGFSKQYNCAFIWQKDGVKKLNLYLIINYFKGGKLRFKKIKPEAFEANRFYTVINKKSGEIVPMEVNFNFDDPNLIILPLAFGKRQGREFIWNDLLSLETGSLKLANGRVIEKTLYNRRTRQDEPALFVALTFERREVLDSSNIKPMNLIGVDRGENIPAVIALTDPEGCPLSRFKDSLGNPTHILRIGESYKEKQRTIQAKKEVEQRRAGGYSRKYASKAKNLADDMVRNTARDLLYYAVTQDAMLIFENLSRGFGRQGKRTFMAERQYTRMEDWLTAKLAYEGLPSKTYLSKTLAQYTSKTCSNCGFTITSADYDRVLEKLKKTATGWMTTINGKELKVEGQITYYNRYKRQNVVKDLSVELDRLSEESVNNDISSWTKGRSGEALSLLKKRFSHRPVQEKFVCLNCGFETHADEQAALNIARSWLFLRSQEYKKYQTNKTTGNTDKRAFVETWQSFYRKKLKEVWKPAV

SEQ ID NO: 42812 - protein, 978 aa, synthetic construct
  REGION 1..978: note = engineered CasX variant
QEIKRINKIRRRLVKDSNTKKAGKTGPMKTLLVRVMTPDLRERLENLRKKPENIPQPISNTSRANLNKLLTDYTEMKKAILHVYWEEFQKDPVGLMSRVAQPASKKIDQNKLKPEMDEKGNLTTAGFACSQCGQPLFVYKLEQVSEKGKAYTNYFGRCNVAEHEKLIKLAQLKPEKDSDEAVTYSLGKFGQRALDFYSIHVTKESTHPVKPLAQIAGNRYASAPVGKALSDACMGTIASFLSKYQDIIIEHQKVVKGNQKRLESLRELAGKENLEYPSVTLPPQPHTKEGVDAYNEVIARVRMWVNLNLWQKLKLSRDDAKPLLRLKNFPSFPLVERQANEVDWWDMVCNVKKLINEKKEDGKVFWQNLAGYKRQEALRPYLSSEEDRKKGKKFARYQLGDLLLHLEKKHGEDWGKVYDEAWERIDKKVEGLSKHIKLEEERRSEDAQSKAALTDWLRAKASFVIEGLKEADKDEFCRCELKLQKWYGDLRGKPFAIEAENSILDISGFSKQYNCAFIWQKDGVKKLNLYLIINYFKGGKLRFKKIKPEAFEANRFYTVINKKSGEIVPMEVNFNFDDPNLIILPLAFGKRQGREFIWNDLLSLETGSLKLANGRVIEKTLYNRRTRQDEPALFVALTFERREVLDSSNIKPMNLIGVDRGENIPAVIALTDPEGCPLSRFKDSLGNPTHILRIGESYKEKQRTIQAKKEVEQRRAGGYSRKYASKAKNLADDMVRNTARDLLYYAVTQDAMLIFENLSRGFGRQGKRTFMAERQYTRMEDWLTAKLAYEGLPSKTYLSKTLAQYTSKTCSNCGFTITSADYDRVLEKLKKTATGWMTTINGKELKVEGQITYYNRYKRQNVVKDLSVELDRLSEESVNNDISSWTKGRSGEALSLLKKRFSHRPVQEKFVCLNCGFETHADEQAALNIARSWLFLRSQEYKKYQTNKTTGNTDKRAFVETWQSFYRKKLKEVWKPAV

SEQ ID NO: 42813 - protein, 978 aa, synthetic construct
  REGION 1..978: note = engineered CasX variant
QEIKRINKIRRRLVKDSNTKKAGKTGPMKTLLVRVMTPDLRERLENLRKKPENIPQPISNTSRANLNKLLTDYTEMKKAILHVYWEEFQKDPVGLMSRVAQPASKKIDQNKLKPEMDEKGNLTTAGFACSQCGQPLFVYKLEQVSEKGKAYTNYFGRCNVAEHEKLIKLAQLKPEKDSDEAVTYSLGKFGQRALDFYSIHVTKESTHPVKPLAQIAGNRYASVPVGKALSDACMGTIASFLSKYQDIIIEHQKVVKGNQKRLESLRELAGKENLEYPSVTLPPQPHTKEGVDAYNEVIARVRMWVNLNLWQKLKLSRDDAKPLLRLKNFPSFPLVERQANEVDWWDMVCNVKKLINEKKEDGKVFWQNLAGYKRQEALRPYLSSEEDRKKGKKFARYQLGDLLLHLEKKHGEDWGKVYDEAWERIDKKVEGLSKHIKLEEERRSEDAQSKAALTDWLRAKASFVIEGLKEADKDEFCRCELKLQKWYGDLRGKPFAIEAENSILDISGFSKQYNCAFIWQKDGVKKLNLYLIINYFKGGKLRFKKIKPEAFEANRFYTVINKKSGEIVPMEVNFNFDDPNLIILPLAFGKRQGREFIWNDLLSLETGSLKLANGRVIEKTLYNRRTRQDEPALFVALTFERREVLDSSNIKPMNLIGVDRGENIPAVIALTDPEGCPLSRFKDSLGNPTHILRIGESYKEKQRTIQAKKEVEQRRAGGYSRKYASKAKNLADDMVRNTARDLLYYAVTQDAMLIFENLSRGFGRQGKRTFMAERQYTRMEDWLTAKLAYEGLPSKTYLSKTLAQYTSKTCSNCGFTITSADYDRVLEKLKKTATGWMTTINGKELKVEGQITYYNRYKRQNVVKDLSVELDRLSEESVNNDISSWTKGRSGEALSLLKKRFSHRPVQEKFVCLNCGFETHADEQAALNIARSWLFLRSQEYKKYQTNKTTGNTDKRAFVETWQSFYRKKLKEVWKPAV

SEQ ID NO: 42814 - protein, 979 aa, synthetic construct
  REGION 1..979: note = engineered CasX variant
QEIKRINKIRRRLVKDSNTKKAGKTGPMKTLLVRVMTPDLRERLENLRKKPENIPQPISNTSRANLNKLLTDYTEMKKAILHVYWEEFQKDPVGLMSRVAQPASKKIDQNKLKPEMDEKGNLTTAGFACSQCGQPLFVYKLEQVSEKGKAYTNYFGRCNVAEHEKLIKKLAQLKPEKDSDEAVTYSLGKFGQRALDFYSIHVTKESTHPVKPLAQIAGNRYASGPVGKALSDACMGTIASFLSKYQDIIIEHQKVVKGNQKRLESLRELAGKENLEYPSVTLPPQPHTKEGVDAYNEVIARVRMWVNLNLWQKLKLSRDDAKPLLRLKNFPSFPLVERQANEVDWWDMVCNVKKLINEKKEDGKVFWQNLAGYKRQEALRPYLSSEEDRKKGKKFARYQLGDLLLHLEKKHGEDWGKVYDEAWERIDKKVEGLSKHIKLEEERRSEDAQSKAALTDWLRAKASFVIEGLKEADKDEFCRCELKLQKWYGDLRGKPFAIEAENSILDISGFSKQYNCAFIWQKDGVKKLNLYLIINYFKGGKLRFKKIKPEAFEANRFYTVINKKSGEIVPMEVNFNFDDPNLIILPLAFGKRQGREFIWNDLLSLETGSLKLANGRVIEKTLYNRRTRQDEPALFVALTFERREVLDSSNIKPMNLIGVDRGENIPAVIALTDPEGCPLSRFKDSLGNPTHILRIGESYKEKQRTIQAKKEVEQRRAGGYSRKYASKAKNLADDMVRNTARDLLYYAVTQDAMLIFENLSRGFGRQGKRTFMAERQYTRMEDWLTAKLAYEGLPSKTYLSKTLAQYTSKTCSNCGFTITSADYDRVLEKLKKTATGWMTTINGKELKVEGQITYYNRYKRQNVVKDLSVELDRLSEESVNNDISSWTKGRSGEALSLLKKRFSHRPVQEKFVCLNCGFETHADEQAALNIARSWLFLRSQEYKKYQTNKTTGNTDKRAFVETWQSFYRKKLKEVWKPAV

SEQ ID NO: 42815 - protein, 977 aa, synthetic construct
  REGION 1..977: note = engineered CasX variant
QEIKRINKIRRRLVKDSNTKKAGKTGPMKTLLVRVMTPDLRERLENLRKKPENIPQPISNTSRANLNKLLTDYTEMKKAILHVYWEEFQKDPVGLMSRVAQPASKKIDQNKLKPEMDEKGNLTTAGFACSQCGQPLFVYKLEQVSEKGKAYTNYFGRCNVAEHEKLIKLAQLKPEKDSDEAVTYSLGKFGQRALDFYSIHVTKESTHPVKPLAQIAGNRYASPVGKALSDACMGTIASFLSKYQDIIIEHQKVVKGNQKRLESLRELAGKENLEYPSVTLPPQPHTKEGVDAYNEVIARVRMWVNLNLWQKLKLSRDDAKPLLRLKNFPSFPLVERQANEVDWWDMVCNVKKLINEKKEDGKVFWQNLAGYKRQEALRPYLSSEEDRKKGKKFARYQLGDLLLHLEKKHGEDWGKVYDEAWERIDKKVEGLSKHIKLEEERRSEDAQSKAALTDWLRAKASFVIEGLKEADKDEFCRCELKLQKWYGDLRGKPFAIEAENSILDISGFSKQYNCAFIWQKDGVKKLNLYLIINYFKGGKLRFKKIKPEAFEANRFYTVINKKSGEIVPMEVNFNFDDPNLIILPLAFGKRQGREFIWNDLLSLETGSLKLANGRVIEKTLYNRRTRQDEPALFVALTFERREVLDSSNIKPMNLIGVDRGENIPAVIALTDPEGCPLSRFKDSLGNPTHILRIGESYKEKQRTIQAKKEVEQRRAGGYSRKYASKAKNLADDMVRNTARDLLYYAVTQDAMLIFENLSRGFGRQGKRTFMAERQYTRMEDWLTAKLAYEGLPSKTYLSKTLAQYTSKTCSNCGFTITSADYDRVLEKLKKTATGWMTTINGKELKVEGQITYYNRYKRQNVVKDLSVELDRLSEESVNNDISSWTKGRSGEALSLLKKRFSHRPVQEKFVCLNCGFETHADEQAALNIARSWLFLRSQEYKKYQTNKTTGNTDKRAFVETWQSFYRKKLKEVWKPAV

SEQ ID NO: 42816 - protein, 978 aa, synthetic construct
  REGION 1..978: note = engineered CasX variant
QEIKRINKIRRRLVKDSNTKKAGKTGPMKTLLVRVMTPDLRERLENLRKKPENIPQPISNTSRANLNKLLTDYTEMKKAILHVYWEEFQKDPVGLMSRVAQPASKKIDQNKLKPEMDEKGNLTTAGFACSQCGQPLFVYKLEQVSEKGKAYTNYFGRCNVAEHEKLIKLAQLKPEKDSDEAVTYSLGKFGQRALDFYSIHVTKESTHPVKPLAQIAGNRYASYPVGKALSDACMGTIASFLSKYQDIIIEHQKVVKGNQKRLESLRELAGKENLEYPSVTLPPQPHTKEGVDAYNEVIARVRMWVNLNLWQKLKLSRDDAKPLLRLKGFPSFPLVERQANEVDWWDMVCNVKKLINEKKEDGKVFWQNLAGYKRQEALRPYLSSEEDRKKGKKFARYQLGDLLNHLEKKHGEDWGKVYDEAWERIDKKVEGLSKHIKLEEERRSEDAQSKAALTDWLRAKASFVIEGLKEADKDEFCRCELKLQKWYGDLRGKPFAIEAENSILDISGFSKQYNCAFIWQKDGVKKLNLYLIINYFKGGKLRFKKIKPEAFEANRFYTVINKKSGEIVPMEVNFNFDDPNLIILPLAFGKRQGREFIWNDLLSLETGSLKLANGRVIEKTLYNRRTRQDEPALFVALTFERREVLDSSNIKPMNLIGVDRGENIPAVIALTDPEGCPLSRFKDSLGNPTHILRIGESYKEKQRTIQAKKEVEQRRAGGYSRKYASKAKNLADDMVRNTARDLLYYAVTQDAMLIFENLSRGFGRQGKRTFMAERQYTRMEDWLTAKLAYEGLPSKTYLSKTLAQYTSKTCSNCGFTITSADYDRVLEKLKKTATGWMTTINGKELKVEGQITYYNRYKRQNVVKDLSVELDRLSEESVNNDISSWTKGRSGEALSLLKKRFSHRPVQEKFVCLNCGFETHADEQAALNIARSWLFLRSQEYKKYQTNKTTGNTDKRAFVETWQSFYRKKLKEVWKPAV

SEQ ID NO: 42817 - protein, 978 aa, synthetic construct
  REGION 1..978: note = engineered CasX variant
QEIKRINKIRRRLVKDSNTKKAGKTGPMKTLLVRVMTPDLRERLENLRKKPENIPQPISNTSRANLNKLLTDYTEMKKAILHVYWEEFQKDPVGLMSRVAQPASKKIDQNKLKPEMDEKGNLTTAGFACSQCGQPLFVYKLEQVSEKGKAYTNYFGRCNVAEHEKLIKLAQLKPEKDSDEAVTYSLGKFGQRALDFYSIHVTKESTHPVKPLAQIAGNRYASHPVGKALSDACMGTIASFLSKYQDIIIEHQKVVKGNQKRLESLRELAGKENLEYPSVTLPPQPHTKEGVDAYNEVIARVRMWVNLNLWQKLKLSRDDAKPLLRLKGFPSFPLVERQANEVDWWDMVCNVKKLINEKKEDGKVFWQNLAGYKRQEALRPYLSSEEDRKKGKKFARYQLGDLLNHLEKKHGEDWGKVYDEAWERIDKKVEGLSKHIKLEEERRSEDAQSKAALTDWLRAKASFVIEGLKEADKDEFCRCELKLQKWYGDLRGKPFAIEAENSILDISGFSKQYNCAFIWQKDGVKKLNLYLIINYFKGGKLRFKKIKPEAFEANRFYTVINKKSGEIVPMEVNFNFDDPNLIILPLAFGKRQGREFIWNDLLSLETGSLKLANGRVIEKTLYNRRTRQDEPALFVALTFERREVLDSSNIKPMNLIGVDRGENIPAVIALTDPEGCPLSRFKDSLGNPTHILRIGESYKEKQRTIQAKKEVEQRRAGGYSRKYASKAKNLADDMVRNTARDLLYYAVTQDAMLIFENLSRGFGRQGKRTFMAERQYTRMEDWLTAKLAYEGLPSKTYLSKTLAQYTSKTCSNCGFTITSADYDRVLEKLKKTATGWMTTINGKELKVEGQITYYNRYKRQNVVKDLSVELDRLSEESVNNDISSWTKGRSGEALSLLKKRFSHRPVQEKFVCLNCGFETHADEQAALNIARSWLFLRSQEYKKYQTNKTTGNTDKRAFVETWQSFYRKKLKEVWKPAV

SEQ ID NO: 42818 - protein, 978 aa, synthetic construct
  REGION 1..978: note = engineered CasX variant
QEIKRINKIRRRLVKDSNTKKAGKTGPMKTLLVRVMTPDLRERLENLRKKPENIPQPISNTSRANLNKLLTDYTEMKKAILHVYWEEFQKDPVGLMSRVAQPASKKIDQNKLKPEMDEKGNLTTAGFACSQCGQPLFVYKLEQVSEKGKAYTNYFGRCNVAEHEKLIKLAQLKPEKDSDEAVTYSLGKFGQRALDFYSIHVTKESTHPVKPLAQIAGNRYASTPVGKALSDACMGTIASFLSKYQDIIIEHQKVVKGNQKRLESLRELAGKENLEYPSVTLPPQPHTKEGVDAYNEVIARVRMWVNLNLWQKLKLSRDDAKPLLRLKGFPSFPLVERQANEVDWWDMVCNVKKLINEKKEDGKVFWQNLAGYKRQEALRPYLSSEEDRKKGKKFARYQLGDLLNHLEKKHGEDWGKVYDEAWERIDKKVEGLSKHIKLEEERRSEDAQSKAALTDWLRAKASFVIEGLKEADKDEFCRCELKLQKWYGDLRGKPFAIEAENSILDISGFSKQYNCAFIWQKDGVKKLNLYLIINYFKGGKLRFKKIKPEAFEANRFYTVINKKSGEIVPMEVNFNFDDPNLIILPLAFGKRQGREFIWNDLLSLETGSLKLANGRVIEKTLYNRRTRQDEPALFVALTFERREVLDSSNIKPMNLIGVDRGENIPAVIALTDPEGCPLSRFKDSLGNPTHILRIGESYKEKQRTIQAKKEVEQRRAGGYSRKYASKAKNLADDMVRNTARDLLYYAVTQDAMLIFENLSRGFGRQGKRTFMAERQYTRMEDWLTAKLAYEGLPSKTYLSKTLAQYTSKTCSNCGFTITSADYDRVLEKLKKTATGWMTTINGKELKVEGQITYYNRYKRQNVVKDLSVELDRLSEESVNNDISSWTKGRSGEALSLLKKRFSHRPVQEKFVCLNCGFETHADEQAALNIARSWLFLRSQEYKKYQTNKTTGNTDKRAFVETWQSFYRKKLKEVWKPAV

SEQ ID NO: 42819 - protein, 978 aa, synthetic construct
  REGION 1..978: note = engineered CasX variant
QEIKRINKIRRRLVKDSNTKKAGKTGPMKTLLVRVMTPDLRERLENLRKKPENIPQPISNTSRANLNKLLTDYTEMKKAILHVYWEEFQKDPVGLMSRVAQPASKKIDQNKLKPEMDEKGNLTTAGFACSQCGQPLFVYKLEQVSEKGKAYTNYFGRCNVAEHEKLIKLAQLKPEKDSDEAVTYSLGKFGQRALDFYSIHVTKESTHPVKPLAQIAGNRYASAPVGKALSDACMGTIASFLSKYQDIIIEHQKVVKGNQKRLESLRELAGKENLEYPSVTLPPQPHTKEGVDAYNEVIARVRMWVNLNLWQKLKLSRDDAKPLLRLKGFPSFPLVERQANEVDWWDMVCNVKKLINEKKEDGKVFWQNLAGYKRQEALRPYLSSEEDRKKGKKFARYQLGDLLNHLEKKHGEDWGKVYDEAWERIDKKVEGLSKHIKLEEERRSEDAQSKAALTDWLRAKASFVIEGLKEADKDEFCRCELKLQKWYGDLRGKPFAIEAENSILDISGFSKQYNCAFIWQKDGVKKLNLYLIINYFKGGKLRFKKIKPEAFEANRFYTVINKKSGEIVPMEVNFNFDDPNLIILPLAFGKRQGREFIWNDLLSLETGSLKLANGRVIEKTLYNRRTRQDEPALFVALTFERREVLDSSNIKPMNLIGVDRGENIPAVIALTDPEGCPLSRFKDSLGNPTHILRIGESYKEKQRTIQAKKEVEQRRAGGYSRKYASKAKNLADDMVRNTARDLLYYAVTQDAMLIFENLSRGFGRQGKRTFMAERQYTRMEDWLTAKLAYEGLPSKTYLSKTLAQYTSKTCSNCGFTITSADYDRVLEKLKKTATGWMTTINGKELKVEGQITYYNRYKRQNVVKDLSVELDRLSEESVNNDISSWTKGRSGEALSLLKKRFSHRPVQEKFVCLNCGFETHADEQAALNIARSWLFLRSQEYKKYQTNKTTGNTDKRAFVETWQSFYRKKLKEVWKPAV

SEQ ID NO: 42820 - protein, 978 aa, synthetic construct
  REGION 1..978: note = engineered CasX variant
QEIKRINKIRRRLVKDSNTKKAGKTGPMKTLLVRVMTPDLRERLENLRKKPENIPQPISNTSRANLNKLLTDYTEMKKAILHVYWEEFQKDPVGLMSRVAQPASKKIDQNKLKPEMDEKGNLTTAGFACSQCGQPLFVYKLEQVSEKGKAYTNYFGRCNVAEHEKLIKLAQLKPEKDSDEAVTYSLGKFGQRALDFYSIHVTKESTHPVKPLAQIAGNRYASVPVGKALSDACMGTIASFLSKYQDIIIEHQKVVKGNQKRLESLRELAGKENLEYPSVTLPPQPHTKEGVDAYNEVIARVRMWVNLNLWQKLKLSRDDAKPLLRLKGFPSFPLVERQANEVDWWDMVCNVKKLINEKKEDGKVFWQNLAGYKRQEALRPYLSSEEDRKKGKKFARYQLGDLLNHLEKKHGEDWGKVYDEAWERIDKKVEGLSKHIKLEEERRSEDAQSKAALTDWLRAKASFVIEGLKEADKDEFCRCELKLQKWYGDLRGKPFAIEAENSILDISGFSKQYNCAFIWQKDGVKKLNLYLIINYFKGGKLRFKKIKPEAFEANRFYTVINKKSGEIVPMEVNFNFDDPNLIILPLAFGKRQGREFIWNDLLSLETGSLKLANGRVIEKTLYNRRTRQDEPALFVALTFERREVLDSSNIKPMNLIGVDRGENIPAVIALTDPEGCPLSRFKDSLGNPTHILRIGESYKEKQRTIQAKKEVEQRRAGGYSRKYASKAKNLADDMVRNTARDLLYYAVTQDAMLIFENLSRGFGRQGKRTFMAERQYTRMEDWLTAKLAYEGLPSKTYLSKTLAQYTSKTCSNCGFTITSADYDRVLEKLKKTATGWMTTINGKELKVEGQITYYNRYKRQNVVKDLSVELDRLSEESVNNDISSWTKGRSGEALSLLKKRFSHRPVQEKFVCLNCGFETHADEQAALNIARSWLFLRSQEYKKYQTNKTTGNTDKRAFVETWQSFYRKKLKEVWKPAV

SEQ ID NO: 42821 - protein, 979 aa, synthetic construct
  REGION 1..979: note = engineered CasX variant
QEIKRINKIRRRLVKDSNTKKAGKTGPMKTLLVRVMTPDLRERLENLRKKPENIPQPISNTSRANLNKLLTDYTEMKKAILHVYWEEFQKDPVGLMSRVAQPASKKIDQNKLKPEMDEKGNLTTAGFACSQCGQPLFVYKLEQVSEKGKAYTNYFGRCNVAEHEKLIKKLAQLKPEKDSDEAVTYSLGKFGQRALDFYSIHVTKESTHPVKPLAQIAGNRYASGPVGKALSDACMGTIASFLSKYQDIIIEHQKVVKGNQKRLESLRELAGKENLEYPSVTLPPQPHTKEGVDAYNEVIARVRMWVNLNLWQKLKLSRDDAKPLLRLKGFPSFPLVERQANEVDWWDMVCNVKKLINEKKEDGKVFWQNLAGYKRQEALRPYLSSEEDRKKGKKFARYQLGDLLNHLEKKHGEDWGKVYDEAWERIDKKVEGLSKHIKLEEERRSEDAQSKAALTDWLRAKASFVIEGLKEADKDEFCRCELKLQKWYGDLRGKPFAIEAENSILDISGFSKQYNCAFIWQKDGVKKLNLYLIINYFKGGKLRFKKIKPEAFEANRFYTVINKKSGEIVPMEVNFNFDDPNLIILPLAFGKRQGREFIWNDLLSLETGSLKLANGRVIEKTLYNRRTRQDEPALFVALTFERREVLDSSNIKPMNLIGVDRGENIPAVIALTDPEGCPLSRFKDSLGNPTHILRIGESYKEKQRTIQAKKEVEQRRAGGYSRKYASKAKNLADDMVRNTARDLLYYAVTQDAMLIFENLSRGFGRQGKRTFMAERQYTRMEDWLTAKLAYEGLPSKTYLSKTLAQYTSKTCSNCGFTITSADYDRVLEKLKKTATGWMTTINGKELKVEGQITYYNRYKRQNVVKDLSVELDRLSEESVNNDISSWTKGRSGEALSLLKKRFSHRPVQEKFVCLNCGFETHADEQAALNIARSWLFLRSQEYKKYQTNKTTGNTDKRAFVETWQSFYRKKLKEVWKPAV

SEQ ID NO: 42822 - protein, 977 aa, synthetic construct
  REGION 1..977: note = engineered CasX variant
QEIKRINKIRRRLVKDSNTKKAGKTGPMKTLLVRVMTPDLRERLENLRKKPENIPQPISNTSRANLNKLLTDYTEMKKAILHVYWEEFQKDPVGLMSRVAQPASKKIDQNKLKPEMDEKGNLTTAGFACSQCGQPLFVYKLEQVSEKGKAYTNYFGRCNVAEHEKLIKLAQLKPEKDSDEAVTYSLGKFGQRALDFYSIHVTKESTHPVKPLAQIAGNRYASPVGKALSDACMGTIASFLSKYQDIIIEHQKVVKGNQKRLESLRELAGKENLEYPSVTLPPQPHTKEGVDAYNEVIARVRMWVNLNLWQKLKLSRDDAKPLLRLKGFPSFPLVERQANEVDWWDMVCNVKKLINEKKEDGKVFWQNLAGYKRQEALRPYLSSEEDRKKGKKFARYQLGDLLNHLEKKHGEDWGKVYDEAWERIDKKVEGLSKHIKLEEERRSEDAQSKAALTDWLRAKASFVIEGLKEADKDEFCRCELKLQKWYGDLRGKPFAIEAENSILDISGFSKQYNCAFIWQKDGVKKLNLYLIINYFKGGKLRFKKIKPEAFEANRFYTVINKKSGEIVPMEVNFNFDDPNLIILPLAFGKRQGREFIWNDLLSLETGSLKLANGRVIEKTLYNRRTRQDEPALFVALTFERREVLDSSNIKPMNLIGVDRGENIPAVIALTDPEGCPLSRFKDSLGNPTHILRIGESYKEKQRTIQAKKEVEQRRAGGYSRKYASKAKNLADDMVRNTARDLLYYAVTQDAMLIFENLSRGFGRQGKRTFMAERQYTRMEDWLTAKLAYEGLPSKTYLSKTLAQYTSKTCSNCGFTITSADYDRVLEKLKKTATGWMTTINGKELKVEGQITYYNRYKRQNVVKDLSVELDRLSEESVNNDISSWTKGRSGEALSLLKKRFSHRPVQEKFVCLNCGFETHADEQAALNIARSWLFLRSQEYKKYQTNKTTGNTDKRAFVETWQSFYRKKLKEVWKPAV

SEQ ID NO: 42823 - protein, 978 aa, synthetic construct
  REGION 1..978: note = engineered CasX variant
QEIKRINKIRRRLVKDSNTKKAGKTGPMKTLLVRVMTPDLRERLENLRKKPENIPQPISNTSRANLNKLLTDYTEMKKAILHVYWEEFQKDPVGLMSRVAQPASKKIDQNKLKPEMDEKGNLTTAGFACSQCGQPLFVYKLEQVSEKGKAYTNYFGRCNVAEHEKLIKLAQLKPEKDSDEAVTYSLGKFGQRALDFYSIHVTKESTHPVKPLAQIAGNRYASYPVGKALSDACMGTIASFLSKYQDIIIEHQKVVKGNQKRLESLRELAGKENLEYPSVTLPPQPHTKEGVDAYNEVIARVRMWVNLNLWQKLKLSRDDAKPLLRLKGFPSFPLVERQANEVDWWDMVCNVKKLINEKKEDGKVFWQNLAGYKRQEALRPYLSSEEDRKKGKKFARYQLGDLLWHLEKKHGEDWGKVYDEAWERIDKKVEGLSKHIKLEEERRSEDAQSKAALTDWLRAKASFVIEGLKEADKDEFCRCELKLQKWYGDLRGKPFAIEAENSILDISGFSKQYNCAFIWQKDGVKKLNLYLIINYFKGGKLRFKKIKPEAFEANRFYTVINKKSGEIVPMEVNFNFDDPNLIILPLAFGKRQGREFIWNDLLSLETGSLKLANGRVIEKTLYNRRTRQDEPALFVALTFERREVLDSSNIKPMNLIGVDRGENIPAVIALTDPEGCPLSRFKDSLGNPTHILRIGESYKEKQRTIQAKKEVEQRRAGGYSRKYASKAKNLADDMVRNTARDLLYYAVTQDAMLIFENLSRGFGRQGKRTFMAERQYTRMEDWLTAKLAYEGLPSKTYLSKTLAQYTSKTCSNCGFTITSADYDRVLEKLKKTATGWMTTINGKELKVEGQITYYNRYKRQNVVKDLSVELDRLSEESVNNDISSWTKGRSGEALSLLKKRFSHRPVQEKFVCLNCGFETHADEQAALNIARSWLFLRSQEYKKYQTNKTTGNTDKRAFVETWQSFYRKKLKEVWKPAV

SEQ ID NO: 42824 - protein, 978 aa, synthetic construct
  REGION 1..978: note = engineered CasX variant
QEIKRINKIRRRLVKDSNTKKAGKTGPMKTLLVRVMTPDLRERLENLRKKPENIPQPISNTSRANLNKLLTDYTEMKKAILHVYWEEFQKDPVGLMSRVAQPASKKIDQNKLKPEMDEKGNLTTAGFACSQCGQPLFVYKLEQVSEKGKAYTNYFGRCNVAEHEKLIKLAQLKPEKDSDEAVTYSLGKFGQRALDFYSIHVTKESTHPVKPLAQIAGNRYASHPVGKALSDACMGTIASFLSKYQDIIIEHQKVVKGNQKRLESLRELAGKENLEYPSVTLPPQPHTKEGVDAYNEVIARVRMWVNLNLWQKLKLSRDDAKPLLRLKGFPSFPLVERQANEVDWWDMVCNVKKLINEKKEDGKVFWQNLAGYKRQEALRPYLSSEEDRKKGKKFARYQLGDLLWHLEKKHGEDWGKVYDEAWERIDKKVEGLSKHIKLEEERRSEDAQSKAALTDWLRAKASFVIEGLKEADKDEFCRCELKLQKWYGDLRGKPFAIEAENSILDISGFSKQYNCAFIWQKDGVKKLNLYLIINYFKGGKLRFKKIKPEAFEANRFYTVINKKSGEIVPMEVNFNFDDPNLIILPLAFGKRQGREFIWNDLLSLETGSLKLANGRVIEKTLYNRRTRQDEPALFVALTFERREVLDSSNIKPMNLIGVDRGENIPAVIALTDPEGCPLSRFKDSLGNPTHILRIGESYKEKQRTIQAKKEVEQRRAGGYSRKYASKAKNLADDMVRNTARDLLYYAVTQDAMLIFENLSRGFGRQGKRTFMAERQYTRMEDWLTAKLAYEGLPSKTYLSKTLAQYTSKTCSNCGFTITSADYDRVLEKLKKTATGWMTTINGKELKVEGQITYYNRYKRQNVVKDLSVELDRLSEESVNNDISSWTKGRSGEALSLLKKRFSHRPVQEKFVCLNCGFETHADEQAALNIARSWLFLRSQEYKKYQTNKTTGNTDKRAFVETWQSFYRKKLKEVWKPAV

SEQ ID NO: 42825 - protein, 978 aa, synthetic construct
  REGION 1..978: note = engineered CasX variant
QEIKRINKIRRRLVKDSNTKKAGKTGPMKTLLVRVMTPDLRERLENLRKKPENIPQPISNTSRANLNKLLTDYTEMKKAILHVYWEEFQKDPVGLMSRVAQPASKKIDQNKLKPEMDEKGNLTTAGFACSQCGQPLFVYKLEQVSEKGKAYTNYFGRCNVAEHEKLIKLAQLKPEKDSDEAVTYSLGKFGQRALDFYSIHVTKESTHPVKPLAQIAGNRYASTPVGKALSDACMGTIASFLSKYQDIIIEHQKVVKGNQKRLESLRELAGKENLEYPSVTLPPQPHTKEGVDAYNEVIARVRMWVNLNLWQKLKLSRDDAKPLLRLKGFPSFPLVERQANEVDWWDMVCNVKKLINEKKEDGKVFWQNLAGYKRQEALRPYLSSEEDRKKGKKFARYQLGDLLWHLEKKHGEDWGKVYDEAWERIDKKVEGLSKHIKLEEERRSEDAQSKAALTDWLRAKASFVIEGLKEADKDEFCRCELKLQKWYGDLRGKPFAIEAENSILDISGFSKQYNCAFIWQKDGVKKLNLYLIINYFKGGKLRFKKIKPEAFEANRFYTVINKKSGEIVPMEVNFNFDDPNLIILPLAFGKRQGREFIWNDLLSLETGSLKLANGRVIEKTLYNRRTRQDEPALFVALTFERREVLDSSNIKPMNLIGVDRGENIPAVIALTDPEGCPLSRFKDSLGNPTHILRIGESYKEKQRTIQAKKEVEQRRAGGYSRKYASKAKNLADDMVRNTARDLLYYAVTQDAMLIFENLSRGFGRQGKRTFMAERQYTRMEDWLTAKLAYEGLPSKTYLSKTLAQYTSKTCSNCGFTITSADYDRVLEKLKKTATGWMTTINGKELKVEGQITYYNRYKRQNVVKDLSVELDRLSEESVNNDISSWTKGRSGEALSLLKKRFSHRPVQEKFVCLNCGFETHADEQAALNIARSWLFLRSQEYKKYQTNKTTGNTDKRAFVETWQSFYRKKLKEVWKPAV

SEQ ID NO: 42826 - protein, 978 aa, synthetic construct
  REGION 1..978: note = engineered CasX variant
QEIKRINKIRRRLVKDSNTKKAGKTGPMKTLLVRVMTPDLRERLENLRKKPENIPQPISNTSRANLNKLLTDYTEMKKAILHVYWEEFQKDPVGLMSRVAQPASKKIDQNKLKPEMDEKGNLTTAGFACSQCGQPLFVYKLEQVSEKGKAYTNYFGRCNVAEHEKLIKLAQLKPEKDSDEAVTYSLGKFGQRALDFYSIHVTKESTHPVKPLAQIAGNRYASAPVGKALSDACMGTIASFLSKYQDIIIEHQKVVKGNQKRLESLRELAGKENLEYPSVTLPPQPHTKEGVDAYNEVIARVRMWVNLNLWQKLKLSRDDAKPLLRLKGFPSFPLVERQANEVDWWDMVCNVKKLINEKKEDGKVFWQNLAGYKRQEALRPYLSSEEDRKKGKKFARYQLGDLLWHLEKKHGEDWGKVYDEAWERIDKKVEGLSKHIKLEEERRSEDAQSKAALTDWLRAKASFVIEGLKEADKDEFCRCELKLQKWYGDLRGKPFAIEAENSILDISGFSKQYNCAFIWQKDGVKKLNLYLIINYFKGGKLRFKKIKPEAFEANRFYTVINKKSGEIVPMEVNFNFDDPNLIILPLAFGKRQGREFIWNDLLSLETGSLKLANGRVIEKTLYNRRTRQDEPALFVALTFERREVLDSSNIKPMNLIGVDRGENIPAVIALTDPEGCPLSRFKDSLGNPTHILRIGESYKEKQRTIQAKKEVEQRRAGGYSRKYASKAKNLADDMVRNTARDLLYYAVTQDAMLIFENLSRGFGRQGKRTFMAERQYTRMEDWLTAKLAYEGLPSKTYLSKTLAQYTSKTCSNCGFTITSADYDRVLEKLKKTATGWMTTINGKELKVEGQITYYNRYKRQNVVKDLSVELDRLSEESVNNDISSWTKGRSGEALSLLKKRFSHRPVQEKFVCLNCGFETHADEQAALNIARSWLFLRSQEYKKYQTNKTTGNTDKRAFVETWQSFYRKKLKEVWKPAV

SEQ ID NO: 42827 - protein, 978 aa, synthetic construct
  REGION 1..978: note = engineered CasX variant
QEIKRINKIRRRLVKDSNTKKAGKTGPMKTLLVRVMTPDLRERLENLRKKPENIPQPISNTSRANLNKLLTDYTEMKKAILHVYWEEFQKDPVGLMSRVAQPASKKIDQNKLKPEMDEKGNLTTAGFACSQCGQPLFVYKLEQVSEKGKAYTNYFGRCNVAEHEKLIKLAQLKPEKDSDEAVTYSLGKFGQRALDFYSIHVTKESTHPVKPLAQIAGNRYASVPVGKALSDACMGTIASFLSKYQDIIIEHQKVVKGNQKRLESLRELAGKENLEYPSVTLPPQPHTKEGVDAYNEVIARVRMWVNLNLWQKLKLSRDDAKPLLRLKGFPSFPLVERQANEVDWWDMVCNVKKLINEKKEDGKVFWQNLAGYKRQEALRPYLSSEEDRKKGKKFARYQLGDLLWHLEKKHGEDWGKVYDEAWERIDKKVEGLSKHIKLEEERRSEDAQSKAALTDWLRAKASFVIEGLKEADKDEFCRCELKLQKWYGDLRGKPFAIEAENSILDISGFSKQYNCAFIWQKDGVKKLNLYLIINYFKGGKLRFKKIKPEAFEANRFYTVINKKSGEIVPMEVNFNFDDPNLIILPLAFGKRQGREFIWNDLLSLETGSLKLANGRVIEKTLYNRRTRQDEPALFVALTFERREVLDSSNIKPMNLIGVDRGENIPAVIALTDPEGCPLSRFKDSLGNPTHILRIGESYKEKQRTIQAKKEVEQRRAGGYSRKYASKAKNLADDMVRNTARDLLYYAVTQDAMLIFENLSRGFGRQGKRTFMAERQYTRMEDWLTAKLAYEGLPSKTYLSKTLAQYTSKTCSNCGFTITSADYDRVLEKLKKTATGWMTTINGKELKVEGQITYYNRYKRQNVVKDLSVELDRLSEESVNNDISSWTKGRSGEALSLLKKRFSHRPVQEKFVCLNCGFETHADEQAALNIARSWLFLRSQEYKKYQTNKTTGNTDKRAFVETWQSFYRKKLKEVWKPAV

SEQ ID NO: 42828 - protein, 979 aa, synthetic construct
  REGION 1..979: note = engineered CasX variant
QEIKRINKIRRRLVKDSNTKKAGKTGPMKTLLVRVMTPDLRERLENLRKKPENIPQPISNTSRANLNKLLTDYTEMKKAILHVYWEEFQKDPVGLMSRVAQPASKKIDQNKLKPEMDEKGNLTTAGFACSQCGQPLFVYKLEQVSEKGKAYTNYFGRCNVAEHEKLIKKLAQLKPEKDSDEAVTYSLGKFGQRALDFYSIHVTKESTHPVKPLAQIAGNRYASGPVGKALSDACMGTIASFLSKYQDIIIEHQKVVKGNQKRLESLRELAGKENLEYPSVTLPPQPHTKEGVDAYNEVIARVRMWVNLNLWQKLKLSRDDAKPLLRLKGFPSFPLVERQANEVDWWDMVCNVKKLINEKKEDGKVFWQNLAGYKRQEALRPYLSSEEDRKKGKKFARYQLGDLLWHLEKKHGEDWGKVYDEAWERIDKKVEGLSKHIKLEEERRSEDAQSKAALTDWLRAKASFVIEGLKEADKDEFCRCELKLQKWYGDLRGKPFAIEAENSILDISGFSKQYNCAFIWQKDGVKKLNLYLIINYFKGGKLRFKKIKPEAFEANRFYTVINKKSGEIVPMEVNFNFDDPNLIILPLAFGKRQGREFIWNDLLSLETGSLKLANGRVIEKTLYNRRTRQDEPALFVALTFERREVLDSSNIKPMNLIGVDRGENIPAVIALTDPEGCPLSRFKDSLGNPTHILRIGESYKEKQRTIQAKKEVEQRRAGGYSRKYASKAKNLADDMVRNTARDLLYYAVTQDAMLIFENLSRGFGRQGKRTFMAERQYTRMEDWLTAKLAYEGLPSKTYLSKTLAQYTSKTCSNCGFTITSADYDRVLEKLKKTATGWMTTINGKELKVEGQITYYNRYKRQNVVKDLSVELDRLSEESVNNDISSWTKGRSGEALSLLKKRFSHRPVQEKFVCLNCGFETHADEQAALNIARSWLFLRSQEYKKYQTNKTTGNTDKRAFVETWQSFYRKKLKEVWKPAV

SEQ ID NO: 42829 - protein, 977 aa, synthetic construct
  REGION 1..977: note = engineered CasX variant
QEIKRINKIRRRLVKDSNTKKAGKTGPMKTLLVRVMTPDLRERLENLRKKPENIPQPISNTSRANLNKLLTDYTEMKKAILHVYWEEFQKDPVGLMSRVAQPASKKIDQNKLKPEMDEKGNLTTAGFACSQCGQPLFVYKLEQVSEKGKAYTNYFGRCNVAEHEKLIKLAQLKPEKDSDEAVTYSLGKFGQRALDFYSIHVTKESTHPVKPLAQIAGNRYASPVGKALSDACMGTIASFLSKYQDIIIEHQKVVKGNQKRLESLRELAGKENLEYPSVTLPPQPHTKEGVDAYNEVIARVRMWVNLNLWQKLKLSRDDAKPLLRLKGFPSFPLVERQANEVDWWDMVCNVKKLINEKKEDGKVFWQNLAGYKRQEALRPYLSSEEDRKKGKKFARYQLGDLLWHLEKKHGEDWGKVYDEAWERIDKKVEGLSKHIKLEEERRSEDAQSKAALTDWLRAKASFVIEGLKEADKDEFCRCELKLQKWYGDLRGKPFAIEAENSILDISGFSKQYNCAFIWQKDGVKKLNLYLIINYFKGGKLRFKKIKPEAFEANRFYTVINKKSGEIVPMEVNFNFDDPNLIILPLAFGKRQGREFIWNDLLSLETGSLKLANGRVIEKTLYNRRTRQDEPALFVALTFERREVLDSSNIKPMNLIGVDRGENIPAVIALTDPEGCPLSRFKDSLGNPTHILRIGESYKEKQRTIQAKKEVEQRRAGGYSRKYASKAKNLADDMVRNTARDLLYYAVTQDAMLIFENLSRGFGRQGKRTFMAERQYTRMEDWLTAKLAYEGLPSKTYLSKTLAQYTSKTCSNCGFTITSADYDRVLEKLKKTATGWMTTINGKELKVEGQITYYNRYKRQNVVKDLSVELDRLSEESVNNDISSWTKGRSGEALSLLKKRFSHRPVQEKFVCLNCGFETHADEQAALNIARSWLFLRSQEYKKYQTNKTTGNTDKRAFVETWQSFYRKKLKEVWKPAV

SEQ ID NO: 42830 - protein, 978 aa, synthetic construct
  REGION 1..978: note = engineered CasX variant
QEIKRINKIRRRLVKDSNTKKAGKTGPMKTLLVRVMTPDLRERLENLRKKPENIPQPISNTSRANLNKLLTDYTEMKKAILHVYWEEFQKDPVGLMSRVAQPASKKIDQNKLKPEMDEKGNLTTAGFACSQCGQPLFVYKLEQVSEKGKAYTNYFGRCNVAEHEKLIKLAQLKPEKDSDEAVTYSLGKFGQRALDFYSIHVTKESTHPVKPLAQIAGNRYASYPVGKALSDACMGTIASFLSKYQDIIIEHQKVVKGNQKRLESLRELAGKENLEYPSVTLPPQPHTKEGVDAYNEVIARVRMWVNLNLWQKLKLSRDDAKPLLRLKGFPSFPLVERQANEVDWWDMVCNVKKLINEKKEDGKVFWQNLAGYKRQEALRPYLSSEEDRKKGKKFARYQLGDLLLHLYKKHGEDWGKVYDEAWERIDKKVEGLSKHIKLEEERRSEDAQSKAALTDWLRAKASFVIEGLKEADKDEFCRCELKLQKWYGDLRGKPFAIEAENSILDISGFSKQYNCAFIWQKDGVKKLNLYLIINYFKGGKLRFKKIKPEAFEANRFYTVINKKSGEIVPMEVNFNFDDPNLIILPLAFGKRQGREFIWNDLLSLETGSLKLANGRVIEKTLYNRRTRQDEPALFVALTFERREVLDSSNIKPMNLIGVDRGENIPAVIALTDPEGCPLSRFKDSLGNPTHILRIGESYKEKQRTIQAKKEVEQRRAGGYSRKYASKAKNLADDMVRNTARDLLYYAVTQDAMLIFENLSRGFGRQGKRTFMAERQYTRMEDWLTAKLAYEGLPSKTYLSKTLAQYTSKTCSNCGFTITSADYDRVLEKLKKTATGWMTTINGKELKVEGQITYYNRYKRQNVVKDLSVELDRLSEESVNNDISSWTKGRSGEALSLLKKRFSHRPVQEKFVCLNCGFETHADEQAALNIARSWLFLRSQEYKKYQTNKTTGNTDKRAFVETWQSFYRKKLKEVWKPAV

SEQ ID NO: 42831 - protein, 978 aa, synthetic construct
  REGION 1..978: note = engineered CasX variant
QEIKRINKIRRRLVKDSNTKKAGKTGPMKTLLVRVMTPDLRERLENLRKKPENIPQPISNTSRANLNKLLTDYTEMKKAILHVYWEEFQKDPVGLMSRVAQPASKKIDQNKLKPEMDEKGNLTTAGFACSQCGQPLFVYKLEQVSEKGKAYTNYFGRCNVAEHEKLIKLAQLKPEKDSDEAVTYSLGKFGQRALDFYSIHVTKESTHPVKPLAQIAGNRYASHPVGKALSDACMGTIASFLSKYQDIIIEHQKVVKGNQKRLESLRELAGKENLEYPSVTLPPQPHTKEGVDAYNEVIARVRMWVNLNLWQKLKLSRDDAKPLLRLKGFPSFPLVERQANEVDWWDMVCNVKKLINEKKEDGKVFWQNLAGYKRQEALRPYLSSEEDRKKGKKFARYQLGDLLLHLYKKHGEDWGKVYDEAWERIDKKVEGLSKHIKLEEERRSEDAQSKAALTDWLRAKASFVIEGLKEADKDEFCRCELKLQKWYGDLRGKPFAIEAENSILDISGFSKQYNCAFIWQKDGVKKLNLYLIINYFKGGKLRFKKIKPEAFEANRFYTVINKKSGEIVPMEVNFNFDDPNLIILPLAFGKRQGREFIWNDLLSLETGSLKLANGRVIEKTLYNRRTRQDEPALFVALTFERREVLDSSNIKPMNLIGVDRGENIPAVIALTDPEGCPLSRFKDSLGNPTHILRIGESYKEKQRTIQAKKEVEQRRAGGYSRKYASKAKNLADDMVRNTARDLLYYAVTQDAMLIFENLSRGFGRQGKRTFMAERQYTRMEDWLTAKLAYEGLPSKTYLSKTLAQYTSKTCSNCGFTITSADYDRVLEKLKKTATGWMTTINGKELKVEGQITYYNRYKRQNVVKDLSVELDRLSEESVNNDISSWTKGRSGEALSLLKKRFSHRPVQEKFVCLNCGFETHADEQAALNIARSWLFLRSQEYKKYQTNKTTGNTDKRAFVETWQSFYRKKLKEVWKPAV

SEQ ID NO: 42832 - protein, 978 aa, synthetic construct
  REGION 1..978: note = engineered CasX variant
QEIKRINKIRRRLVKDSNTKKAGKTGPMKTLLVRVMTPDLRERLENLRKKPENIPQPISNTSRANLNKLLTDYTEMKKAILHVYWEEFQKDPVGLMSRVAQPASKKIDQNKLKPEMDEKGNLTTAGFACSQCGQPLFVYKLEQVSEKGKAYTNYFGRCNVAEHEKLIKLAQLKPEKDSDEAVTYSLGKFGQRALDFYSIHVTKESTHPVKPLAQIAGNRYASTPVGKALSDACMGTIASFLSKYQDIIIEHQKVVKGNQKRLESLRELAGKENLEYPSVTLPPQPHTKEGVDAYNEVIARVRMWVNLNLWQKLKLSRDDAKPLLRLKGFPSFPLVERQANEVDWWDMVCNVKKLINEKKEDGKVFWQNLAGYKRQEALRPYLSSEEDRKKGKKFARYQLGDLLLHLYKKHGEDWGKVYDEAWERIDKKVEGLSKHIKLEEERRSEDAQSKAALTDWLRAKASFVIEGLKEADKDEFCRCELKLQKWYGDLRGKPFAIEAENSILDISGFSKQYNCAFIWQKDGVKKLNLYLIINYFKGGKLRFKKIKPEAFEANRFYTVINKKSGEIVPMEVNFNFDDPNLIILPLAFGKRQGREFIWNDLLSLETGSLKLANGRVIEKTLYNRRTRQDEPALFVALTFERREVLDSSNIKPMNLIGVDRGENIPAVIALTDPEGCPLSRFKDSLGNPTHILRIGESYKEKQRTIQAKKEVEQRRAGGYSRKYASKAKNLADDMVRNTARDLLYYAVTQDAMLIFENLSRGFGRQGKRTFMAERQYTRMEDWLTAKLAYEGLPSKTYLSKTLAQYTSKTCSNCGFTITSADYDRVLEKLKKTATGWMTTINGKELKVEGQITYYNRYKRQNVVKDLSVELDRLSEESVNNDISSWTKGRSGEALSLLKKRFSHRPVQEKFVCLNCGFETHADEQAALNIARSWLFLRSQEYKKYQTNKTTGNTDKRAFVETWQSFYRKKLKEVWKPAV

SEQ ID NO: 42833 - protein, 978 aa, synthetic construct
  REGION 1..978: note = engineered CasX variant
QEIKRINKIRRRLVKDSNTKKAGKTGPMKTLLVRVMTPDLRERLENLRKKPENIPQPISNTSRANLNKLLTDYTEMKKAILHVYWEEFQKDPVGLMSRVAQPASKKIDQNKLKPEMDEKGNLTTAGFACSQCGQPLFVYKLEQVSEKGKAYTNYFGRCNVAEHEKLIKLAQLKPEKDSDEAVTYSLGKFGQRALDFYSIHVTKESTHPVKPLAQIAGNRYASAPVGKALSDACMGTIASFLSKYQDIIIEHQKVVKGNQKRLESLRELAGKENLEYPSVTLPPQPHTKEGVDAYNEVIARVRMWVNLNLWQKLKLSRDDAKPLLRLKGFPSFPLVERQANEVDWWDMVCNVKKLINEKKEDGKVFWQNLAGYKRQEALRPYLSSEEDRKKGKKFARYQLGDLLLHLYKKHGEDWGKVYDEAWERIDKKVEGLSKHIKLEEERRSEDAQSKAALTDWLRAKASFVIEGLKEADKDEFCRCELKLQKWYGDLRGKPFAIEAENSILDISGFSKQYNCAFIWQKDGVKKLNLYLIINYFKGGKLRFKKIKPEAFEANRFYTVINKKSGEIVPMEVNFNFDDPNLIILPLAFGKRQGREFIWNDLLSLETGSLKLANGRVIEKTLYNRRTRQDEPALFVALTFERREVLDSSNIKPMNLIGVDRGENIPAVIALTDPEGCPLSRFKDSLGNPTHILRIGESYKEKQRTIQAKKEVEQRRAGGYSRKYASKAKNLADDMVRNTARDLLYYAVTQDAMLIFENLSRGFGRQGKRTFMAERQYTRMEDWLTAKLAYEGLPSKTYLSKTLAQYTSKTCSNCGFTITSADYDRVLEKLKKTATGWMTTINGKELKVEGQITYYNRYKRQNVVKDLSVELDRLSEESVNNDISSWTKGRSGEALSLLKKRFSHRPVQEKFVCLNCGFETHADEQAALNIARSWLFLRSQEYKKYQTNKTTGNTDKRAFVETWQSFYRKKLKEVWKPAV

SEQ ID NO: 42834 - protein, 978 aa, synthetic construct
  REGION 1..978: note = engineered CasX variant
QEIKRINKIRRRLVKDSNTKKAGKTGPMKTLLVRVMTPDLRERLENLRKKPENIPQPISNTSRANLNKLLTDYTEMKKAILHVYWEEFQKDPVGLMSRVAQPASKKIDQNKLKPEMDEKGNLTTAGFACSQCGQPLFVYKLEQVSEKGKAYTNYFGRCNVAEHEKLIKLAQLKPEKDSDEAVTYSLGKFGQRALDFYSIHVTKESTHPVKPLAQIAGNRYASVPVGKALSDACMGTIASFLSKYQDIIIEHQKVVKGNQKRLESLRELAGKENLEYPSVTLPPQPHTKEGVDAYNEVIARVRMWVNLNLWQKLKLSRDDAKPLLRLKGFPSFPLVERQANEVDWWDMVCNVKKLINEKKEDGKVFWQNLAGYKRQEALRPYLSSEEDRKKGKKFARYQLGDLLLHLYKKHGEDWGKVYDEAWERIDKKVEGLSKHIKLEEERRSEDAQSKAALTDWLRAKASFVIEGLKEADKDEFCRCELKLQKWYGDLRGKPFAIEAENSILDISGFSKQYNCAFIWQKDGVKKLNLYLIINYFKGGKLRFKKIKPEAFEANRFYTVINKKSGEIVPMEVNFNFDDPNLIILPLAFGKRQGREFIWNDLLSLETGSLKLANGRVIEKTLYNRRTRQDEPALFVALTFERREVLDSSNIKPMNLIGVDRGENIPAVIALTDPEGCPLSRFKDSLGNPTHILRIGESYKEKQRTIQAKKEVEQRRAGGYSRKYASKAKNLADDMVRNTARDLLYYAVTQDAMLIFENLSRGFGRQGKRTFMAERQYTRMEDWLTAKLAYEGLPSKTYLSKTLAQYTSKTCSNCGFTITSADYDRVLEKLKKTATGWMTTINGKELKVEGQITYYNRYKRQNVVKDLSVELDRLSEESVNNDISSWTKGRSGEALSLLKKRFSHRPVQEKFVCLNCGFETHADEQAALNIARSWLFLRSQEYKKYQTNKTTGNTDKRAFVETWQSFYRKKLKEVWKPAV

SEQ ID NO: 42835 - protein, 979 aa, synthetic construct
  REGION 1..979: note = engineered CasX variant
QEIKRINKIRRRLVKDSNTKKAGKTGPMKTLLVRVMTPDLRERLENLRKKPENIPQPISNTSRANLNKLLTDYTEMKKAILHVYWEEFQKDPVGLMSRVAQPASKKIDQNKLKPEMDEKGNLTTAGFACSQCGQPLFVYKLEQVSEKGKAYTNYFGRCNVAEHEKLIKKLAQLKPEKDSDEAVTYSLGKFGQRALDFYSIHVTKESTHPVKPLAQIAGNRYASGPVGKALSDACMGTIASFLSKYQDIIIEHQKVVKGNQKRLESLRELAGKENLEYPSVTLPPQPHTKEGVDAYNEVIARVRMWVNLNLWQKLKLSRDDAKPLLRLKGFPSFPLVERQANEVDWWDMVCNVKKLINEKKEDGKVFWQNLAGYKRQEALRPYLSSEEDRKKGKKFARYQLGDLLLHLYKKHGEDWGKVYDEAWERIDKKVEGLSKHIKLEEERRSEDAQSKAALTDWLRAKASFVIEGLKEADKDEFCRCELKLQKWYGDLRGKPFAIEAENSILDISGFSKQYNCAFIWQKDGVKKLNLYLIINYFKGGKLRFKKIKPEAFEANRFYTVINKKSGEIVPMEVNFNFDDPNLIILPLAFGKRQGREFIWNDLLSLETGSLKLANGRVIEKTLYNRRTRQDEPALFVALTFERREVLDSSNIKPMNLIGVDRGENIPAVIALTDPEGCPLSRFKDSLGNPTHILRIGESYKEKQRTIQAKKEVEQRRAGGYSRKYASKAKNLADDMVRNTARDLLYYAVTQDAMLIFENLSRGFGRQGKRTFMAERQYTRMEDWLTAKLAYEGLPSKTYLSKTLAQYTSKTCSNCGFTITSADYDRVLEKLKKTATGWMTTINGKELKVEGQITYYNRYKRQNVVKDLSVELDRLSEESVNNDISSWTKGRSGEALSLLKKRFSHRPVQEKFVCLNCGFETHADEQAALNIARSWLFLRSQEYKKYQTNKTTGNTDKRAFVETWQSFYRKKLKEVWKPAV

SEQ ID NO: 42836 - protein, 977 aa, synthetic construct
  REGION 1..977: note = engineered CasX variant
QEIKRINKIRRRLVKDSNTKKAGKTGPMKTLLVRVMTPDLRERLENLRKKPENIPQPISNTSRANLNKLLTDYTEMKKAILHVYWEEFQKDPVGLMSRVAQPASKKIDQNKLKPEMDEKGNLTTAGFACSQCGQPLFVYKLEQVSEKGKAYTNYFGRCNVAEHEKLIKLAQLKPEKDSDEAVTYSLGKFGQRALDFYSIHVTKESTHPVKPLAQIAGNRYASPVGKALSDACMGTIASFLSKYQDIIIEHQKVVKGNQKRLESLRELAGKENLEYPSVTLPPQPHTKEGVDAYNEVIARVRMWVNLNLWQKLKLSRDDAKPLLRLKGFPSFPLVERQANEVDWWDMVCNVKKLINEKKEDGKVFWQNLAGYKRQEALRPYLSSEEDRKKGKKFARYQLGDLLLHLYKKHGEDWGKVYDEAWERIDKKVEGLSKHIKLEEERRSEDAQSKAALTDWLRAKASFVIEGLKEADKDEFCRCELKLQKWYGDLRGKPFAIEAENSILDISGFSKQYNCAFIWQKDGVKKLNLYLIINYFKGGKLRFKKIKPEAFEANRFYTVINKKSGEIVPMEVNFNFDDPNLIILPLAFGKRQGREFIWNDLLSLETGSLKLANGRVIEKTLYNRRTRQDEPALFVALTFERREVLDSSNIKPMNLIGVDRGENIPAVIALTDPEGCPLSRFKDSLGNPTHILRIGESYKEKQRTIQAKKEVEQRRAGGYSRKYASKAKNLADDMVRNTARDLLYYAVTQDAMLIFENLSRGFGRQGKRTFMAERQYTRMEDWLTAKLAYEGLPSKTYLSKTLAQYTSKTCSNCGFTITSADYDRVLEKLKKTATGWMTTINGKELKVEGQITYYNRYKRQNVVKDLSVELDRLSEESVNNDISSWTKGRSGEALSLLKKRFSHRPVQEKFVCLNCGFETHADEQAALNIARSWLFLRSQEYKKYQTNKTTGNTDKRAFVETWQSFYRKKLKEVWKPAV

SEQ ID NO: 42837 - protein, 978 aa, synthetic construct
  REGION 1..978: note = engineered CasX variant
QEIKRINKIRRRLVKDSNTKKAGKTGPMKTLLVRVMTPDLRERLENLRKKPENIPQPISNTSRANLNKLLTDYTEMKKAILHVYWEEFQKDPVGLMSRVAQPASKKIDQNKLKPEMDEKGNLTTAGFACSQCGQPLFVYKLEQVSEKGKAYTNYFGRCNVAEHEKLIKLAQLKPEKDSDEAVTYSLGKFGQRALDFYSIHVTKESTHPVKPLAQIAGNRYASYPVGKALSDACMGTIASFLSKYQDIIIEHQKVVKGNQKRLESLRELAGKENLEYPSVTLPPQPHTKEGVDAYNEVIARVRMWVNLNLWQKLKLSRDDAKPLLRLKGFPSFPLVERQANEVDWWDMVCNVKKLINEKKEDGKVFWQNLAGYKRQEALRPYLSSEEDRKKGKKFARYQLGDLLLHLEKKHPEDWGKVYDEAWERIDKKVEGLSKHIKLEEERRSEDAQSKAALTDWLRAKASFVIEGLKEADKDEFCRCELKLQKWYGDLRGKPFAIEAENSILDISGFSKQYNCAFIWQKDGVKKLNLYLIINYFKGGKLRFKKIKPEAFEANRFYTVINKKSGEIVPMEVNFNFDDPNLIILPLAFGKRQGREFIWNDLLSLETGSLKLANGRVIEKTLYNRRTRQDEPALFVALTFERREVLDSSNIKPMNLIGVDRGENIPAVIALTDPEGCPLSRFKDSLGNPTHILRIGESYKEKQRTIQAKKEVEQRRAGGYSRKYASKAKNLADDMVRNTARDLLYYAVTQDAMLIFENLSRGFGRQGKRTFMAERQYTRMEDWLTAKLAYEGLPSKTYLSKTLAQYTSKTCSNCGFTITSADYDRVLEKLKKTATGWMTTINGKELKVEGQITYYNRYKRQNVVKDLSVELDRLSEESVNNDISSWTKGRSGEALSLLKKRFSHRPVQEKFVCLNCGFETHADEQAALNIARSWLFLRSQEYKKYQTNKTTGNTDKRAFVETWQSFYRKKLKEVWKPAV

SEQ ID NO: 42838 - protein, 978 aa, synthetic construct
  REGION 1..978: note = engineered CasX variant
QEIKRINKIRRRLVKDSNTKKAGKTGPMKTLLVRVMTPDLRERLENLRKKPENIPQPISNTSRANLNKLLTDYTEMKKAILHVYWEEFQKDPVGLMSRVAQPASKKIDQNKLKPEMDEKGNLTTAGFACSQCGQPLFVYKLEQVSEKGKAYTNYFGRCNVAEHEKLIKLAQLKPEKDSDEAVTYSLGKFGQRALDFYSIHVTKESTHPVKPLAQIAGNRYASHPVGKALSDACMGTIASFLSKYQDIIIEHQKVVKGNQKRLESLRELAGKENLEYPSVTLPPQPHTKEGVDAYNEVIARVRMWVNLNLWQKLKLSRDDAKPLLRLKGFPSFPLVERQANEVDWWDMVCNVKKLINEKKEDGKVFWQNLAGYKRQEALRPYLSSEEDRKKGKKFARYQLGDLLLHLEKKHPEDWGKVYDEAWERIDKKVEGLSKHIKLEEERRSEDAQSKAALTDWLRAKASFVIEGLKEADKDEFCRCELKLQKWYGDLRGKPFAIEAENSILDISGFSKQYNCAFIWQKDGVKKLNLYLIINYFKGGKLRFKKIKPEAFEANRFYTVINKKSGEIVPMEVNFNFDDPNLIILPLAFGKRQGREFIWNDLLSLETGSLKLANGRVIEKTLYNRRTRQDEPALFVALTFERREVLDSSNIKPMNLIGVDRGENIPAVIALTDPEGCPLSRFKDSLGNPTHILRIGESYKEKQRTIQAKKEVEQRRAGGYSRKYASKAKNLADDMVRNTARDLLYYAVTQDAMLIFENLSRGFGRQGKRTFMAERQYTRMEDWLTAKLAYEGLPSKTYLSKTLAQYTSKTCSNCGFTITSADYDRVLEKLKKTATGWMTTINGKELKVEGQITYYNRYKRQNVVKDLSVELDRLSEESVNNDISSWTKGRSGEALSLLKKRFSHRPVQEKFVCLNCGFETHADEQAALNIARSWLFLRSQEYKKYQTNKTTGNTDKRAFVETWQSFYRKKLKEVWKPAV

SEQ ID NO: 42839 - protein, 978 aa, synthetic construct
  REGION 1..978: note = engineered CasX variant
QEIKRINKIRRRLVKDSNTKKAGKTGPMKTLLVRVMTPDLRERLENLRKKPENIPQPISNTSRANLNKLLTDYTEMKKAILHVYWEEFQKDPVGLMSRVAQPASKKIDQNKLKPEMDEKGNLTTAGFACSQCGQPLFVYKLEQVSEKGKAYTNYFGRCNVAEHEKLIKLAQLKPEKDSDEAVTYSLGKFGQRALDFYSIHVTKESTHPVKPLAQIAGNRYASTPVGKALSDACMGTIASFLSKYQDIIIEHQKVVKGNQKRLESLRELAGKENLEYPSVTLPPQPHTKEGVDAYNEVIARVRMWVNLNLWQKLKLSRDDAKPLLRLKGFPSFPLVERQANEVDWWDMVCNVKKLINEKKEDGKVFWQNLAGYKRQEALRPYLSSEEDRKKGKKFARYQLGDLLLHLEKKHPEDWGKVYDEAWERIDKKVEGLSKHIKLEEERRSEDAQSKAALTDWLRAKASFVIEGLKEADKDEFCRCELKLQKWYGDLRGKPFAIEAENSILDISGFSKQYNCAFIWQKDGVKKLNLYLIINYFKGGKLRFKKIKPEAFEANRFYTVINKKSGEIVPMEVNFNFDDPNLIILPLAFGKRQGREFIWNDLLSLETGSLKLANGRVIEKTLYNRRTRQDEPALFVALTFERREVLDSSNIKPMNLIGVDRGENIPAVIALTDPEGCPLSRFKDSLGNPTHILRIGESYKEKQRTIQAKKEVEQRRAGGYSRKYASKAKNLADDMVRNTARDLLYYAVTQDAMLIFENLSRGFGRQGKRTFMAERQYTRMEDWLTAKLAYEGLPSKTYLSKTLAQYTSKTCSNCGFTITSADYDRVLEKLKKTATGWMTTINGKELKVEGQITYYNRYKRQNVVKDLSVELDRLSEESVNNDISSWTKGRSGEALSLLKKRFSHRPVQEKFVCLNCGFETHADEQAALNIARSWLFLRSQEYKKYQTNKTTGNTDKRAFVETWQSFYRKKLKEVWKPAV

SEQ ID NO: 42840 - protein, 978 aa, synthetic construct
  REGION 1..978: note = engineered CasX variant
QEIKRINKIRRRLVKDSNTKKAGKTGPMKTLLVRVMTPDLRERLENLRKKPENIPQPISNTSRANLNKLLTDYTEMKKAILHVYWEEFQKDPVGLMSRVAQPASKKIDQNKLKPEMDEKGNLTTAGFACSQCGQPLFVYKLEQVSEKGKAYTNYFGRCNVAEHEKLIKLAQLKPEKDSDEAVTYSLGKFGQRALDFYSIHVTKESTHPVKPLAQIAGNRYASAPVGKALSDACMGTIASFLSKYQDIIIEHQKVVKGNQKRLESLRELAGKENLEYPSVTLPPQPHTKEGVDAYNEVIARVRMWVNLNLWQKLKLSRDDAKPLLRLKGFPSFPLVERQANEVDWWDMVCNVKKLINEKKEDGKVFWQNLAGYKRQEALRPYLSSEEDRKKGKKFARYQLGDLLLHLEKKHPEDWGKVYDEAWERIDKKVEGLSKHIKLEEERRSEDAQSKAALTDWLRAKASFVIEGLKEADKDEFCRCELKLQKWYGDLRGKPFAIEAENSILDISGFSKQYNCAFIWQKDGVKKLNLYLIINYFKGGKLRFKKIKPEAFEANRFYTVINKKSGEIVPMEVNFNFDDPNLIILPLAFGKRQGREFIWNDLLSLETGSLKLANGRVIEKTLYNRRTRQDEPALFVALTFERREVLDSSNIKPMNLIGVDRGENIPAVIALTDPEGCPLSRFKDSLGNPTHILRIGESYKEKQRTIQAKKEVEQRRAGGYSRKYASKAKNLADDMVRNTARDLLYYAVTQDAMLIFENLSRGFGRQGKRTFMAERQYTRMEDWLTAKLAYEGLPSKTYLSKTLAQYTSKTCSNCGFTITSADYDRVLEKLKKTATGWMTTINGKELKVEGQITYYNRYKRQNVVKDLSVELDRLSEESVNNDISSWTKGRSGEALSLLKKRFSHRPVQEKFVCLNCGFETHADEQAALNIARSWLFLRSQEYKKYQTNKTTGNTDKRAFVETWQSFYRKKLKEVWKPAV

SEQ ID NO: 42841 - protein, 978 aa, synthetic construct
  REGION 1..978: note = engineered CasX variant
QEIKRINKIRRRLVKDSNTKKAGKTGPMKTLLVRVMTPDLRERLENLRKKPENIPQPISNTSRANLNKLLTDYTEMKKAILHVYWEEFQKDPVGLMSRVAQPASKKIDQNKLKPEMDEKGNLTTAGFACSQCGQPLFVYKLEQVSEKGKAYTNYFGRCNVAEHEKLIKLAQLKPEKDSDEAVTYSLGKFGQRALDFYSIHVTKESTHPVKPLAQIAGNRYASVPVGKALSDACMGTIASFLSKYQDIIIEHQKVVKGNQKRLESLRELAGKENLEYPSVTLPPQPHTKEGVDAYNEVIARVRMWVNLNLWQKLKLSRDDAKPLLRLKGFPSFPLVERQANEVDWWDMVCNVKKLINEKKEDGKVFWQNLAGYKRQEALRPYLSSEEDRKKGKKFARYQLGDLLLHLEKKHPEDWGKVYDEAWERIDKKVEGLSKHIKLEEERRSEDAQSKAALTDWLRAKASFVIEGLKEADKDEFCRCELKLQKWYGDLRGKPFAIEAENSILDISGFSKQYNCAFIWQKDGVKKLNLYLIINYFKGGKLRFKKIKPEAFEANRFYTVINKKSGEIVPMEVNFNFDDPNLIILPLAFGKRQGREFIWNDLLSLETGSLKLANGRVIEKTLYNRRTRQDEPALFVALTFERREVLDSSNIKPMNLIGVDRGENIPAVIALTDPEGCPLSRFKDSLGNPTHILRIGESYKEKQRTIQAKKEVEQRRAGGYSRKYASKAKNLADDMVRNTARDLLYYAVTQDAMLIFENLSRGFGRQGKRTFMAERQYTRMEDWLTAKLAYEGLPSKTYLSKTLAQYTSKTCSNCGFTITSADYDRVLEKLKKTATGWMTTINGKELKVEGQITYYNRYKRQNVVKDLSVELDRLSEESVNNDISSWTKGRSGEALSLLKKRFSHRPVQEKFVCLNCGFETHADEQAALNIARSWLFLRSQEYKKYQTNKTTGNTDKRAFVETWQSFYRKKLKEVWKPAV

SEQ ID NO: 42842 - protein, 979 aa, synthetic construct
  REGION 1..979: note = engineered CasX variant
QEIKRINKIRRRLVKDSNTKKAGKTGPMKTLLVRVMTPDLRERLENLRKKPENIPQPISNTSRANLNKLLTDYTEMKKAILHVYWEEFQKDPVGLMSRVAQPASKKIDQNKLKPEMDEKGNLTTAGFACSQCGQPLFVYKLEQVSEKGKAYTNYFGRCNVAEHEKLIKKLAQLKPEKDSDEAVTYSLGKFGQRALDFYSIHVTKESTHPVKPLAQIAGNRYASGPVGKALSDACMGTIASFLSKYQDIIIEHQKVVKGNQKRLESLRELAGKENLEYPSVTLPPQPHTKEGVDAYNEVIARVRMWVNLNLWQKLKLSRDDAKPLLRLKGFPSFPLVERQANEVDWWDMVCNVKKLINEKKEDGKVFWQNLAGYKRQEALRPYLSSEEDRKKGKKFARYQLGDLLLHLEKKHPEDWGKVYDEAWERIDKKVEGLSKHIKLEEERRSEDAQSKAALTDWLRAKASFVIEGLKEADKDEFCRCELKLQKWYGDLRGKPFAIEAENSILDISGFSKQYNCAFIWQKDGVKKLNLYLIINYFKGGKLRFKKIKPEAFEANRFYTVINKKSGEIVPMEVNFNFDDPNLIILPLAFGKRQGREFIWNDLLSLETGSLKLANGRVIEKTLYNRRTRQDEPALFVALTFERREVLDSSNIKPMNLIGVDRGENIPAVIALTDPEGCPLSRFKDSLGNPTHILRIGESYKEKQRTIQAKKEVEQRRAGGYSRKYASKAKNLADDMVRNTARDLLYYAVTQDAMLIFENLSRGFGRQGKRTFMAERQYTRMEDWLTAKLAYEGLPSKTYLSKTLAQYTSKTCSNCGFTITSADYDRVLEKLKKTATGWMTTINGKELKVEGQITYYNRYKRQNVVKDLSVELDRLSEESVNNDISSWTKGRSGEALSLLKKRFSHRPVQEKFVCLNCGFETHADEQAALNIARSWLFLRSQEYKKYQTNKTTGNTDKRAFVETWQSFYRKKLKEVWKPAV

SEQ ID NO: 42843 - protein, 977 aa, synthetic construct
  REGION 1..977: note = engineered CasX variant
QEIKRINKIRRRLVKDSNTKKAGKTGPMKTLLVRVMTPDLRERLENLRKKPENIPQPISNTSRANLNKLLTDYTEMKKAILHVYWEEFQKDPVGLMSRVAQPASKKIDQNKLKPEMDEKGNLTTAGFACSQCGQPLFVYKLEQVSEKGKAYTNYFGRCNVAEHEKLIKLAQLKPEKDSDEAVTYSLGKFGQRALDFYSIHVTKESTHPVKPLAQIAGNRYASPVGKALSDACMGTIASFLSKYQDIIIEHQKVVKGNQKRLESLRELAGKENLEYPSVTLPPQPHTKEGVDAYNEVIARVRMWVNLNLWQKLKLSRDDAKPLLRLKGFPSFPLVERQANEVDWWDMVCNVKKLINEKKEDGKVFWQNLAGYKRQEALRPYLSSEEDRKKGKKFARYQLGDLLLHLEKKHPEDWGKVYDEAWERIDKKVEGLSKHIKLEEERRSEDAQSKAALTDWLRAKASFVIEGLKEADKDEFCRCELKLQKWYGDLRGKPFAIEAENSILDISGFSKQYNCAFIWQKDGVKKLNLYLIINYFKGGKLRFKKIKPEAFEANRFYTVINKKSGEIVPMEVNFNFDDPNLIILPLAFGKRQGREFIWNDLLSLETGSLKLANGRVIEKTLYNRRTRQDEPALFVALTFERREVLDSSNIKPMNLIGVDRGENIPAVIALTDPEGCPLSRFKDSLGNPTHILRIGESYKEKQRTIQAKKEVEQRRAGGYSRKYASKAKNLADDMVRNTARDLLYYAVTQDAMLIFENLSRGFGRQGKRTFMAERQYTRMEDWLTAKLAYEGLPSKTYLSKTLAQYTSKTCSNCGFTITSADYDRVLEKLKKTATGWMTTINGKELKVEGQITYYNRYKRQNVVKDLSVELDRLSEESVNNDISSWTKGRSGEALSLLKKRFSHRPVQEKFVCLNCGFETHADEQAALNIARSWLFLRSQEYKKYQTNKTTGNTDKRAFVETWQSFYRKKLKEVWKPAV

SEQ ID NO: 42844 - protein, 979 aa, synthetic construct
  REGION 1..979: note = engineered CasX variant
QEIKRINKIRRRLVKDSNTKKAGKTGPMKTLLVRVMTPDLRERLENLRKKPENIPQPISNTSRANLNKLLTDYTEMKKAILHVYWEEFQKDPVGLMSRVAQPASKKIDQNKLKPEMDEKGNLTTAGFACSQCGQPLFVYKLEQVSEKGKAYTNYFGRCNVAEHEKLIKLAQLKPEKDSDEAVTYSLGKFGQRALDFYSIHVTKESTHPVKPLAQIAGNRYASYPVGKALSDACMGTIASFLSKYQDIIIEHQKVVKGNQKRLESLRELAGKENLEYPSVTLPPQPHTKEGVDAYNEVIARVRMWVNLNLWQKLKLSRDDAKPLLRLKGFPSFPLVERQANEVDWWDMVCNVKKLINEKKEDGKVFWQNLAGYKRQEALRPYLSSEEDRKKGKKFARYQLGDLLLHLEKKHGERDWGKVYDEAWERIDKKVEGLSKHIKLEEERRSEDAQSKAALTDWLRAKASFVIEGLKEADKDEFCRCELKLQKWYGDLRGKPFAIEAENSILDISGFSKQYNCAFIWQKDGVKKLNLYLIINYFKGGKLRFKKIKPEAFEANRFYTVINKKSGEIVPMEVNFNFDDPNLIILPLAFGKRQGREFIWNDLLSLETGSLKLANGRVIEKTLYNRRTRQDEPALFVALTFERREVLDSSNIKPMNLIGVDRGENIPAVIALTDPEGCPLSRFKDSLGNPTHILRIGESYKEKQRTIQAKKEVEQRRAGGYSRKYASKAKNLADDMVRNTARDLLYYAVTQDAMLIFENLSRGFGRQGKRTFMAERQYTRMEDWLTAKLAYEGLPSKTYLSKTLAQYTSKTCSNCGFTITSADYDRVLEKLKKTATGWMTTINGKELKVEGQITYYNRYKRQNVVKDLSVELDRLSEESVNNDISSWTKGRSGEALSLLKKRFSHRPVQEKFVCLNCGFETHADEQAALNIARSWLFLRSQEYKKYQTNKTTGNTDKRAFVETWQSFYRKKLKEVWKPAV

SEQ ID NO: 42845 - protein, 979 aa, synthetic construct
  REGION 1..979: note = engineered CasX variant
QEIKRINKIRRRLVKDSNTKKAGKTGPMKTLLVRVMTPDLRERLENLRKKPENIPQPISNTSRANLNKLLTDYTEMKKAILHVYWEEFQKDPVGLMSRVAQPASKKIDQNKLKPEMDEKGNLTTAGFACSQCGQPLFVYKLEQVSEKGKAYTNYFGRCNVAEHEKLIKLAQLKPEKDSDEAVTYSLGKFGQRALDFYSIHVTKESTHPVKPLAQIAGNRYASHPVGKALSDACMGTIASFLSKYQDIIIEHQKVVKGNQKRLESLRELAGKENLEYPSVTLPPQPHTKEGVDAYNEVIARVRMWVNLNLWQKLKLSRDDAKPLLRLKGFPSFPLVERQANEVDWWDMVCNVKKLINEKKEDGKVFWQNLAGYKRQEALRPYLSSEEDRKKGKKFARYQLGDLLLHLEKKHGERDWGKVYDEAWERIDKKVEGLSKHIKLEEERRSEDAQSKAALTDWLRAKASFVIEGLKEADKDEFCRCELKLQKWYGDLRGKPFAIEAENSILDISGFSKQYNCAFIWQKDGVKKLNLYLIINYFKGGKLRFKKIKPEAFEANRFYTVINKKSGEIVPMEVNFNFDDPNLIILPLAFGKRQGREFIWNDLLSLETGSLKLANGRVIEKTLYNRRTRQDEPALFVALTFERREVLDSSNIKPMNLIGVDRGENIPAVIALTDPEGCPLSRFKDSLGNPTHILRIGESYKEKQRTIQAKKEVEQRRAGGYSRKYASKAKNLADDMVRNTARDLLYYAVTQDAMLIFENLSRGFGRQGKRTFMAERQYTRMEDWLTAKLAYEGLPSKTYLSKTLAQYTSKTCSNCGFTITSADYDRVLEKLKKTATGWMTTINGKELKVEGQITYYNRYKRQNVVKDLSVELDRLSEESVNNDISSWTKGRSGEALSLLKKRFSHRPVQEKFVCLNCGFETHADEQAALNIARSWLFLRSQEYKKYQTNKTTGNTDKRAFVETWQSFYRKKLKEVWKPAV

SEQ ID NO: 42846 - protein, 979 aa, synthetic construct
  REGION 1..979: note = engineered CasX variant
QEIKRINKIRRRLVKDSNTKKAGKTGPMKTLLVRVMTPDLRERLENLRKKPENIPQPISNTSRANLNKLLTDYTEMKKAILHVYWEEFQKDPVGLMSRVAQPASKKIDQNKLKPEMDEKGNLTTAGFACSQCGQPLFVYKLEQVSEKGKAYTNYFGRCNVAEHEKLIKLAQLKPEKDSDEAVTYSLGKFGQRALDFYSIHVTKESTHPVKPLAQIAGNRYASTPVGKALSDACMGTIASFLSKYQDIIIEHQKVVKGNQKRLESLRELAGKENLEYPSVTLPPQPHTKEGVDAYNEVIARVRMWVNLNLWQKLKLSRDDAKPLLRLKGFPSFPLVERQANEVDWWDMVCNVKKLINEKKEDGKVFWQNLAGYKRQEALRPYLSSEEDRKKGKKFARYQLGDLLLHLEKKHGERDWGKVYDEAWERIDKKVEGLSKHIKLEEERRSEDAQSKAALTDWLRAKASFVIEGLKEADKDEFCRCELKLQKWYGDLRGKPFAIEAENSILDISGFSKQYNCAFIWQKDGVKKLNLYLIINYFKGGKLRFKKIKPEAFEANRFYTVINKKSGEIVPMEVNFNFDDPNLIILPLAFGKRQGREFIWNDLLSLETGSLKLANGRVIEKTLYNRRTRQDEPALFVALTFERREVLDSSNIKPMNLIGVDRGENIPAVIALTDPEGCPLSRFKDSLGNPTHILRIGESYKEKQRTIQAKKEVEQRRAGGYSRKYASKAKNLADDMVRNTARDLLYYAVTQDAMLIFENLSRGFGRQGKRTFMAERQYTRMEDWLTAKLAYEGLPSKTYLSKTLAQYTSKTCSNCGFTITSADYDRVLEKLKKTATGWMTTINGKELKVEGQITYYNRYKRQNVVKDLSVELDRLSEESVNNDISSWTKGRSGEALSLLKKRFSHRPVQEKFVCLNCGFETHADEQAALNIARSWLFLRSQEYKKYQTNKTTGNTDKRAFVETWQSFYRKKLKEVWKPAV

SEQ ID NO: 42847 - protein, 979 aa, synthetic construct
  REGION 1..979: note = engineered CasX variant
QEIKRINKIRRRLVKDSNTKKAGKTGPMKTLLVRVMTPDLRERLENLRKKPENIPQPISNTSRANLNKLLTDYTEMKKAILHVYWEEFQKDPVGLMSRVAQPASKKIDQNKLKPEMDEKGNLTTAGFACSQCGQPLFVYKLEQVSEKGKAYTNYFGRCNVAEHEKLIKLAQLKPEKDSDEAVTYSLGKFGQRALDFYSIHVTKESTHPVKPLAQIAGNRYASAPVGKALSDACMGTIASFLSKYQDIIIEHQKVVKGNQKRLESLRELAGKENLEYPSVTLPPQPHTKEGVDAYNEVIARVRMWVNLNLWQKLKLSRDDAKPLLRLKGFPSFPLVERQANEVDWWDMVCNVKKLINEKKEDGKVFWQNLAGYKRQEALRPYLSSEEDRKKGKKFARYQLGDLLLHLEKKHGERDWGKVYDEAWERIDKKVEGLSKHIKLEEERRSEDAQSKAALTDWLRAKASFVIEGLKEADKDEFCRCELKLQKWYGDLRGKPFAIEAENSILDISGFSKQYNCAFIWQKDGVKKLNLYLIINYFKGGKLRFKKIKPEAFEANRFYTVINKKSGEIVPMEVNFNFDDPNLIILPLAFGKRQGREFIWNDLLSLETGSLKLANGRVIEKTLYNRRTRQDEPALFVALTFERREVLDSSNIKPMNLIGVDRGENIPAVIALTDPEGCPLSRFKDSLGNPTHILRIGESYKEKQRTIQAKKEVEQRRAGGYSRKYASKAKNLADDMVRNTARDLLYYAVTQDAMLIFENLSRGFGRQGKRTFMAERQYTRMEDWLTAKLAYEGLPSKTYLSKTLAQYTSKTCSNCGFTITSADYDRVLEKLKKTATGWMTTINGKELKVEGQITYYNRYKRQNVVKDLSVELDRLSEESVNNDISSWTKGRSGEALSLLKKRFSHRPVQEKFVCLNCGFETHADEQAALNIARSWLFLRSQEYKKYQTNKTTGNTDKRAFVETWQSFYRKKLKEVWKPAV

SEQ ID NO: 42848 - protein, 979 aa, synthetic construct
  REGION 1..979: note = engineered CasX variant
QEIKRINKIRRRLVKDSNTKKAGKTGPMKTLLVRVMTPDLRERLENLRKKPENIPQPISNTSRANLNKLLTDYTEMKKAILHVYWEEFQKDPVGLMSRVAQPASKKIDQNKLKPEMDEKGNLTTAGFACSQCGQPLFVYKLEQVSEKGKAYTNYFGRCNVAEHEKLIKLAQLKPEKDSDEAVTYSLGKFGQRALDFYSIHVTKESTHPVKPLAQIAGNRYASVPVGKALSDACMGTIASFLSKYQDIIIEHQKVVKGNQKRLESLRELAGKENLEYPSVTLPPQPHTKEGVDAYNEVIARVRMWVNLNLWQKLKLSRDDAKPLLRLKGFPSFPLVERQANEVDWWDMVCNVKKLINEKKEDGKVFWQNLAGYKRQEALRPYLSSEEDRKKGKKFARYQLGDLLLHLEKKHGERDWGKVYDEAWERIDKKVEGLSKHIKLEEERRSEDAQSKAALTDWLRAKASFVIEGLKEADKDEFCRCELKLQKWYGDLRGKPFAIEAENSILDISGFSKQYNCAFIWQKDGVKKLNLYLIINYFKGGKLRFKKIKPEAFEANRFYTVINKKSGEIVPMEVNFNFDDPNLIILPLAFGKRQGREFIWNDLLSLETGSLKLANGRVIEKTLYNRRTRQDEPALFVALTFERREVLDSSNIKPMNLIGVDRGENIPAVIALTDPEGCPLSRFKDSLGNPTHILRIGESYKEKQRTIQAKKEVEQRRAGGYSRKYASKAKNLADDMVRNTARDLLYYAVTQDAMLIFENLSRGFGRQGKRTFMAERQYTRMEDWLTAKLAYEGLPSKTYLSKTLAQYTSKTCSNCGFTITSADYDRVLEKLKKTATGWMTTINGKELKVEGQITYYNRYKRQNVVKDLSVELDRLSEESVNNDISSWTKGRSGEALSLLKKRFSHRPVQEKFVCLNCGFETHADEQAALNIARSWLFLRSQEYKKYQTNKTTGNTDKRAFVETWQSFYRKKLKEVWKPAV

SEQ ID NO: 42849 - protein, 980 aa, synthetic construct
  REGION 1..980: note = engineered CasX variant
QEIKRINKIRRRLVKDSNTKKAGKTGPMKTLLVRVMTPDLRERLENLRKKPENIPQPISNTSRANLNKLLTDYTEMKKAILHVYWEEFQKDPVGLMSRVAQPASKKIDQNKLKPEMDEKGNLTTAGFACSQCGQPLFVYKLEQVSEKGKAYTNYFGRCNVAEHEKLIKKLAQLKPEKDSDEAVTYSLGKFGQRALDFYSIHVTKESTHPVKPLAQIAGNRYASGPVGKALSDACMGTIASFLSKYQDIIIEHQKVVKGNQKRLESLRELAGKENLEYPSVTLPPQPHTKEGVDAYNEVIARVRMWVNLNLWQKLKLSRDDAKPLLRLKGFPSFPLVERQANEVDWWDMVCNVKKLINEKKEDGKVFWQNLAGYKRQEALRPYLSSEEDRKKGKKFARYQLGDLLLHLEKKHGERDWGKVYDEAWERIDKKVEGLSKHIKLEEERRSEDAQSKAALTDWLRAKASFVIEGLKEADKDEFCRCELKLQKWYGDLRGKPFAIEAENSILDISGFSKQYNCAFIWQKDGVKKLNLYLIINYFKGGKLRFKKIKPEAFEANRFYTVINKKSGEIVPMEVNFNFDDPNLIILPLAFGKRQGREFIWNDLLSLETGSLKLANGRVIEKTLYNRRTRQDEPALFVALTFERREVLDSSNIKPMNLIGVDRGENIPAVIALTDPEGCPLSRFKDSLGNPTHILRIGESYKEKQRTIQAKKEVEQRRAGGYSRKYASKAKNLADDMVRNTARDLLYYAVTQDAMLIFENLSRGFGRQGKRTFMAERQYTRMEDWLTAKLAYEGLPSKTYLSKTLAQYTSKTCSNCGFTITSADYDRVLEKLKKTATGWMTTINGKELKVEGQITYYNRYKRQNVVKDLSVELDRLSEESVNNDISSWTKGRSGEALSLLKKRFSHRPVQEKFVCLNCGFETHADEQAALNIARSWLFLRSQEYKKYQTNKTTGNTDKRAFVETWQSFYRKKLKEVWKPAV

SEQ ID NO: 42850 - protein, 978 aa, synthetic construct
  REGION 1..978: note = engineered CasX variant
QEIKRINKIRRRLVKDSNTKKAGKTGPMKTLLVRVMTPDLRERLENLRKKPENIPQPISNTSRANLNKLLTDYTEMKKAILHVYWEEFQKDPVGLMSRVAQPASKKIDQNKLKPEMDEKGNLTTAGFACSQCGQPLFVYKLEQVSEKGKAYTNYFGRCNVAEHEKLIKLAQLKPEKDSDEAVTYSLGKFGQRALDFYSIHVTKESTHPVKPLAQIAGNRYASPVGKALSDACMGTIASFLSKYQDIIIEHQKVVKGNQKRLESLRELAGKENLEYPSVTLPPQPHTKEGVDAYNEVIARVRMWVNLNLWQKLKLSRDDAKPLLRLKGFPSFPLVERQANEVDWWDMVCNVKKLINEKKEDGKVFWQNLAGYKRQEALRPYLSSEEDRKKGKKFARYQLGDLLLHLEKKHGERDWGKVYDEAWERIDKKVEGLSKHIKLEEERRSEDAQSKAALTDWLRAKASFVIEGLKEADKDEFCRCELKLQKWYGDLRGKPFAIEAENSILDISGFSKQYNCAFIWQKDGVKKLNLYLIINYFKGGKLRFKKIKPEAFEANRFYTVINKKSGEIVPMEVNFNFDDPNLIILPLAFGKRQGREFIWNDLLSLETGSLKLANGRVIEKTLYNRRTRQDEPALFVALTFERREVLDSSNIKPMNLIGVDRGENIPAVIALTDPEGCPLSRFKDSLGNPTHILRIGESYKEKQRTIQAKKEVEQRRAGGYSRKYASKAKNLADDMVRNTARDLLYYAVTQDAMLIFENLSRGFGRQGKRTFMAERQYTRMEDWLTAKLAYEGLPSKTYLSKTLAQYTSKTCSNCGFTITSADYDRVLEKLKKTATGWMTTINGKELKVEGQITYYNRYKRQNVVKDLSVELDRLSEESVNNDISSWTKGRSGEALSLLKKRFSHRPVQEKFVCLNCGFETHADEQAALNIARSWLFLRSQEYKKYQTNKTTGNTDKRAFVETWQSFYRKKLKEVWKPAV

SEQ ID NO: 42851 - protein, 979 aa, synthetic construct
  REGION 1..979: note = engineered CasX variant
QEIKRINKIRRRLVKDSNTKKAGKTGPMKTLLVRVMTPDLRERLENLRKKPENIPQPISNTSRANLNKLLTDYTEMKKAILHVYWEEFQKDPVGLMSRVAQPASKKIDQNKLKPEMDEKGNLTTAGFACSQCGQPLFVYKLEQVSEKGKAYTNYFGRCNVAEHEKLIKLAQLKPEKDSDEAVTYSLGKFGQRALDFYSIHVTKESTHPVKPLAQIAGNRYASYPVGKALSDACMGTIASFLSKYQDIIIEHQKVVKGNQKRLESLRELAGKENLEYPSVTLPPQPHTKEGVDAYNEVIARVRMWVNLNLWQKLKLSRDDAKPLLRLKGFPSFPLVERQANEVDWWDMVCNVKKLINEKKEDGKVFWQNLAGYKRQEALRPYLSSEEDRKKGKKFARYQLGDLLLHLEKKHGEYDWGKVYDEAWERIDKKVEGLSKHIKLEEERRSEDAQSKAALTDWLRAKASFVIEGLKEADKDEFCRCELKLQKWYGDLRGKPFAIEAENSILDISGFSKQYNCAFIWQKDGVKKLNLYLIINYFKGGKLRFKKIKPEAFEANRFYTVINKKSGEIVPMEVNFNFDDPNLIILPLAFGKRQGREFIWNDLLSLETGSLKLANGRVIEKTLYNRRTRQDEPALFVALTFERREVLDSSNIKPMNLIGVDRGENIPAVIALTDPEGCPLSRFKDSLGNPTHILRIGESYKEKQRTIQAKKEVEQRRAGGYSRKYASKAKNLADDMVRNTARDLLYYAVTQDAMLIFENLSRGFGRQGKRTFMAERQYTRMEDWLTAKLAYEGLPSKTYLSKTLAQYTSKTCSNCGFTITSADYDRVLEKLKKTATGWMTTINGKELKVEGQITYYNRYKRQNVVKDLSVELDRLSEESVNNDISSWTKGRSGEALSLLKKRFSHRPVQEKFVCLNCGFETHADEQAALNIARSWLFLRSQEYKKYQTNKTTGNTDKRAFVETWQSFYRKKLKEVWKPAV

SEQ ID NO: 42852 - protein, 979 aa, synthetic construct
  REGION 1..979: note = engineered CasX variant
QEIKRINKIRRRLVKDSNTKKAGKTGPMKTLLVRVMTPDLRERLENLRKKPENIPQPISNTSRANLNKLLTDYTEMKKAILHVYWEEFQKDPVGLMSRVAQPASKKIDQNKLKPEMDEKGNLTTAGFACSQCGQPLFVYKLEQVSEKGKAYTNYFGRCNVAEHEKLIKLAQLKPEKDSDEAVTYSLGKFGQRALDFYSIHVTKESTHPVKPLAQIAGNRYASHPVGKALSDACMGTIASFLSKYQDIIIEHQKVVKGNQKRLESLRELAGKENLEYPSVTLPPQPHTKEGVDAYNEVIARVRMWVNLNLWQKLKLSRDDAKPLLRLKGFPSFPLVERQANEVDWWDMVCNVKKLINEKKEDGKVFWQNLAGYKRQEALRPYLSSEEDRKKGKKFARYQLGDLLLHLEKKHGEYDWGKVYDEAWERIDKKVEGLSKHIKLEEERRSEDAQSKAALTDWLRAKASFVIEGLKEADKDEFCRCELKLQKWYGDLRGKPFAIEAENSILDISGFSKQYNCAFIWQKDGVKKLNLYLIINYFKGGKLRFKKIKPEAFEANRFYTVINKKSGEIVPMEVNFNFDDPNLIILPLAFGKRQGREFIWNDLLSLETGSLKLANGRVIEKTLYNRRTRQDEPALFVALTFERREVLDSSNIKPMNLIGVDRGENIPAVIALTDPEGCPLSRFKDSLGNPTHILRIGESYKEKQRTIQAKKEVEQRRAGGYSRKYASKAKNLADDMVRNTARDLLYYAVTQDAMLIFENLSRGFGRQGKRTFMAERQYTRMEDWLTAKLAYEGLPSKTYLSKTLAQYTSKTCSNCGFTITSADYDRVLEKLKKTATGWMTTINGKELKVEGQITYYNRYKRQNVVKDLSVELDRLSEESVNNDISSWTKGRSGEALSLLKKRFSHRPVQEKFVCLNCGFETHADEQAALNIARSWLFLRSQEYKKYQTNKTTGNTDKRAFVETWQSFYRKKLKEVWKPAV

SEQ ID NO: 42853 - protein, 979 aa, synthetic construct
  REGION 1..979: note = engineered CasX variant
QEIKRINKIRRRLVKDSNTKKAGKTGPMKTLLVRVMTPDLRERLENLRKKPENIPQPISNTSRANLNKLLTDYTEMKKAILHVYWEEFQKDPVGLMSRVAQPASKKIDQNKLKPEMDEKGNLTTAGFACSQCGQPLFVYKLEQVSEKGKAYTNYFGRCNVAEHEKLIKLAQLKPEKDSDEAVTYSLGKFGQRALDFYSIHVTKESTHPVKPLAQIAGNRYASTPVGKALSDACMGTIASFLSKYQDIIIEHQKVVKGNQKRLESLRELAGKENLEYPSVTLPPQPHTKEGVDAYNEVIARVRMWVNLNLWQKLKLSRDDAKPLLRLKGFPSFPLVERQANEVDWWDMVCNVKKLINEKKEDGKVFWQNLAGYKRQEALRPYLSSEEDRKKGKKFARYQLGDLLLHLEKKHGEYDWGKVYDEAWERIDKKVEGLSKHIKLEEERRSEDAQSKAALTDWLRAKASFVIEGLKEADKDEFCRCELKLQKWYGDLRGKPFAIEAENSILDISGFSKQYNCAFIWQKDGVKKLNLYLIINYFKGGKLRFKKIKPEAFEANRFYTVINKKSGEIVPMEVNFNFDDPNLIILPLAFGKRQGREFIWNDLLSLETGSLKLANGRVIEKTLYNRRTRQDEPALFVALTFERREVLDSSNIKPMNLIGVDRGENIPAVIALTDPEGCPLSRFKDSLGNPTHILRIGESYKEKQRTIQAKKEVEQRRAGGYSRKYASKAKNLADDMVRNTARDLLYYAVTQDAMLIFENLSRGFGRQGKRTFMAERQYTRMEDWLTAKLAYEGLPSKTYLSKTLAQYTSKTCSNCGFTITSADYDRVLEKLKKTATGWMTTINGKELKVEGQITYYNRYKRQNVVKDLSVELDRLSEESVNNDISSWTKGRSGEALSLLKKRFSHRPVQEKFVCLNCGFETHADEQAALNIARSWLFLRSQEYKKYQTNKTTGNTDKRAFVETWQSFYRKKLKEVWKPAV

SEQ ID NO: 42854 - protein, 979 aa, synthetic construct
  REGION 1..979: note = engineered CasX variant
QEIKRINKIRRRLVKDSNTKKAGKTGPMKTLLVRVMTPDLRERLENLRKKPENIPQPISNTSRANLNKLLTDYTEMKKAILHVYWEEFQKDPVGLMSRVAQPASKKIDQNKLKPEMDEKGNLTTAGFACSQCGQPLFVYKLEQVSEKGKAYTNYFGRCNVAEHEKLIKLAQLKPEKDSDEAVTYSLGKFGQRALDFYSIHVTKESTHPVKPLAQIAGNRYASAPVGKALSDACMGTIASFLSKYQDIIIEHQKVVKGNQKRLESLRELAGKENLEYPSVTLPPQPHTKEGVDAYNEVIARVRMWVNLNLWQKLKLSRDDAKPLLRLKGFPSFPLVERQANEVDWWDMVCNVKKLINEKKEDGKVFWQNLAGYKRQEALRPYLSSEEDRKKGKKFARYQLGDLLLHLEKKHGEYDWGKVYDEAWERIDKKVEGLSKHIKLEEERRSEDAQSKAALTDWLRAKASFVIEGLKEADKDEFCRCELKLQKWYGDLRGKPFAIEAENSILDISGFSKQYNCAFIWQKDGVKKLNLYLIINYFKGGKLRFKKIKPEAFEANRFYTVINKKSGEIVPMEVNFNFDDPNLIILPLAFGKRQGREFIWNDLLSLETGSLKLANGRVIEKTLYNRRTRQDEPALFVALTFERREVLDSSNIKPMNLIGVDRGENIPAVIALTDPEGCPLSRFKDSLGNPTHILRIGESYKEKQRTIQAKKEVEQRRAGGYSRKYASKAKNLADDMVRNTARDLLYYAVTQDAMLIFENLSRGFGRQGKRTFMAERQYTRMEDWLTAKLAYEGLPSKTYLSKTLAQYTSKTCSNCGFTITSADYDRVLEKLKKTATGWMTTINGKELKVEGQITYYNRYKRQNVVKDLSVELDRLSEESVNNDISSWTKGRSGEALSLLKKRFSHRPVQEKFVCLNCGFETHADEQAALNIARSWLFLRSQEYKKYQTNKTTGNTDKRAFVETWQSFYRKKLKEVWKPAV

SEQ ID NO: 42855 - protein, 979 aa, synthetic construct
  REGION 1..979: note = engineered CasX variant
QEIKRINKIRRRLVKDSNTKKAGKTGPMKTLLVRVMTPDLRERLENLRKKPENIPQPISNTSRANLNKLLTDYTEMKKAILHVYWEEFQKDPVGLMSRVAQPASKKIDQNKLKPEMDEKGNLTTAGFACSQCGQPLFVYKLEQVSEKGKAYTNYFGRCNVAEHEKLIKLAQLKPEKDSDEAVTYSLGKFGQRALDFYSIHVTKESTHPVKPLAQIAGNRYASVPVGKALSDACMGTIASFLSKYQDIIIEHQKVVKGNQKRLESLRELAGKENLEYPSVTLPPQPHTKEGVDAYNEVIARVRMWVNLNLWQKLKLSRDDAKPLLRLKGFPSFPLVERQANEVDWWDMVCNVKKLINEKKEDGKVFWQNLAGYKRQEALRPYLSSEEDRKKGKKFARYQLGDLLLHLEKKHGEYDWGKVYDEAWERIDKKVEGLSKHIKLEEERRSEDAQSKAALTDWLRAKASFVIEGLKEADKDEFCRCELKLQKWYGDLRGKPFAIEAENSILDISGFSKQYNCAFIWQKDGVKKLNLYLIINYFKGGKLRFKKIKPEAFEANRFYTVINKKSGEIVPMEVNFNFDDPNLIILPLAFGKRQGREFIWNDLLSLETGSLKLANGRVIEKTLYNRRTRQDEPALFVALTFERREVLDSSNIKPMNLIGVDRGENIPAVIALTDPEGCPLSRFKDSLGNPTHILRIGESYKEKQRTIQAKKEVEQRRAGGYSRKYASKAKNLADDMVRNTARDLLYYAVTQDAMLIFENLSRGFGRQGKRTFMAERQYTRMEDWLTAKLAYEGLPSKTYLSKTLAQYTSKTCSNCGFTITSADYDRVLEKLKKTATGWMTTINGKELKVEGQITYYNRYKRQNVVKDLSVELDRLSEESVNNDISSWTKGRSGEALSLLKKRFSHRPVQEKFVCLNCGFETHADEQAALNIARSWLFLRSQEYKKYQTNKTTGNTDKRAFVETWQSFYRKKLKEVWKPAV

SEQ ID NO: 42856 - protein, 980 aa, synthetic construct
  REGION 1..980: note = engineered CasX variant
QEIKRINKIRRRLVKDSNTKKAGKTGPMKTLLVRVMTPDLRERLENLRKKPENIPQPISNTSRANLNKLLTDYTEMKKAILHVYWEEFQKDPVGLMSRVAQPASKKIDQNKLKPEMDEKGNLTTAGFACSQCGQPLFVYKLEQVSEKGKAYTNYFGRCNVAEHEKLIKKLAQLKPEKDSDEAVTYSLGKFGQRALDFYSIHVTKESTHPVKPLAQIAGNRYASGPVGKALSDACMGTIASFLSKYQDIIIEHQKVVKGNQKRLESLRELAGKENLEYPSVTLPPQPHTKEGVDAYNEVIARVRMWVNLNLWQKLKLSRDDAKPLLRLKGFPSFPLVERQANEVDWWDMVCNVKKLINEKKEDGKVFWQNLAGYKRQEALRPYLSSEEDRKKGKKFARYQLGDLLLHLEKKHGEYDWGKVYDEAWERIDKKVEGLSKHIKLEEERRSEDAQSKAALTDWLRAKASFVIEGLKEADKDEFCRCELKLQKWYGDLRGKPFAIEAENSILDISGFSKQYNCAFIWQKDGVKKLNLYLIINYFKGGKLRFKKIKPEAFEANRFYTVINKKSGEIVPMEVNFNFDDPNLIILPLAFGKRQGREFIWNDLLSLETGSLKLANGRVIEKTLYNRRTRQDEPALFVALTFERREVLDSSNIKPMNLIGVDRGENIPAVIALTDPEGCPLSRFKDSLGNPTHILRIGESYKEKQRTIQAKKEVEQRRAGGYSRKYASKAKNLADDMVRNTARDLLYYAVTQDAMLIFENLSRGFGRQGKRTFMAERQYTRMEDWLTAKLAYEGLPSKTYLSKTLAQYTSKTCSNCGFTITSADYDRVLEKLKKTATGWMTTINGKELKVEGQITYYNRYKRQNVVKDLSVELDRLSEESVNNDISSWTKGRSGEALSLLKKRFSHRPVQEKFVCLNCGFETHADEQAALNIARSWLFLRSQEYKKYQTNKTTGNTDKRAFVETWQSFYRKKLKEVWKPAV

SEQ ID NO: 42857 - protein, 978 aa, synthetic construct
  REGION 1..978: note = engineered CasX variant
QEIKRINKIRRRLVKDSNTKKAGKTGPMKTLLVRVMTPDLRERLENLRKKPENIPQPISNTSRANLNKLLTDYTEMKKAILHVYWEEFQKDPVGLMSRVAQPASKKIDQNKLKPEMDEKGNLTTAGFACSQCGQPLFVYKLEQVSEKGKAYTNYFGRCNVAEHEKLIKLAQLKPEKDSDEAVTYSLGKFGQRALDFYSIHVTKESTHPVKPLAQIAGNRYASPVGKALSDACMGTIASFLSKYQDIIIEHQKVVKGNQKRLESLRELAGKENLEYPSVTLPPQPHTKEGVDAYNEVIARVRMWVNLNLWQKLKLSRDDAKPLLRLKGFPSFPLVERQANEVDWWDMVCNVKKLINEKKEDGKVFWQNLAGYKRQEALRPYLSSEEDRKKGKKFARYQLGDLLLHLEKKHGEYDWGKVYDEAWERIDKKVEGLSKHIKLEEERRSEDAQSKAALTDWLRAKASFVIEGLKEADKDEFCRCELKLQKWYGDLRGKPFAIEAENSILDISGFSKQYNCAFIWQKDGVKKLNLYLIINYFKGGKLRFKKIKPEAFEANRFYTVINKKSGEIVPMEVNFNFDDPNLIILPLAFGKRQGREFIWNDLLSLETGSLKLANGRVIEKTLYNRRTRQDEPALFVALTFERREVLDSSNIKPMNLIGVDRGENIPAVIALTDPEGCPLSRFKDSLGNPTHILRIGESYKEKQRTIQAKKEVEQRRAGGYSRKYASKAKNLADDMVRNTARDLLYYAVTQDAMLIFENLSRGFGRQGKRTFMAERQYTRMEDWLTAKLAYEGLPSKTYLSKTLAQYTSKTCSNCGFTITSADYDRVLEKLKKTATGWMTTINGKELKVEGQITYYNRYKRQNVVKDLSVELDRLSEESVNNDISSWTKGRSGEALSLLKKRFSHRPVQEKFVCLNCGFETHADEQAALNIARSWLFLRSQEYKKYQTNKTTGNTDKRAFVETWQSFYRKKLKEVWKPAV

SEQ ID NO: 42858 - protein, 978 aa, synthetic construct
  REGION 1..978: note = engineered CasX variant
QEIKRINKIRRRLVKDSNTKKAGKTGPMKTLLVRVMTPDLRERLENLRKKPENIPQPISNTSRANLNKLLTDYTEMKKAILHVYWEEFQKDPVGLMSRVAQPASKKIDQNKLKPEMDEKGNLTTAGFACSQCGQPLFVYKLEQVSEKGKAYTNYFGRCNVAEHEKLIKLAQLKPEKDSDEAVTYSLGKFGQRALDFYSIHVTKESTHPVKPLAQIAGNRYASYPVGKALSDACMGTIASFLSKYQDIIIEHQKVVKGNQKRLESLRELAGKENLEYPSVTLPPQPHTKEGVDAYNEVIARVRMWVNLNLWQKLKLSRDDAKPLLRLKGFPSFPLVERQANEVDWWDMVCNVKKLINEKKEDGKVFWQNLAGYKRQEALRPYLSSEEDRKKGKKFARYQLGDLLLHLEKKHGEDWGDVYDEAWERIDKKVEGLSKHIKLEEERRSEDAQSKAALTDWLRAKASFVIEGLKEADKDEFCRCELKLQKWYGDLRGKPFAIEAENSILDISGFSKQYNCAFIWQKDGVKKLNLYLIINYFKGGKLRFKKIKPEAFEANRFYTVINKKSGEIVPMEVNFNFDDPNLIILPLAFGKRQGREFIWNDLLSLETGSLKLANGRVIEKTLYNRRTRQDEPALFVALTFERREVLDSSNIKPMNLIGVDRGENIPAVIALTDPEGCPLSRFKDSLGNPTHILRIGESYKEKQRTIQAKKEVEQRRAGGYSRKYASKAKNLADDMVRNTARDLLYYAVTQDAMLIFENLSRGFGRQGKRTFMAERQYTRMEDWLTAKLAYEGLPSKTYLSKTLAQYTSKTCSNCGFTITSADYDRVLEKLKKTATGWMTTINGKELKVEGQITYYNRYKRQNVVKDLSVELDRLSEESVNNDISSWTKGRSGEALSLLKKRFSHRPVQEKFVCLNCGFETHADEQAALNIARSWLFLRSQEYKKYQTNKTTGNTDKRAFVETWQSFYRKKLKEVWKPAV

SEQ ID NO: 42859 - protein, 978 aa, synthetic construct
  REGION 1..978: note = engineered CasX variant
QEIKRINKIRRRLVKDSNTKKAGKTGPMKTLLVRVMTPDLRERLENLRKKPENIPQPISNTSRANLNKLLTDYTEMKKAILHVYWEEFQKDPVGLMSRVAQPASKKIDQNKLKPEMDEKGNLTTAGFACSQCGQPLFVYKLEQVSEKGKAYTNYFGRCNVAEHEKLIKLAQLKPEKDSDEAVTYSLGKFGQRALDFYSIHVTKESTHPVKPLAQIAGNRYASHPVGKALSDACMGTIASFLSKYQDIIIEHQKVVKGNQKRLESLRELAGKENLEYPSVTLPPQPHTKEGVDAYNEVIARVRMWVNLNLWQKLKLSRDDAKPLLRLKGFPSFPLVERQANEVDWWDMVCNVKKLINEKKEDGKVFWQNLAGYKRQEALRPYLSSEEDRKKGKKFARYQLGDLLLHLEKKHGEDWGDVYDEAWERIDKKVEGLSKHIKLEEERRSEDAQSKAALTDWLRAKASFVIEGLKEADKDEFCRCELKLQKWYGDLRGKPFAIEAENSILDISGFSKQYNCAFIWQKDGVKKLNLYLIINYFKGGKLRFKKIKPEAFEANRFYTVINKKSGEIVPMEVNFNFDDPNLIILPLAFGKRQGREFIWNDLLSLETGSLKLANGRVIEKTLYNRRTRQDEPALFVALTFERREVLDSSNIKPMNLIGVDRGENIPAVIALTDPEGCPLSRFKDSLGNPTHILRIGESYKEKQRTIQAKKEVEQRRAGGYSRKYASKAKNLADDMVRNTARDLLYYAVTQDAMLIFENLSRGFGRQGKRTFMAERQYTRMEDWLTAKLAYEGLPSKTYLSKTLAQYTSKTCSNCGFTITSADYDRVLEKLKKTATGWMTTINGKELKVEGQITYYNRYKRQNVVKDLSVELDRLSEESVNNDISSWTKGRSGEALSLLKKRFSHRPVQEKFVCLNCGFETHADEQAALNIARSWLFLRSQEYKKYQTNKTTGNTDKRAFVETWQSFYRKKLKEVWKPAV

SEQ ID NO: 42860 - protein, 978 aa, synthetic construct
  REGION 1..978: note = engineered CasX variant
QEIKRINKIRRRLVKDSNTKKAGKTGPMKTLLVRVMTPDLRERLENLRKKPENIPQPISNTSRANLNKLLTDYTEMKKAILHVYWEEFQKDPVGLMSRVAQPASKKIDQNKLKPEMDEKGNLTTAGFACSQCGQPLFVYKLEQVSEKGKAYTNYFGRCNVAEHEKLIKLAQLKPEKDSDEAVTYSLGKFGQRALDFYSIHVTKESTHPVKPLAQIAGNRYASTPVGKALSDACMGTIASFLSKYQDIIIEHQKVVKGNQKRLESLRELAGKENLEYPSVTLPPQPHTKEGVDAYNEVIARVRMWVNLNLWQKLKLSRDDAKPLLRLKGFPSFPLVERQANEVDWWDMVCNVKKLINEKKEDGKVFWQNLAGYKRQEALRPYLSSEEDRKKGKKFARYQLGDLLLHLEKKHGEDWGDVYDEAWERIDKKVEGLSKHIKLEEERRSEDAQSKAALTDWLRAKASFVIEGLKEADKDEFCRCELKLQKWYGDLRGKPFAIEAENSILDISGFSKQYNCAFIWQKDGVKKLNLYLIINYFKGGKLRFKKIKPEAFEANRFYTVINKKSGEIVPMEVNFNFDDPNLIILPLAFGKRQGREFIWNDLLSLETGSLKLANGRVIEKTLYNRRTRQDEPALFVALTFERREVLDSSNIKPMNLIGVDRGENIPAVIALTDPEGCPLSRFKDSLGNPTHILRIGESYKEKQRTIQAKKEVEQRRAGGYSRKYASKAKNLADDMVRNTARDLLYYAVTQDAMLIFENLSRGFGRQGKRTFMAERQYTRMEDWLTAKLAYEGLPSKTYLSKTLAQYTSKTCSNCGFTITSADYDRVLEKLKKTATGWMTTINGKELKVEGQITYYNRYKRQNVVKDLSVELDRLSEESVNNDISSWTKGRSGEALSLLKKRFSHRPVQEKFVCLNCGFETHADEQAALNIARSWLFLRSQEYKKYQTNKTTGNTDKRAFVETWQSFYRKKLKEVWKPAV

SEQ ID NO: 42861 - protein, 978 aa, synthetic construct
  REGION 1..978: note = engineered CasX variant
QEIKRINKIRRRLVKDSNTKKAGKTGPMKTLLVRVMTPDLRERLENLRKKPENIPQPISNTSRANLNKLLTDYTEMKKAILHVYWEEFQKDPVGLMSRVAQPASKKIDQNKLKPEMDEKGNLTTAGFACSQCGQPLFVYKLEQVSEKGKAYTNYFGRCNVAEHEKLIKLAQLKPEKDSDEAVTYSLGKFGQRALDFYSIHVTKESTHPVKPLAQIAGNRYASAPVGKALSDACMGTIASFLSKYQDIIIEHQKVVKGNQKRLESLRELAGKENLEYPSVTLPPQPHTKEGVDAYNEVIARVRMWVNLNLWQKLKLSRDDAKPLLRLKGFPSFPLVERQANEVDWWDMVCNVKKLINEKKEDGKVFWQNLAGYKRQEALRPYLSSEEDRKKGKKFARYQLGDLLLHLEKKHGEDWGDVYDEAWERIDKKVEGLSKHIKLEEERRSEDAQSKAALTDWLRAKASFVIEGLKEADKDEFCRCELKLQKWYGDLRGKPFAIEAENSILDISGFSKQYNCAFIWQKDGVKKLNLYLIINYFKGGKLRFKKIKPEAFEANRFYTVINKKSGEIVPMEVNFNFDDPNLIILPLAFGKRQGREFIWNDLLSLETGSLKLANGRVIEKTLYNRRTRQDEPALFVALTFERREVLDSSNIKPMNLIGVDRGENIPAVIALTDPEGCPLSRFKDSLGNPTHILRIGESYKEKQRTIQAKKEVEQRRAGGYSRKYASKAKNLADDMVRNTARDLLYYAVTQDAMLIFENLSRGFGRQGKRTFMAERQYTRMEDWLTAKLAYEGLPSKTYLSKTLAQYTSKTCSNCGFTITSADYDRVLEKLKKTATGWMTTINGKELKVEGQITYYNRYKRQNVVKDLSVELDRLSEESVNNDISSWTKGRSGEALSLLKKRFSHRPVQEKFVCLNCGFETHADEQAALNIARSWLFLRSQEYKKYQTNKTTGNTDKRAFVETWQSFYRKKLKEVWKPAV

SEQ ID NO: 42862 - protein, 978 aa, synthetic construct
  REGION 1..978: note = engineered CasX variant
QEIKRINKIRRRLVKDSNTKKAGKTGPMKTLLVRVMTPDLRERLENLRKKPENIPQPISNTSRANLNKLLTDYTEMKKAILHVYWEEFQKDPVGLMSRVAQPASKKIDQNKLKPEMDEKGNLTTAGFACSQCGQPLFVYKLEQVSEKGKAYTNYFGRCNVAEHEKLIKLAQLKPEKDSDEAVTYSLGKFGQRALDFYSIHVTKESTHPVKPLAQIAGNRYASVPVGKALSDACMGTIASFLSKYQDIIIEHQKVVKGNQKRLESLRELAGKENLEYPSVTLPPQPHTKEGVDAYNEVIARVRMWVNLNLWQKLKLSRDDAKPLLRLKGFPSFPLVERQANEVDWWDMVCNVKKLINEKKEDGKVFWQNLAGYKRQEALRPYLSSEEDRKKGKKFARYQLGDLLLHLEKKHGEDWGDVYDEAWERIDKKVEGLSKHIKLEEERRSEDAQSKAALTDWLRAKASFVIEGLKEADKDEFCRCELKLQKWYGDLRGKPFAIEAENSILDISGFSKQYNCAFIWQKDGVKKLNLYLIINYFKGGKLRFKKIKPEAFEANRFYTVINKKSGEIVPMEVNFNFDDPNLIILPLAFGKRQGREFIWNDLLSLETGSLKLANGRVIEKTLYNRRTRQDEPALFVALTFERREVLDSSNIKPMNLIGVDRGENIPAVIALTDPEGCPLSRFKDSLGNPTHILRIGESYKEKQRTIQAKKEVEQRRAGGYSRKYASKAKNLADDMVRNTARDLLYYAVTQDAMLIFENLSRGFGRQGKRTFMAERQYTRMEDWLTAKLAYEGLPSKTYLSKTLAQYTSKTCSNCGFTITSADYDRVLEKLKKTATGWMTTINGKELKVEGQITYYNRYKRQNVVKDLSVELDRLSEESVNNDISSWTKGRSGEALSLLKKRFSHRPVQEKFVCLNCGFETHADEQAALNIARSWLFLRSQEYKKYQTNKTTGNTDKRAFVETWQSFYRKKLKEVWKPAV

SEQ ID NO: 42863 - protein, 979 aa, synthetic construct
  REGION 1..979: note = engineered CasX variant
QEIKRINKIRRRLVKDSNTKKAGKTGPMKTLLVRVMTPDLRERLENLRKKPENIPQPISNTSRANLNKLLTDYTEMKKAILHVYWEEFQKDPVGLMSRVAQPASKKIDQNKLKPEMDEKGNLTTAGFACSQCGQPLFVYKLEQVSEKGKAYTNYFGRCNVAEHEKLIKKLAQLKPEKDSDEAVTYSLGKFGQRALDFYSIHVTKESTHPVKPLAQIAGNRYASGPVGKALSDACMGTIASFLSKYQDIIIEHQKVVKGNQKRLESLRELAGKENLEYPSVTLPPQPHTKEGVDAYNEVIARVRMWVNLNLWQKLKLSRDDAKPLLRLKGFPSFPLVERQANEVDWWDMVCNVKKLINEKKEDGKVFWQNLAGYKRQEALRPYLSSEEDRKKGKKFARYQLGDLLLHLEKKHGEDWGDVYDEAWERIDKKVEGLSKHIKLEEERRSEDAQSKAALTDWLRAKASFVIEGLKEADKDEFCRCELKLQKWYGDLRGKPFAIEAENSILDISGFSKQYNCAFIWQKDGVKKLNLYLIINYFKGGKLRFKKIKPEAFEANRFYTVINKKSGEIVPMEVNFNFDDPNLIILPLAFGKRQGREFIWNDLLSLETGSLKLANGRVIEKTLYNRRTRQDEPALFVALTFERREVLDSSNIKPMNLIGVDRGENIPAVIALTDPEGCPLSRFKDSLGNPTHILRIGESYKEKQRTIQAKKEVEQRRAGGYSRKYASKAKNLADDMVRNTARDLLYYAVTQDAMLIFENLSRGFGRQGKRTFMAERQYTRMEDWLTAKLAYEGLPSKTYLSKTLAQYTSKTCSNCGFTITSADYDRVLEKLKKTATGWMTTINGKELKVEGQITYYNRYKRQNVVKDLSVELDRLSEESVNNDISSWTKGRSGEALSLLKKRFSHRPVQEKFVCLNCGFETHADEQAALNIARSWLFLRSQEYKKYQTNKTTGNTDKRAFVETWQSFYRKKLKEVWKPAV

SEQ ID NO: 42864 - protein, 977 aa, synthetic construct
  REGION 1..977: note = engineered CasX variant
QEIKRINKIRRRLVKDSNTKKAGKTGPMKTLLVRVMTPDLRERLENLRKKPENIPQPISNTSRANLNKLLTDYTEMKKAILHVYWEEFQKDPVGLMSRVAQPASKKIDQNKLKPEMDEKGNLTTAGFACSQCGQPLFVYKLEQVSEKGKAYTNYFGRCNVAEHEKLIKLAQLKPEKDSDEAVTYSLGKFGQRALDFYSIHVTKESTHPVKPLAQIAGNRYASPVGKALSDACMGTIASFLSKYQDIIIEHQKVVKGNQKRLESLRELAGKENLEYPSVTLPPQPHTKEGVDAYNEVIARVRMWVNLNLWQKLKLSRDDAKPLLRLKGFPSFPLVERQANEVDWWDMVCNVKKLINEKKEDGKVFWQNLAGYKRQEALRPYLSSEEDRKKGKKFARYQLGDLLLHLEKKHGEDWGDVYDEAWERIDKKVEGLSKHIKLEEERRSEDAQSKAALTDWLRAKASFVIEGLKEADKDEFCRCELKLQKWYGDLRGKPFAIEAENSILDISGFSKQYNCAFIWQKDGVKKLNLYLIINYFKGGKLRFKKIKPEAFEANRFYTVINKKSGEIVPMEVNFNFDDPNLIILPLAFGKRQGREFIWNDLLSLETGSLKLANGRVIEKTLYNRRTRQDEPALFVALTFERREVLDSSNIKPMNLIGVDRGENIPAVIALTDPEGCPLSRFKDSLGNPTHILRIGESYKEKQRTIQAKKEVEQRRAGGYSRKYASKAKNLADDMVRNTARDLLYYAVTQDAMLIFENLSRGFGRQGKRTFMAERQYTRMEDWLTAKLAYEGLPSKTYLSKTLAQYTSKTCSNCGFTITSADYDRVLEKLKKTATGWMTTINGKELKVEGQITYYNRYKRQNVVKDLSVELDRLSEESVNNDISSWTKGRSGEALSLLKKRFSHRPVQEKFVCLNCGFETHADEQAALNIARSWLFLRSQEYKKYQTNKTTGNTDKRAFVETWQSFYRKKLKEVWKPAV

SEQ ID NO: 42865 - protein, 978 aa, synthetic construct
  REGION 1..978: note = engineered CasX variant
QEIKRINKIRRRLVKDSNTKKAGKTGPMKTLLVRVMTPDLRERLENLRKKPENIPQPISNTSRANLNKLLTDYTEMKKAILHVYWEEFQKDPVGLMSRVAQPASKKIDQNKLKPEMDEKGNLTTAGFACSQCGQPLFVYKLEQVSEKGKAYTNYFGRCNVAEHEKLIKLAQLKPEKDSDEAVTYSLGKFGQRALDFYSIHVTKESTHPVKPLAQIAGNRYASYPVGKALSDACMGTIASFLSKYQDIIIEHQKVVKGNQKRLESLRELAGKENLEYPSVTLPPQPHTKEGVDAYNEVIARVRMWVNLNLWQKLKLSRDDAKPLLRLKGFPSFPLVERQANEVDWWDMVCNVKKLINEKKEDGKVFWQNLAGYKRQEALRPYLSSEEDRKKGKKFARYQLGDLLLHLEKKHGEDWGKVYGEAWERIDKKVEGLSKHIKLEEERRSEDAQSKAALTDWLRAKASFVIEGLKEADKDEFCRCELKLQKWYGDLRGKPFAIEAENSILDISGFSKQYNCAFIWQKDGVKKLNLYLIINYFKGGKLRFKKIKPEAFEANRFYTVINKKSGEIVPMEVNFNFDDPNLIILPLAFGKRQGREFIWNDLLSLETGSLKLANGRVIEKTLYNRRTRQDEPALFVALTFERREVLDSSNIKPMNLIGVDRGENIPAVIALTDPEGCPLSRFKDSLGNPTHILRIGESYKEKQRTIQAKKEVEQRRAGGYSRKYASKAKNLADDMVRNTARDLLYYAVTQDAMLIFENLSRGFGRQGKRTFMAERQYTRMEDWLTAKLAYEGLPSKTYLSKTLAQYTSKTCSNCGFTITSADYDRVLEKLKKTATGWMTTINGKELKVEGQITYYNRYKRQNVVKDLSVELDRLSEESVNNDISSWTKGRSGEALSLLKKRFSHRPVQEKFVCLNCGFETHADEQAALNIARSWLFLRSQEYKKYQTNKTTGNTDKRAFVETWQSFYRKKLKEVWKPAV

SEQ ID NO: 42866 - protein, 978 aa, synthetic construct
  REGION 1..978: note = engineered CasX variant
QEIKRINKIRRRLVKDSNTKKAGKTGPMKTLLVRVMTPDLRERLENLRKKPENIPQPISNTSRANLNKLLTDYTEMKKAILHVYWEEFQKDPVGLMSRVAQPASKKIDQNKLKPEMDEKGNLTTAGFACSQCGQPLFVYKLEQVSEKGKAYTNYFGRCNVAEHEKLIKLAQLKPEKDSDEAVTYSLGKFGQRALDFYSIHVTKESTHPVKPLAQIAGNRYASHPVGKALSDACMGTIASFLSKYQDIIIEHQKVVKGNQKRLESLRELAGKENLEYPSVTLPPQPHTKEGVDAYNEVIARVRMWVNLNLWQKLKLSRDDAKPLLRLKGFPSFPLVERQANEVDWWDMVCNVKKLINEKKEDGKVFWQNLAGYKRQEALRPYLSSEEDRKKGKKFARYQLGDLLLHLEKKHGEDWGKVYGEAWERIDKKVEGLSKHIKLEEERRSEDAQSKAALTDWLRAKASFVIEGLKEADKDEFCRCELKLQKWYGDLRGKPFAIEAENSILDISGFSKQYNCAFIWQKDGVKKLNLYLIINYFKGGKLRFKKIKPEAFEANRFYTVINKKSGEIVPMEVNFNFDDPNLIILPLAFGKRQGREFIWNDLLSLETGSLKLANGRVIEKTLYNRRTRQDEPALFVALTFERREVLDSSNIKPMNLIGVDRGENIPAVIALTDPEGCPLSRFKDSLGNPTHILRIGESYKEKQRTIQAKKEVEQRRAGGYSRKYASKAKNLADDMVRNTARDLLYYAVTQDAMLIFENLSRGFGRQGKRTFMAERQYTRMEDWLTAKLAYEGLPSKTYLSKTLAQYTSKTCSNCGFTITSADYDRVLEKLKKTATGWMTTINGKELKVEGQITYYNRYKRQNVVKDLSVELDRLSEESVNNDISSWTKGRSGEALSLLKKRFSHRPVQEKFVCLNCGFETHADEQAALNIARSWLFLRSQEYKKYQTNKTTGNTDKRAFVETWQSFYRKKLKEVWKPAV

SEQ ID NO: 42867 - protein, 978 aa, synthetic construct
  REGION 1..978: note = engineered CasX variant
QEIKRINKIRRRLVKDSNTKKAGKTGPMKTLLVRVMTPDLRERLENLRKKPENIPQPISNTSRANLNKLLTDYTEMKKAILHVYWEEFQKDPVGLMSRVAQPASKKIDQNKLKPEMDEKGNLTTAGFACSQCGQPLFVYKLEQVSEKGKAYTNYFGRCNVAEHEKLIKLAQLKPEKDSDEAVTYSLGKFGQRALDFYSIHVTKESTHPVKPLAQIAGNRYASTPVGKALSDACMGTIASFLSKYQDIIIEHQKVVKGNQKRLESLRELAGKENLEYPSVTLPPQPHTKEGVDAYNEVIARVRMWVNLNLWQKLKLSRDDAKPLLRLKGFPSFPLVERQANEVDWWDMVCNVKKLINEKKEDGKVFWQNLAGYKRQEALRPYLSSEEDRKKGKKFARYQLGDLLLHLEKKHGEDWGKVYGEAWERIDKKVEGLSKHIKLEEERRSEDAQSKAALTDWLRAKASFVIEGLKEADKDEFCRCELKLQKWYGDLRGKPFAIEAENSILDISGFSKQYNCAFIWQKDGVKKLNLYLIINYFKGGKLRFKKIKPEAFEANRFYTVINKKSGEIVPMEVNFNFDDPNLIILPLAFGKRQGREFIWNDLLSLETGSLKLANGRVIEKTLYNRRTRQDEPALFVALTFERREVLDSSNIKPMNLIGVDRGENIPAVIALTDPEGCPLSRFKDSLGNPTHILRIGESYKEKQRTIQAKKEVEQRRAGGYSRKYASKAKNLADDMVRNTARDLLYYAVTQDAMLIFENLSRGFGRQGKRTFMAERQYTRMEDWLTAKLAYEGLPSKTYLSKTLAQYTSKTCSNCGFTITSADYDRVLEKLKKTATGWMTTINGKELKVEGQITYYNRYKRQNVVKDLSVELDRLSEESVNNDISSWTKGRSGEALSLLKKRFSHRPVQEKFVCLNCGFETHADEQAALNIARSWLFLRSQEYKKYQTNKTTGNTDKRAFVETWQSFYRKKLKEVWKPAV

SEQ ID NO: 42868 - protein, 978 aa, synthetic construct
  REGION 1..978: note = engineered CasX variant
QEIKRINKIRRRLVKDSNTKKAGKTGPMKTLLVRVMTPDLRERLENLRKKPENIPQPISNTSRANLNKLLTDYTEMKKAILHVYWEEFQKDPVGLMSRVAQPASKKIDQNKLKPEMDEKGNLTTAGFACSQCGQPLFVYKLEQVSEKGKAYTNYFGRCNVAEHEKLIKLAQLKPEKDSDEAVTYSLGKFGQRALDFYSIHVTKESTHPVKPLAQIAGNRYASAPVGKALSDACMGTIASFLSKYQDIIIEHQKVVKGNQKRLESLRELAGKENLEYPSVTLPPQPHTKEGVDAYNEVIARVRMWVNLNLWQKLKLSRDDAKPLLRLKGFPSFPLVERQANEVDWWDMVCNVKKLINEKKEDGKVFWQNLAGYKRQEALRPYLSSEEDRKKGKKFARYQLGDLLLHLEKKHGEDWGKVYGEAWERIDKKVEGLSKHIKLEEERRSEDAQSKAALTDWLRAKASFVIEGLKEADKDEFCRCELKLQKWYGDLRGKPFAIEAENSILDISGFSKQYNCAFIWQKDGVKKLNLYLIINYFKGGKLRFKKIKPEAFEANRFYTVINKKSGEIVPMEVNFNFDDPNLIILPLAFGKRQGREFIWNDLLSLETGSLKLANGRVIEKTLYNRRTRQDEPALFVALTFERREVLDSSNIKPMNLIGVDRGENIPAVIALTDPEGCPLSRFKDSLGNPTHILRIGESYKEKQRTIQAKKEVEQRRAGGYSRKYASKAKNLADDMVRNTARDLLYYAVTQDAMLIFENLSRGFGRQGKRTFMAERQYTRMEDWLTAKLAYEGLPSKTYLSKTLAQYTSKTCSNCGFTITSADYDRVLEKLKKTATGWMTTINGKELKVEGQITYYNRYKRQNVVKDLSVELDRLSEESVNNDISSWTKGRSGEALSLLKKRFSHRPVQEKFVCLNCGFETHADEQAALNIARSWLFLRSQEYKKYQTNKTTGNTDKRAFVETWQSFYRKKLKEVWKPAV

SEQ ID NO: 42869 - protein, 978 aa, synthetic construct
  REGION 1..978: note = engineered CasX variant
QEIKRINKIRRRLVKDSNTKKAGKTGPMKTLLVRVMTPDLRERLENLRKKPENIPQPISNTSRANLNKLLTDYTEMKKAILHVYWEEFQKDPVGLMSRVAQPASKKIDQNKLKPEMDEKGNLTTAGFACSQCGQPLFVYKLEQVSEKGKAYTNYFGRCNVAEHEKLIKLAQLKPEKDSDEAVTYSLGKFGQRALDFYSIHVTKESTHPVKPLAQIAGNRYASVPVGKALSDACMGTIASFLSKYQDIIIEHQKVVKGNQKRLESLRELAGKENLEYPSVTLPPQPHTKEGVDAYNEVIARVRMWVNLNLWQKLKLSRDDAKPLLRLKGFPSFPLVERQANEVDWWDMVCNVKKLINEKKEDGKVFWQNLAGYKRQEALRPYLSSEEDRKKGKKFARYQLGDLLLHLEKKHGEDWGKVYGEAWERIDKKVEGLSKHIKLEEERRSEDAQSKAALTDWLRAKASFVIEGLKEADKDEFCRCELKLQKWYGDLRGKPFAIEAENSILDISGFSKQYNCAFIWQKDGVKKLNLYLIINYFKGGKLRFKKIKPEAFEANRFYTVINKKSGEIVPMEVNFNFDDPNLIILPLAFGKRQGREFIWNDLLSLETGSLKLANGRVIEKTLYNRRTRQDEPALFVALTFERREVLDSSNIKPMNLIGVDRGENIPAVIALTDPEGCPLSRFKDSLGNPTHILRIGESYKEKQRTIQAKKEVEQRRAGGYSRKYASKAKNLADDMVRNTARDLLYYAVTQDAMLIFENLSRGFGRQGKRTFMAERQYTRMEDWLTAKLAYEGLPSKTYLSKTLAQYTSKTCSNCGFTITSADYDRVLEKLKKTATGWMTTINGKELKVEGQITYYNRYKRQNVVKDLSVELDRLSEESVNNDISSWTKGRSGEALSLLKKRFSHRPVQEKFVCLNCGFETHADEQAALNIARSWLFLRSQEYKKYQTNKTTGNTDKRAFVETWQSFYRKKLKEVWKPAV

SEQ ID NO: 42870 - protein, 979 aa, synthetic construct
  REGION 1..979: note = engineered CasX variant
QEIKRINKIRRRLVKDSNTKKAGKTGPMKTLLVRVMTPDLRERLENLRKKPENIPQPISNTSRANLNKLLTDYTEMKKAILHVYWEEFQKDPVGLMSRVAQPASKKIDQNKLKPEMDEKGNLTTAGFACSQCGQPLFVYKLEQVSEKGKAYTNYFGRCNVAEHEKLIKKLAQLKPEKDSDEAVTYSLGKFGQRALDFYSIHVTKESTHPVKPLAQIAGNRYASGPVGKALSDACMGTIASFLSKYQDIIIEHQKVVKGNQKRLESLRELAGKENLEYPSVTLPPQPHTKEGVDAYNEVIARVRMWVNLNLWQKLKLSRDDAKPLLRLKGFPSFPLVERQANEVDWWDMVCNVKKLINEKKEDGKVFWQNLAGYKRQEALRPYLSSEEDRKKGKKFARYQLGDLLLHLEKKHGEDWGKVYGEAWERIDKKVEGLSKHIKLEEERRSEDAQSKAALTDWLRAKASFVIEGLKEADKDEFCRCELKLQKWYGDLRGKPFAIEAENSILDISGFSKQYNCAFIWQKDGVKKLNLYLIINYFKGGKLRFKKIKPEAFEANRFYTVINKKSGEIVPMEVNFNFDDPNLIILPLAFGKRQGREFIWNDLLSLETGSLKLANGRVIEKTLYNRRTRQDEPALFVALTFERREVLDSSNIKPMNLIGVDRGENIPAVIALTDPEGCPLSRFKDSLGNPTHILRIGESYKEKQRTIQAKKEVEQRRAGGYSRKYASKAKNLADDMVRNTARDLLYYAVTQDAMLIFENLSRGFGRQGKRTFMAERQYTRMEDWLTAKLAYEGLPSKTYLSKTLAQYTSKTCSNCGFTITSADYDRVLEKLKKTATGWMTTINGKELKVEGQITYYNRYKRQNVVKDLSVELDRLSEESVNNDISSWTKGRSGEALSLLKKRFSHRPVQEKFVCLNCGFETHADEQAALNIARSWLFLRSQEYKKYQTNKTTGNTDKRAFVETWQSFYRKKLKEVWKPAV

SEQ ID NO: 42871 - protein, 977 aa, synthetic construct
  REGION 1..977: note = engineered CasX variant
QEIKRINKIRRRLVKDSNTKKAGKTGPMKTLLVRVMTPDLRERLENLRKKPENIPQPISNTSRANLNKLLTDYTEMKKAILHVYWEEFQKDPVGLMSRVAQPASKKIDQNKLKPEMDEKGNLTTAGFACSQCGQPLFVYKLEQVSEKGKAYTNYFGRCNVAEHEKLIKLAQLKPEKDSDEAVTYSLGKFGQRALDFYSIHVTKESTHPVKPLAQIAGNRYASPVGKALSDACMGTIASFLSKYQDIIIEHQKVVKGNQKRLESLRELAGKENLEYPSVTLPPQPHTKEGVDAYNEVIARVRMWVNLNLWQKLKLSRDDAKPLLRLKGFPSFPLVERQANEVDWWDMVCNVKKLINEKKEDGKVFWQNLAGYKRQEALRPYLSSEEDRKKGKKFARYQLGDLLLHLEKKHGEDWGKVYGEAWERIDKKVEGLSKHIKLEEERRSEDAQSKAALTDWLRAKASFVIEGLKEADKDEFCRCELKLQKWYGDLRGKPFAIEAENSILDISGFSKQYNCAFIWQKDGVKKLNLYLIINYFKGGKLRFKKIKPEAFEANRFYTVINKKSGEIVPMEVNFNFDDPNLIILPLAFGKRQGREFIWNDLLSLETGSLKLANGRVIEKTLYNRRTRQDEPALFVALTFERREVLDSSNIKPMNLIGVDRGENIPAVIALTDPEGCPLSRFKDSLGNPTHILRIGESYKEKQRTIQAKKEVEQRRAGGYSRKYASKAKNLADDMVRNTARDLLYYAVTQDAMLIFENLSRGFGRQGKRTFMAERQYTRMEDWLTAKLAYEGLPSKTYLSKTLAQYTSKTCSNCGFTITSADYDRVLEKLKKTATGWMTTINGKELKVEGQITYYNRYKRQNVVKDLSVELDRLSEESVNNDISSWTKGRSGEALSLLKKRFSHRPVQEKFVCLNCGFETHADEQAALNIARSWLFLRSQEYKKYQTNKTTGNTDKRAFVETWQSFYRKKLKEVWKPAV

SEQ ID NO: 42872 - protein, 978 aa, synthetic construct
  REGION 1..978: note = engineered CasX variant
QEIKRINKIRRRLVKDSNTKKAGKTGPMKTLLVRVMTPDLRERLENLRKKPENIPQPISNTSRANLNKLLTDYTEMKKAILHVYWEEFQKDPVGLMSRVAQPASKKIDQNKLKPEMDEKGNLTTAGFACSQCGQPLFVYKLEQVSEKGKAYTNYFGRCNVAEHEKLIKLAQLKPEKDSDEAVTYSLGKFGQRALDFYSIHVTKESTHPVKPLAQIAGNRYASYPVGKALSDACMGTIASFLSKYQDIIIEHQKVVKGNQKRLESLRELAGKENLEYPSVTLPPQPHTKEGVDAYNEVIARVRMWVNLNLWQKLKLSRDDAKPLLRLKGFPSFPLVERQANEVDWWDMVCNVKKLINEKKEDGKVFWQNLAGYKRQEALRPYLSSEEDRKKGKKFARYQLGDLLLHLEKKHGEDWGKVYDEAWERIDKKVEGLSKHIKLEEERRSEDAQSKAALTDWLRAKASFVIEGKKEADKDEFCRCELKLQKWYGDLRGKPFAIEAENSILDISGFSKQYNCAFIWQKDGVKKLNLYLIINYFKGGKLRFKKIKPEAFEANRFYTVINKKSGEIVPMEVNFNFDDPNLIILPLAFGKRQGREFIWNDLLSLETGSLKLANGRVIEKTLYNRRTRQDEPALFVALTFERREVLDSSNIKPMNLIGVDRGENIPAVIALTDPEGCPLSRFKDSLGNPTHILRIGESYKEKQRTIQAKKEVEQRRAGGYSRKYASKAKNLADDMVRNTARDLLYYAVTQDAMLIFENLSRGFGRQGKRTFMAERQYTRMEDWLTAKLAYEGLPSKTYLSKTLAQYTSKTCSNCGFTITSADYDRVLEKLKKTATGWMTTINGKELKVEGQITYYNRYKRQNVVKDLSVELDRLSEESVNNDISSWTKGRSGEALSLLKKRFSHRPVQEKFVCLNCGFETHADEQAALNIARSWLFLRSQEYKKYQTNKTTGNTDKRAFVETWQSFYRKKLKEVWKPAV

SEQ ID NO: 42873 - protein, 978 aa, synthetic construct
  REGION 1..978: note = engineered CasX variant
QEIKRINKIRRRLVKDSNTKKAGKTGPMKTLLVRVMTPDLRERLENLRKKPENIPQPISNTSRANLNKLLTDYTEMKKAILHVYWEEFQKDPVGLMSRVAQPASKKIDQNKLKPEMDEKGNLTTAGFACSQCGQPLFVYKLEQVSEKGKAYTNYFGRCNVAEHEKLIKLAQLKPEKDSDEAVTYSLGKFGQRALDFYSIHVTKESTHPVKPLAQIAGNRYASHPVGKALSDACMGTIASFLSKYQDIIIEHQKVVKGNQKRLESLRELAGKENLEYPSVTLPPQPHTKEGVDAYNEVIARVRMWVNLNLWQKLKLSRDDAKPLLRLKGFPSFPLVERQANEVDWWDMVCNVKKLINEKKEDGKVFWQNLAGYKRQEALRPYLSSEEDRKKGKKFARYQLGDLLLHLEKKHGEDWGKVYDEAWERIDKKVEGLSKHIKLEEERRSEDAQSKAALTDWLRAKASFVIEGKKEADKDEFCRCELKLQKWYGDLRGKPFAIEAENSILDISGFSKQYNCAFIWQKDGVKKLNLYLIINYFKGGKLRFKKIKPEAFEANRFYTVINKKSGEIVPMEVNFNFDDPNLIILPLAFGKRQGREFIWNDLLSLETGSLKLANGRVIEKTLYNRRTRQDEPALFVALTFERREVLDSSNIKPMNLIGVDRGENIPAVIALTDPEGCPLSRFKDSLGNPTHILRIGESYKEKQRTIQAKKEVEQRRAGGYSRKYASKAKNLADDMVRNTARDLLYYAVTQDAMLIFENLSRGFGRQGKRTFMAERQYTRMEDWLTAKLAYEGLPSKTYLSKTLAQYTSKTCSNCGFTITSADYDRVLEKLKKTATGWMTTINGKELKVEGQITYYNRYKRQNVVKDLSVELDRLSEESVNNDISSWTKGRSGEALSLLKKRFSHRPVQEKFVCLNCGFETHADEQAALNIARSWLFLRSQEYKKYQTNKTTGNTDKRAFVETWQSFYRKKLKEVWKPAV

SEQ ID NO: 42874 - protein, 978 aa, synthetic construct
  REGION 1..978: note = engineered CasX variant
QEIKRINKIRRRLVKDSNTKKAGKTGPMKTLLVRVMTPDLRERLENLRKKPENIPQPISNTSRANLNKLLTDYTEMKKAILHVYWEEFQKDPVGLMSRVAQPASKKIDQNKLKPEMDEKGNLTTAGFACSQCGQPLFVYKLEQVSEKGKAYTNYFGRCNVAEHEKLIKLAQLKPEKDSDEAVTYSLGKFGQRALDFYSIHVTKESTHPVKPLAQIAGNRYASTPVGKALSDACMGTIASFLSKYQDIIIEHQKVVKGNQKRLESLRELAGKENLEYPSVTLPPQPHTKEGVDAYNEVIARVRMWVNLNLWQKLKLSRDDAKPLLRLKGFPSFPLVERQANEVDWWDMVCNVKKLINEKKEDGKVFWQNLAGYKRQEALRPYLSSEEDRKKGKKFARYQLGDLLLHLEKKHGEDWGKVYDEAWERIDKKVEGLSKHIKLEEERRSEDAQSKAALTDWLRAKASFVIEGKKEADKDEFCRCELKLQKWYGDLRGKPFAIEAENSILDISGFSKQYNCAFIWQKDGVKKLNLYLIINYFKGGKLRFKKIKPEAFEANRFYTVINKKSGEIVPMEVNFNFDDPNLIILPLAFGKRQGREFIWNDLLSLETGSLKLANGRVIEKTLYNRRTRQDEPALFVALTFERREVLDSSNIKPMNLIGVDRGENIPAVIALTDPEGCPLSRFKDSLGNPTHILRIGESYKEKQRTIQAKKEVEQRRAGGYSRKYASKAKNLADDMVRNTARDLLYYAVTQDAMLIFENLSRGFGRQGKRTFMAERQYTRMEDWLTAKLAYEGLPSKTYLSKTLAQYTSKTCSNCGFTITSADYDRVLEKLKKTATGWMTTINGKELKVEGQITYYNRYKRQNVVKDLSVELDRLSEESVNNDISSWTKGRSGEALSLLKKRFSHRPVQEKFVCLNCGFETHADEQAALNIARSWLFLRSQEYKKYQTNKTTGNTDKRAFVETWQSFYRKKLKEVWKPAV

SEQ ID NO: 42875 - protein, 978 aa, synthetic construct
  REGION 1..978: note = engineered CasX variant
QEIKRINKIRRRLVKDSNTKKAGKTGPMKTLLVRVMTPDLRERLENLRKKPENIPQPISNTSRANLNKLLTDYTEMKKAILHVYWEEFQKDPVGLMSRVAQPASKKIDQNKLKPEMDEKGNLTTAGFACSQCGQPLFVYKLEQVSEKGKAYTNYFGRCNVAEHEKLIKLAQLKPEKDSDEAVTYSLGKFGQRALDFYSIHVTKESTHPVKPLAQIAGNRYASAPVGKALSDACMGTIASFLSKYQDIIIEHQKVVKGNQKRLESLRELAGKENLEYPSVTLPPQPHTKEGVDAYNEVIARVRMWVNLNLWQKLKLSRDDAKPLLRLKGFPSFPLVERQANEVDWWDMVCNVKKLINEKKEDGKVFWQNLAGYKRQEALRPYLSSEEDRKKGKKFARYQLGDLLLHLEKKHGEDWGKVYDEAWERIDKKVEGLSKHIKLEEERRSEDAQSKAALTDWLRAKASFVIEGKKEADKDEFCRCELKLQKWYGDLRGKPFAIEAENSILDISGFSKQYNCAFIWQKDGVKKLNLYLIINYFKGGKLRFKKIKPEAFEANRFYTVINKKSGEIVPMEVNFNFDDPNLIILPLAFGKRQGREFIWNDLLSLETGSLKLANGRVIEKTLYNRRTRQDEPALFVALTFERREVLDSSNIKPMNLIGVDRGENIPAVIALTDPEGCPLSRFKDSLGNPTHILRIGESYKEKQRTIQAKKEVEQRRAGGYSRKYASKAKNLADDMVRNTARDLLYYAVTQDAMLIFENLSRGFGRQGKRTFMAERQYTRMEDWLTAKLAYEGLPSKTYLSKTLAQYTSKTCSNCGFTITSADYDRVLEKLKKTATGWMTTINGKELKVEGQITYYNRYKRQNVVKDLSVELDRLSEESVNNDISSWTKGRSGEALSLLKKRFSHRPVQEKFVCLNCGFETHADEQAALNIARSWLFLRSQEYKKYQTNKTTGNTDKRAFVETWQSFYRKKLKEVWKPAV

SEQ ID NO: 42876 - protein, 978 aa, synthetic construct
  REGION 1..978: note = engineered CasX variant
QEIKRINKIRRRLVKDSNTKKAGKTGPMKTLLVRVMTPDLRERLENLRKKPENIPQPISNTSRANLNKLLTDYTEMKKAILHVYWEEFQKDPVGLMSRVAQPASKKIDQNKLKPEMDEKGNLTTAGFACSQCGQPLFVYKLEQVSEKGKAYTNYFGRCNVAEHEKLIKLAQLKPEKDSDEAVTYSLGKFGQRALDFYSIHVTKESTHPVKPLAQIAGNRYASVPVGKALSDACMGTIASFLSKYQDIIIEHQKVVKGNQKRLESLRELAGKENLEYPSVTLPPQPHTKEGVDAYNEVIARVRMWVNLNLWQKLKLSRDDAKPLLRLKGFPSFPLVERQANEVDWWDMVCNVKKLINEKKEDGKVFWQNLAGYKRQEALRPYLSSEEDRKKGKKFARYQLGDLLLHLEKKHGEDWGKVYDEAWERIDKKVEGLSKHIKLEEERRSEDAQSKAALTDWLRAKASFVIEGKKEADKDEFCRCELKLQKWYGDLRGKPFAIEAENSILDISGFSKQYNCAFIWQKDGVKKLNLYLIINYFKGGKLRFKKIKPEAFEANRFYTVINKKSGEIVPMEVNFNFDDPNLIILPLAFGKRQGREFIWNDLLSLETGSLKLANGRVIEKTLYNRRTRQDEPALFVALTFERREVLDSSNIKPMNLIGVDRGENIPAVIALTDPEGCPLSRFKDSLGNPTHILRIGESYKEKQRTIQAKKEVEQRRAGGYSRKYASKAKNLADDMVRNTARDLLYYAVTQDAMLIFENLSRGFGRQGKRTFMAERQYTRMEDWLTAKLAYEGLPSKTYLSKTLAQYTSKTCSNCGFTITSADYDRVLEKLKKTATGWMTTINGKELKVEGQITYYNRYKRQNVVKDLSVELDRLSEESVNNDISSWTKGRSGEALSLLKKRFSHRPVQEKFVCLNCGFETHADEQAALNIARSWLFLRSQEYKKYQTNKTTGNTDKRAFVETWQSFYRKKLKEVWKPAV

SEQ ID NO: 42877 - protein, 979 aa, synthetic construct
  REGION 1..979: note = engineered CasX variant
QEIKRINKIRRRLVKDSNTKKAGKTGPMKTLLVRVMTPDLRERLENLRKKPENIPQPISNTSRANLNKLLTDYTEMKKAILHVYWEEFQKDPVGLMSRVAQPASKKIDQNKLKPEMDEKGNLTTAGFACSQCGQPLFVYKLEQVSEKGKAYTNYFGRCNVAEHEKLIKKLAQLKPEKDSDEAVTYSLGKFGQRALDFYSIHVTKESTHPVKPLAQIAGNRYASGPVGKALSDACMGTIASFLSKYQDIIIEHQKVVKGNQKRLESLRELAGKENLEYPSVTLPPQPHTKEGVDAYNEVIARVRMWVNLNLWQKLKLSRDDAKPLLRLKGFPSFPLVERQANEVDWWDMVCNVKKLINEKKEDGKVFWQNLAGYKRQEALRPYLSSEEDRKKGKKFARYQLGDLLLHLEKKHGEDWGKVYDEAWERIDKKVEGLSKHIKLEEERRSEDAQSKAALTDWLRAKASFVIEGKKEADKDEFCRCELKLQKWYGDLRGKPFAIEAENSILDISGFSKQYNCAFIWQKDGVKKLNLYLIINYFKGGKLRFKKIKPEAFEANRFYTVINKKSGEIVPMEVNFNFDDPNLIILPLAFGKRQGREFIWNDLLSLETGSLKLANGRVIEKTLYNRRTRQDEPALFVALTFERREVLDSSNIKPMNLIGVDRGENIPAVIALTDPEGCPLSRFKDSLGNPTHILRIGESYKEKQRTIQAKKEVEQRRAGGYSRKYASKAKNLADDMVRNTARDLLYYAVTQDAMLIFENLSRGFGRQGKRTFMAERQYTRMEDWLTAKLAYEGLPSKTYLSKTLAQYTSKTCSNCGFTITSADYDRVLEKLKKTATGWMTTINGKELKVEGQITYYNRYKRQNVVKDLSVELDRLSEESVNNDISSWTKGRSGEALSLLKKRFSHRPVQEKFVCLNCGFETHADEQAALNIARSWLFLRSQEYKKYQTNKTTGNTDKRAFVETWQSFYRKKLKEVWKPAV

SEQ ID NO: 42878 - protein, 977 aa, synthetic construct
  REGION 1..977: note = engineered CasX variant
QEIKRINKIRRRLVKDSNTKKAGKTGPMKTLLVRVMTPDLRERLENLRKKPENIPQPISNTSRANLNKLLTDYTEMKKAILHVYWEEFQKDPVGLMSRVAQPASKKIDQNKLKPEMDEKGNLTTAGFACSQCGQPLFVYKLEQVSEKGKAYTNYFGRCNVAEHEKLIKLAQLKPEKDSDEAVTYSLGKFGQRALDFYSIHVTKESTHPVKPLAQIAGNRYASPVGKALSDACMGTIASFLSKYQDIIIEHQKVVKGNQKRLESLRELAGKENLEYPSVTLPPQPHTKEGVDAYNEVIARVRMWVNLNLWQKLKLSRDDAKPLLRLKGFPSFPLVERQANEVDWWDMVCNVKKLINEKKEDGKVFWQNLAGYKRQEALRPYLSSEEDRKKGKKFARYQLGDLLLHLEKKHGEDWGKVYDEAWERIDKKVEGLSKHIKLEEERRSEDAQSKAALTDWLRAKASFVIEGKKEADKDEFCRCELKLQKWYGDLRGKPFAIEAENSILDISGFSKQYNCAFIWQKDGVKKLNLYLIINYFKGGKLRFKKIKPEAFEANRFYTVINKKSGEIVPMEVNFNFDDPNLIILPLAFGKRQGREFIWNDLLSLETGSLKLANGRVIEKTLYNRRTRQDEPALFVALTFERREVLDSSNIKPMNLIGVDRGENIPAVIALTDPEGCPLSRFKDSLGNPTHILRIGESYKEKQRTIQAKKEVEQRRAGGYSRKYASKAKNLADDMVRNTARDLLYYAVTQDAMLIFENLSRGFGRQGKRTFMAERQYTRMEDWLTAKLAYEGLPSKTYLSKTLAQYTSKTCSNCGFTITSADYDRVLEKLKKTATGWMTTINGKELKVEGQITYYNRYKRQNVVKDLSVELDRLSEESVNNDISSWTKGRSGEALSLLKKRFSHRPVQEKFVCLNCGFETHADEQAALNIARSWLFLRSQEYKKYQTNKTTGNTDKRAFVETWQSFYRKKLKEVWKPAV

SEQ ID NO: 42879 - protein, 978 aa, synthetic construct
  REGION 1..978: note = engineered CasX variant
QEIKRINKIRRRLVKDSNTKKAGKTGPMKTLLVRVMTPDLRERLENLRKKPENIPQPISNTSRANLNKLLTDYTEMKKAILHVYWEEFQKDPVGLMSRVAQPASKKIDQNKLKPEMDEKGNLTTAGFACSQCGQPLFVYKLEQVSEKGKAYTNYFGRCNVAEHEKLIKLAQLKPEKDSDEAVTYSLGKFGQRALDFYSIHVTKESTHPVKPLAQIAGNRYASYPVGKALSDACMGTIASFLSKYQDIIIEHQKVVKGNQKRLESLRELAGKENLEYPSVTLPPQPHTKEGVDAYNEVIARVRMWVNLNLWQKLKLSRDDAKPLLRLKGFPSFPLVERQANEVDWWDMVCNVKKLINEKKEDGKVFWQNLAGYKRQEALRPYLSSEEDRKKGKKFARYQLGDLLLHLEKKHGEDWGKVYDEAWERIDKKVEGLSKHIKLEEERRSEDAQSKAALTDWLRAKASFVIEGSKEADKDEFCRCELKLQKWYGDLRGKPFAIEAENSILDISGFSKQYNCAFIWQKDGVKKLNLYLIINYFKGGKLRFKKIKPEAFEANRFYTVINKKSGEIVPMEVNFNFDDPNLIILPLAFGKRQGREFIWNDLLSLETGSLKLANGRVIEKTLYNRRTRQDEPALFVALTFERREVLDSSNIKPMNLIGVDRGENIPAVIALTDPEGCPLSRFKDSLGNPTHILRIGESYKEKQRTIQAKKEVEQRRAGGYSRKYASKAKNLADDMVRNTARDLLYYAVTQDAMLIFENLSRGFGRQGKRTFMAERQYTRMEDWLTAKLAYEGLPSKTYLSKTLAQYTSKTCSNCGFTITSADYDRVLEKLKKTATGWMTTINGKELKVEGQITYYNRYKRQNVVKDLSVELDRLSEESVNNDISSWTKGRSGEALSLLKKRFSHRPVQEKFVCLNCGFETHADEQAALNIARSWLFLRSQEYKKYQTNKTTGNTDKRAFVETWQSFYRKKLKEVWKPAV

SEQ ID NO: 42880 - protein, 978 aa, synthetic construct
  REGION 1..978: note = engineered CasX variant
QEIKRINKIRRRLVKDSNTKKAGKTGPMKTLLVRVMTPDLRERLENLRKKPENIPQPISNTSRANLNKLLTDYTEMKKAILHVYWEEFQKDPVGLMSRVAQPASKKIDQNKLKPEMDEKGNLTTAGFACSQCGQPLFVYKLEQVSEKGKAYTNYFGRCNVAEHEKLIKLAQLKPEKDSDEAVTYSLGKFGQRALDFYSIHVTKESTHPVKPLAQIAGNRYASHPVGKALSDACMGTIASFLSKYQDIIIEHQKVVKGNQKRLESLRELAGKENLEYPSVTLPPQPHTKEGVDAYNEVIARVRMWVNLNLWQKLKLSRDDAKPLLRLKGFPSFPLVERQANEVDWWDMVCNVKKLINEKKEDGKVFWQNLAGYKRQEALRPYLSSEEDRKKGKKFARYQLGDLLLHLEKKHGEDWGKVYDEAWERIDKKVEGLSKHIKLEEERRSEDAQSKAALTDWLRAKASFVIEGSKEADKDEFCRCELKLQKWYGDLRGKPFAIEAENSILDISGFSKQYNCAFIWQKDGVKKLNLYLIINYFKGGKLRFKKIKPEAFEANRFYTVINKKSGEIVPMEVNFNFDDPNLIILPLAFGKRQGREFIWNDLLSLETGSLKLANGRVIEKTLYNRRTRQDEPALFVALTFERREVLDSSNIKPMNLIGVDRGENIPAVIALTDPEGCPLSRFKDSLGNPTHILRIGESYKEKQRTIQAKKEVEQRRAGGYSRKYASKAKNLADDMVRNTARDLLYYAVTQDAMLIFENLSRGFGRQGKRTFMAERQYTRMEDWLTAKLAYEGLPSKTYLSKTLAQYTSKTCSNCGFTITSADYDRVLEKLKKTATGWMTTINGKELKVEGQITYYNRYKRQNVVKDLSVELDRLSEESVNNDISSWTKGRSGEALSLLKKRFSHRPVQEKFVCLNCGFETHADEQAALNIARSWLFLRSQEYKKYQTNKTTGNTDKRAFVETWQSFYRKKLKEVWKPAV

SEQ ID NO: 42881 - protein, 978 aa, synthetic construct
  REGION 1..978: note = engineered CasX variant
QEIKRINKIRRRLVKDSNTKKAGKTGPMKTLLVRVMTPDLRERLENLRKKPENIPQPISNTSRANLNKLLTDYTEMKKAILHVYWEEFQKDPVGLMSRVAQPASKKIDQNKLKPEMDEKGNLTTAGFACSQCGQPLFVYKLEQVSEKGKAYTNYFGRCNVAEHEKLIKLAQLKPEKDSDEAVTYSLGKFGQRALDFYSIHVTKESTHPVKPLAQIAGNRYASTPVGKALSDACMGTIASFLSKYQDIIIEHQKVVKGNQKRLESLRELAGKENLEYPSVTLPPQPHTKEGVDAYNEVIARVRMWVNLNLWQKLKLSRDDAKPLLRLKGFPSFPLVERQANEVDWWDMVCNVKKLINEKKEDGKVFWQNLAGYKRQEALRPYLSSEEDRKKGKKFARYQLGDLLLHLEKKHGEDWGKVYDEAWERIDKKVEGLSKHIKLEEERRSEDAQSKAALTDWLRAKASFVIEGSKEADKDEFCRCELKLQKWYGDLRGKPFAIEAENSILDISGFSKQYNCAFIWQKDGVKKLNLYLIINYFKGGKLRFKKIKPEAFEANRFYTVINKKSGEIVPMEVNFNFDDPNLIILPLAFGKRQGREFIWNDLLSLETGSLKLANGRVIEKTLYNRRTRQDEPALFVALTFERREVLDSSNIKPMNLIGVDRGENIPAVIALTDPEGCPLSRFKDSLGNPTHILRIGESYKEKQRTIQAKKEVEQRRAGGYSRKYASKAKNLADDMVRNTARDLLYYAVTQDAMLIFENLSRGFGRQGKRTFMAERQYTRMEDWLTAKLAYEGLPSKTYLSKTLAQYTSKTCSNCGFTITSADYDRVLEKLKKTATGWMTTINGKELKVEGQITYYNRYKRQNVVKDLSVELDRLSEESVNNDISSWTKGRSGEALSLLKKRFSHRPVQEKFVCLNCGFETHADEQAALNIARSWLFLRSQEYKKYQTNKTTGNTDKRAFVETWQSFYRKKLKEVWKPAV

SEQ ID NO: 42882 - protein, 978 aa, synthetic construct
  REGION 1..978: note = engineered CasX variant
QEIKRINKIRRRLVKDSNTKKAGKTGPMKTLLVRVMTPDLRERLENLRKKPENIPQPISNTSRANLNKLLTDYTEMKKAILHVYWEEFQKDPVGLMSRVAQPASKKIDQNKLKPEMDEKGNLTTAGFACSQCGQPLFVYKLEQVSEKGKAYTNYFGRCNVAEHEKLIKLAQLKPEKDSDEAVTYSLGKFGQRALDFYSIHVTKESTHPVKPLAQIAGNRYASAPVGKALSDACMGTIASFLSKYQDIIIEHQKVVKGNQKRLESLRELAGKENLEYPSVTLPPQPHTKEGVDAYNEVIARVRMWVNLNLWQKLKLSRDDAKPLLRLKGFPSFPLVERQANEVDWWDMVCNVKKLINEKKEDGKVFWQNLAGYKRQEALRPYLSSEEDRKKGKKFARYQLGDLLLHLEKKHGEDWGKVYDEAWERIDKKVEGLSKHIKLEEERRSEDAQSKAALTDWLRAKASFVIEGSKEADKDEFCRCELKLQKWYGDLRGKPFAIEAENSILDISGFSKQYNCAFIWQKDGVKKLNLYLIINYFKGGKLRFKKIKPEAFEANRFYTVINKKSGEIVPMEVNFNFDDPNLIILPLAFGKRQGREFIWNDLLSLETGSLKLANGRVIEKTLYNRRTRQDEPALFVALTFERREVLDSSNIKPMNLIGVDRGENIPAVIALTDPEGCPLSRFKDSLGNPTHILRIGESYKEKQRTIQAKKEVEQRRAGGYSRKYASKAKNLADDMVRNTARDLLYYAVTQDAMLIFENLSRGFGRQGKRTFMAERQYTRMEDWLTAKLAYEGLPSKTYLSKTLAQYTSKTCSNCGFTITSADYDRVLEKLKKTATGWMTTINGKELKVEGQITYYNRYKRQNVVKDLSVELDRLSEESVNNDISSWTKGRSGEALSLLKKRFSHRPVQEKFVCLNCGFETHADEQAALNIARSWLFLRSQEYKKYQTNKTTGNTDKRAFVETWQSFYRKKLKEVWKPAV

SEQ ID NO: 42883 - protein, 978 aa, synthetic construct
  REGION 1..978: note = engineered CasX variant
QEIKRINKIRRRLVKDSNTKKAGKTGPMKTLLVRVMTPDLRERLENLRKKPENIPQPISNTSRANLNKLLTDYTEMKKAILHVYWEEFQKDPVGLMSRVAQPASKKIDQNKLKPEMDEKGNLTTAGFACSQCGQPLFVYKLEQVSEKGKAYTNYFGRCNVAEHEKLIKLAQLKPEKDSDEAVTYSLGKFGQRALDFYSIHVTKESTHPVKPLAQIAGNRYASVPVGKALSDACMGTIASFLSKYQDIIIEHQKVVKGNQKRLESLRELAGKENLEYPSVTLPPQPHTKEGVDAYNEVIARVRMWVNLNLWQKLKLSRDDAKPLLRLKGFPSFPLVERQANEVDWWDMVCNVKKLINEKKEDGKVFWQNLAGYKRQEALRPYLSSEEDRKKGKKFARYQLGDLLLHLEKKHGEDWGKVYDEAWERIDKKVEGLSKHIKLEEERRSEDAQSKAALTDWLRAKASFVIEGSKEADKDEFCRCELKLQKWYGDLRGKPFAIEAENSILDISGFSKQYNCAFIWQKDGVKKLNLYLIINYFKGGKLRFKKIKPEAFEANRFYTVINKKSGEIVPMEVNFNFDDPNLIILPLAFGKRQGREFIWNDLLSLETGSLKLANGRVIEKTLYNRRTRQDEPALFVALTFERREVLDSSNIKPMNLIGVDRGENIPAVIALTDPEGCPLSRFKDSLGNPTHILRIGESYKEKQRTIQAKKEVEQRRAGGYSRKYASKAKNLADDMVRNTARDLLYYAVTQDAMLIFENLSRGFGRQGKRTFMAERQYTRMEDWLTAKLAYEGLPSKTYLSKTLAQYTSKTCSNCGFTITSADYDRVLEKLKKTATGWMTTINGKELKVEGQITYYNRYKRQNVVKDLSVELDRLSEESVNNDISSWTKGRSGEALSLLKKRFSHRPVQEKFVCLNCGFETHADEQAALNIARSWLFLRSQEYKKYQTNKTTGNTDKRAFVETWQSFYRKKLKEVWKPAV

SEQ ID NO: 42884 - protein, 979 aa, synthetic construct
  REGION 1..979: note = engineered CasX variant
QEIKRINKIRRRLVKDSNTKKAGKTGPMKTLLVRVMTPDLRERLENLRKKPENIPQPISNTSRANLNKLLTDYTEMKKAILHVYWEEFQKDPVGLMSRVAQPASKKIDQNKLKPEMDEKGNLTTAGFACSQCGQPLFVYKLEQVSEKGKAYTNYFGRCNVAEHEKLIKKLAQLKPEKDSDEAVTYSLGKFGQRALDFYSIHVTKESTHPVKPLAQIAGNRYASGPVGKALSDACMGTIASFLSKYQDIIIEHQKVVKGNQKRLESLRELAGKENLEYPSVTLPPQPHTKEGVDAYNEVIARVRMWVNLNLWQKLKLSRDDAKPLLRLKGFPSFPLVERQANEVDWWDMVCNVKKLINEKKEDGKVFWQNLAGYKRQEALRPYLSSEEDRKKGKKFARYQLGDLLLHLEKKHGEDWGKVYDEAWERIDKKVEGLSKHIKLEEERRSEDAQSKAALTDWLRAKASFVIEGSKEADKDEFCRCELKLQKWYGDLRGKPFAIEAENSILDISGFSKQYNCAFIWQKDGVKKLNLYLIINYFKGGKLRFKKIKPEAFEANRFYTVINKKSGEIVPMEVNFNFDDPNLIILPLAFGKRQGREFIWNDLLSLETGSLKLANGRVIEKTLYNRRTRQDEPALFVALTFERREVLDSSNIKPMNLIGVDRGENIPAVIALTDPEGCPLSRFKDSLGNPTHILRIGESYKEKQRTIQAKKEVEQRRAGGYSRKYASKAKNLADDMVRNTARDLLYYAVTQDAMLIFENLSRGFGRQGKRTFMAERQYTRMEDWLTAKLAYEGLPSKTYLSKTLAQYTSKTCSNCGFTITSADYDRVLEKLKKTATGWMTTINGKELKVEGQITYYNRYKRQNVVKDLSVELDRLSEESVNNDISSWTKGRSGEALSLLKKRFSHRPVQEKFVCLNCGFETHADEQAALNIARSWLFLRSQEYKKYQTNKTTGNTDKRAFVETWQSFYRKKLKEVWKPAV

SEQ ID NO: 42885 - protein, 977 aa, synthetic construct
  REGION 1..977: note = engineered CasX variant
QEIKRINKIRRRLVKDSNTKKAGKTGPMKTLLVRVMTPDLRERLENLRKKPENIPQPISNTSRANLNKLLTDYTEMKKAILHVYWEEFQKDPVGLMSRVAQPASKKIDQNKLKPEMDEKGNLTTAGFACSQCGQPLFVYKLEQVSEKGKAYTNYFGRCNVAEHEKLIKLAQLKPEKDSDEAVTYSLGKFGQRALDFYSIHVTKESTHPVKPLAQIAGNRYASPVGKALSDACMGTIASFLSKYQDIIIEHQKVVKGNQKRLESLRELAGKENLEYPSVTLPPQPHTKEGVDAYNEVIARVRMWVNLNLWQKLKLSRDDAKPLLRLKGFPSFPLVERQANEVDWWDMVCNVKKLINEKKEDGKVFWQNLAGYKRQEALRPYLSSEEDRKKGKKFARYQLGDLLLHLEKKHGEDWGKVYDEAWERIDKKVEGLSKHIKLEEERRSEDAQSKAALTDWLRAKASFVIEGSKEADKDEFCRCELKLQKWYGDLRGKPFAIEAENSILDISGFSKQYNCAFIWQKDGVKKLNLYLIINYFKGGKLRFKKIKPEAFEANRFYTVINKKSGEIVPMEVNFNFDDPNLIILPLAFGKRQGREFIWNDLLSLETGSLKLANGRVIEKTLYNRRTRQDEPALFVALTFERREVLDSSNIKPMNLIGVDRGENIPAVIALTDPEGCPLSRFKDSLGNPTHILRIGESYKEKQRTIQAKKEVEQRRAGGYSRKYASKAKNLADDMVRNTARDLLYYAVTQDAMLIFENLSRGFGRQGKRTFMAERQYTRMEDWLTAKLAYEGLPSKTYLSKTLAQYTSKTCSNCGFTITSADYDRVLEKLKKTATGWMTTINGKELKVEGQITYYNRYKRQNVVKDLSVELDRLSEESVNNDISSWTKGRSGEALSLLKKRFSHRPVQEKFVCLNCGFETHADEQAALNIARSWLFLRSQEYKKYQTNKTTGNTDKRAFVETWQSFYRKKLKEVWKPAV

SEQ ID NO: 42886 - protein, 979 aa, synthetic construct
  REGION 1..979: note = engineered CasX variant
QEIKRINKIRRRLVKDSNTKKAGKTGPMKTLLVRVMTPDLRERLENLRKKPENIPQPISNTSRANLNKLLTDYTEMKKAILHVYWEEFQKDPVGLMSRVAQPASKKIDQNKLKPEMDEKGNLTTAGFACSQCGQPLFVYKLEQVSEKGKAYTNYFGRCNVAEHEKLIKLAQLKPEKDSDEAVTYSLGKFGQRALDFYSIHVTKESTHPVKPLAQIAGNRYASYPVGKALSDACMGTIASFLSKYQDIIIEHQKVVKGNQKRLESLRELAGKENLEYPSVTLPPQPHTKEGVDAYNEVIARVRMWVNLNLWQKLKLSRDDAKPLLRLKGFPSFPLVERQANEVDWWDMVCNVKKLINEKKEDGKVFWQNLAGYKRQEALRPYLSSEEDRKKGKKFARYQLGDLLLHLEKKHGEDWGKVYDEAWERIDKKVEGLSKHIKLEEERRSEDAQSKAALTDWLRAKASFVIEGLKEADDKDEFCRCELKLQKWYGDLRGKPFAIEAENSILDISGFSKQYNCAFIWQKDGVKKLNLYLIINYFKGGKLRFKKIKPEAFEANRFYTVINKKSGEIVPMEVNFNFDDPNLIILPLAFGKRQGREFIWNDLLSLETGSLKLANGRVIEKTLYNRRTRQDEPALFVALTFERREVLDSSNIKPMNLIGVDRGENIPAVIALTDPEGCPLSRFKDSLGNPTHILRIGESYKEKQRTIQAKKEVEQRRAGGYSRKYASKAKNLADDMVRNTARDLLYYAVTQDAMLIFENLSRGFGRQGKRTFMAERQYTRMEDWLTAKLAYEGLPSKTYLSKTLAQYTSKTCSNCGFTITSADYDRVLEKLKKTATGWMTTINGKELKVEGQITYYNRYKRQNVVKDLSVELDRLSEESVNNDISSWTKGRSGEALSLLKKRFSHRPVQEKFVCLNCGFETHADEQAALNIARSWLFLRSQEYKKYQTNKTTGNTDKRAFVETWQSFYRKKLKEVWKPAV

SEQ ID NO: 42887 - protein, 979 aa, synthetic construct
  REGION 1..979: note = engineered CasX variant
QEIKRINKIRRRLVKDSNTKKAGKTGPMKTLLVRVMTPDLRERLENLRKKPENIPQPISNTSRANLNKLLTDYTEMKKAILHVYWEEFQKDPVGLMSRVAQPASKKIDQNKLKPEMDEKGNLTTAGFACSQCGQPLFVYKLEQVSEKGKAYTNYFGRCNVAEHEKLIKLAQLKPEKDSDEAVTYSLGKFGQRALDFYSIHVTKESTHPVKPLAQIAGNRYASHPVGKALSDACMGTIASFLSKYQDIIIEHQKVVKGNQKRLESLRELAGKENLEYPSVTLPPQPHTKEGVDAYNEVIARVRMWVNLNLWQKLKLSRDDAKPLLRLKGFPSFPLVERQANEVDWWDMVCNVKKLINEKKEDGKVFWQNLAGYKRQEALRPYLSSEEDRKKGKKFARYQLGDLLLHLEKKHGEDWGKVYDEAWERIDKKVEGLSKHIKLEEERRSEDAQSKAALTDWLRAKASFVIEGLKEADDKDEFCRCELKLQKWYGDLRGKPFAIEAENSILDISGFSKQYNCAFIWQKDGVKKLNLYLIINYFKGGKLRFKKIKPEAFEANRFYTVINKKSGEIVPMEVNFNFDDPNLIILPLAFGKRQGREFIWNDLLSLETGSLKLANGRVIEKTLYNRRTRQDEPALFVALTFERREVLDSSNIKPMNLIGVDRGENIPAVIALTDPEGCPLSRFKDSLGNPTHILRIGESYKEKQRTIQAKKEVEQRRAGGYSRKYASKAKNLADDMVRNTARDLLYYAVTQDAMLIFENLSRGFGRQGKRTFMAERQYTRMEDWLTAKLAYEGLPSKTYLSKTLAQYTSKTCSNCGFTITSADYDRVLEKLKKTATGWMTTINGKELKVEGQITYYNRYKRQNVVKDLSVELDRLSEESVNNDISSWTKGRSGEALSLLKKRFSHRPVQEKFVCLNCGFETHADEQAALNIARSWLFLRSQEYKKYQTNKTTGNTDKRAFVETWQSFYRKKLKEVWKPAV

SEQ ID NO: 42888 - protein, 979 aa, synthetic construct
  REGION 1..979: note = engineered CasX variant
QEIKRINKIRRRLVKDSNTKKAGKTGPMKTLLVRVMTPDLRERLENLRKKPENIPQPISNTSRANLNKLLTDYTEMKKAILHVYWEEFQKDPVGLMSRVAQPASKKIDQNKLKPEMDEKGNLTTAGFACSQCGQPLFVYKLEQVSEKGKAYTNYFGRCNVAEHEKLIKLAQLKPEKDSDEAVTYSLGKFGQRALDFYSIHVTKESTHPVKPLAQIAGNRYASTPVGKALSDACMGTIASFLSKYQDIIIEHQKVVKGNQKRLESLRELAGKENLEYPSVTLPPQPHTKEGVDAYNEVIARVRMWVNLNLWQKLKLSRDDAKPLLRLKGFPSFPLVERQANEVDWWDMVCNVKKLINEKKEDGKVFWQNLAGYKRQEALRPYLSSEEDRKKGKKFARYQLGDLLLHLEKKHGEDWGKVYDEAWERIDKKVEGLSKHIKLEEERRSEDAQSKAALTDWLRAKASFVIEGLKEADDKDEFCRCELKLQKWYGDLRGKPFAIEAENSILDISGFSKQYNCAFIWQKDGVKKLNLYLIINYFKGGKLRFKKIKPEAFEANRFYTVINKKSGEIVPMEVNFNFDDPNLIILPLAFGKRQGREFIWNDLLSLETGSLKLANGRVIEKTLYNRRTRQDEPALFVALTFERREVLDSSNIKPMNLIGVDRGENIPAVIALTDPEGCPLSRFKDSLGNPTHILRIGESYKEKQRTIQAKKEVEQRRAGGYSRKYASKAKNLADDMVRNTARDLLYYAVTQDAMLIFENLSRGFGRQGKRTFMAERQYTRMEDWLTAKLAYEGLPSKTYLSKTLAQYTSKTCSNCGFTITSADYDRVLEKLKKTATGWMTTINGKELKVEGQITYYNRYKRQNVVKDLSVELDRLSEESVNNDISSWTKGRSGEALSLLKKRFSHRPVQEKFVCLNCGFETHADEQAALNIARSWLFLRSQEYKKYQTNKTTGNTDKRAFVETWQSFYRKKLKEVWKPAV

SEQ ID NO: 42889 - protein, 979 aa, synthetic construct
  REGION 1..979: note = engineered CasX variant
QEIKRINKIRRRLVKDSNTKKAGKTGPMKTLLVRVMTPDLRERLENLRKKPENIPQPISNTSRANLNKLLTDYTEMKKAILHVYWEEFQKDPVGLMSRVAQPASKKIDQNKLKPEMDEKGNLTTAGFACSQCGQPLFVYKLEQVSEKGKAYTNYFGRCNVAEHEKLIKLAQLKPEKDSDEAVTYSLGKFGQRALDFYSIHVTKESTHPVKPLAQIAGNRYASAPVGKALSDACMGTIASFLSKYQDIIIEHQKVVKGNQKRLESLRELAGKENLEYPSVTLPPQPHTKEGVDAYNEVIARVRMWVNLNLWQKLKLSRDDAKPLLRLKGFPSFPLVERQANEVDWWDMVCNVKKLINEKKEDGKVFWQNLAGYKRQEALRPYLSSEEDRKKGKKFARYQLGDLLLHLEKKHGEDWGKVYDEAWERIDKKVEGLSKHIKLEEERRSEDAQSKAALTDWLRAKASFVIEGLKEADDKDEFCRCELKLQKWYGDLRGKPFAIEAENSILDISGFSKQYNCAFIWQKDGVKKLNLYLIINYFKGGKLRFKKIKPEAFEANRFYTVINKKSGEIVPMEVNFNFDDPNLIILPLAFGKRQGREFIWNDLLSLETGSLKLANGRVIEKTLYNRRTRQDEPALFVALTFERREVLDSSNIKPMNLIGVDRGENIPAVIALTDPEGCPLSRFKDSLGNPTHILRIGESYKEKQRTIQAKKEVEQRRAGGYSRKYASKAKNLADDMVRNTARDLLYYAVTQDAMLIFENLSRGFGRQGKRTFMAERQYTRMEDWLTAKLAYEGLPSKTYLSKTLAQYTSKTCSNCGFTITSADYDRVLEKLKKTATGWMTTINGKELKVEGQITYYNRYKRQNVVKDLSVELDRLSEESVNNDISSWTKGRSGEALSLLKKRFSHRPVQEKFVCLNCGFETHADEQAALNIARSWLFLRSQEYKKYQTNKTTGNTDKRAFVETWQSFYRKKLKEVWKPAV

SEQ ID NO: 42890 - protein, 979 aa, synthetic construct
  REGION 1..979: note = engineered CasX variant
QEIKRINKIRRRLVKDSNTKKAGKTGPMKTLLVRVMTPDLRERLENLRKKPENIPQPISNTSRANLNKLLTDYTEMKKAILHVYWEEFQKDPVGLMSRVAQPASKKIDQNKLKPEMDEKGNLTTAGFACSQCGQPLFVYKLEQVSEKGKAYTNYFGRCNVAEHEKLIKLAQLKPEKDSDEAVTYSLGKFGQRALDFYSIHVTKESTHPVKPLAQIAGNRYASVPVGKALSDACMGTIASFLSKYQDIIIEHQKVVKGNQKRLESLRELAGKENLEYPSVTLPPQPHTKEGVDAYNEVIARVRMWVNLNLWQKLKLSRDDAKPLLRLKGFPSFPLVERQANEVDWWDMVCNVKKLINEKKEDGKVFWQNLAGYKRQEALRPYLSSEEDRKKGKKFARYQLGDLLLHLEKKHGEDWGKVYDEAWERIDKKVEGLSKHIKLEEERRSEDAQSKAALTDWLRAKASFVIEGLKEADDKDEFCRCELKLQKWYGDLRGKPFAIEAENSILDISGFSKQYNCAFIWQKDGVKKLNLYLIINYFKGGKLRFKKIKPEAFEANRFYTVINKKSGEIVPMEVNFNFDDPNLIILPLAFGKRQGREFIWNDLLSLETGSLKLANGRVIEKTLYNRRTRQDEPALFVALTFERREVLDSSNIKPMNLIGVDRGENIPAVIALTDPEGCPLSRFKDSLGNPTHILRIGESYKEKQRTIQAKKEVEQRRAGGYSRKYASKAKNLADDMVRNTARDLLYYAVTQDAMLIFENLSRGFGRQGKRTFMAERQYTRMEDWLTAKLAYEGLPSKTYLSKTLAQYTSKTCSNCGFTITSADYDRVLEKLKKTATGWMTTINGKELKVEGQITYYNRYKRQNVVKDLSVELDRLSEESVNNDISSWTKGRSGEALSLLKKRFSHRPVQEKFVCLNCGFETHADEQAALNIARSWLFLRSQEYKKYQTNKTTGNTDKRAFVETWQSFYRKKLKEVWKPAV

SEQ ID NO: 42891 - protein, 980 aa, synthetic construct
  REGION 1..980: note = engineered CasX variant
QEIKRINKIRRRLVKDSNTKKAGKTGPMKTLLVRVMTPDLRERLENLRKKPENIPQPISNTSRANLNKLLTDYTEMKKAILHVYWEEFQKDPVGLMSRVAQPASKKIDQNKLKPEMDEKGNLTTAGFACSQCGQPLFVYKLEQVSEKGKAYTNYFGRCNVAEHEKLIKKLAQLKPEKDSDEAVTYSLGKFGQRALDFYSIHVTKESTHPVKPLAQIAGNRYASGPVGKALSDACMGTIASFLSKYQDIIIEHQKVVKGNQKRLESLRELAGKENLEYPSVTLPPQPHTKEGVDAYNEVIARVRMWVNLNLWQKLKLSRDDAKPLLRLKGFPSFPLVERQANEVDWWDMVCNVKKLINEKKEDGKVFWQNLAGYKRQEALRPYLSSEEDRKKGKKFARYQLGDLLLHLEKKHGEDWGKVYDEAWERIDKKVEGLSKHIKLEEERRSEDAQSKAALTDWLRAKASFVIEGLKEADDKDEFCRCELKLQKWYGDLRGKPFAIEAENSILDISGFSKQYNCAFIWQKDGVKKLNLYLIINYFKGGKLRFKKIKPEAFEANRFYTVINKKSGEIVPMEVNFNFDDPNLIILPLAFGKRQGREFIWNDLLSLETGSLKLANGRVIEKTLYNRRTRQDEPALFVALTFERREVLDSSNIKPMNLIGVDRGENIPAVIALTDPEGCPLSRFKDSLGNPTHILRIGESYKEKQRTIQAKKEVEQRRAGGYSRKYASKAKNLADDMVRNTARDLLYYAVTQDAMLIFENLSRGFGRQGKRTFMAERQYTRMEDWLTAKLAYEGLPSKTYLSKTLAQYTSKTCSNCGFTITSADYDRVLEKLKKTATGWMTTINGKELKVEGQITYYNRYKRQNVVKDLSVELDRLSEESVNNDISSWTKGRSGEALSLLKKRFSHRPVQEKFVCLNCGFETHADEQAALNIARSWLFLRSQEYKKYQTNKTTGNTDKRAFVETWQSFYRKKLKEVWKPAV

SEQ ID NO: 42892 - protein, 978 aa, synthetic construct
  REGION 1..978: note = engineered CasX variant
QEIKRINKIRRRLVKDSNTKKAGKTGPMKTLLVRVMTPDLRERLENLRKKPENIPQPISNTSRANLNKLLTDYTEMKKAILHVYWEEFQKDPVGLMSRVAQPASKKIDQNKLKPEMDEKGNLTTAGFACSQCGQPLFVYKLEQVSEKGKAYTNYFGRCNVAEHEKLIKLAQLKPEKDSDEAVTYSLGKFGQRALDFYSIHVTKESTHPVKPLAQIAGNRYASPVGKALSDACMGTIASFLSKYQDIIIEHQKVVKGNQKRLESLRELAGKENLEYPSVTLPPQPHTKEGVDAYNEVIARVRMWVNLNLWQKLKLSRDDAKPLLRLKGFPSFPLVERQANEVDWWDMVCNVKKLINEKKEDGKVFWQNLAGYKRQEALRPYLSSEEDRKKGKKFARYQLGDLLLHLEKKHGEDWGKVYDEAWERIDKKVEGLSKHIKLEEERRSEDAQSKAALTDWLRAKASFVIEGLKEADDKDEFCRCELKLQKWYGDLRGKPFAIEAENSILDISGFSKQYNCAFIWQKDGVKKLNLYLIINYFKGGKLRFKKIKPEAFEANRFYTVINKKSGEIVPMEVNFNFDDPNLIILPLAFGKRQGREFIWNDLLSLETGSLKLANGRVIEKTLYNRRTRQDEPALFVALTFERREVLDSSNIKPMNLIGVDRGENIPAVIALTDPEGCPLSRFKDSLGNPTHILRIGESYKEKQRTIQAKKEVEQRRAGGYSRKYASKAKNLADDMVRNTARDLLYYAVTQDAMLIFENLSRGFGRQGKRTFMAERQYTRMEDWLTAKLAYEGLPSKTYLSKTLAQYTSKTCSNCGFTITSADYDRVLEKLKKTATGWMTTINGKELKVEGQITYYNRYKRQNVVKDLSVELDRLSEESVNNDISSWTKGRSGEALSLLKKRFSHRPVQEKFVCLNCGFETHADEQAALNIARSWLFLRSQEYKKYQTNKTTGNTDKRAFVETWQSFYRKKLKEVWKPAV

SEQ ID NO: 42893 - protein, 979 aa, synthetic construct
  REGION 1..979: note = engineered CasX variant
QEIKRINKIRRRLVKDSNTKKAGKTGPMKTLLVRVMTPDLRERLENLRKKPENIPQPISNTSRANLNKLLTDYTEMKKAILHVYWEEFQKDPVGLMSRVAQPASKKIDQNKLKPEMDEKGNLTTAGFACSQCGQPLFVYKLEQVSEKGKAYTNYFGRCNVAEHEKLIKLAQLKPEKDSDEAVTYSLGKFGQRALDFYSIHVTKESTHPVKPLAQIAGNRYASYPVGKALSDACMGTIASFLSKYQDIIIEHQKVVKGNQKRLESLRELAGKENLEYPSVTLPPQPHTKEGVDAYNEVIARVRMWVNLNLWQKLKLSRDDAKPLLRLKGFPSFPLVERQANEVDWWDMVCNVKKLINEKKEDGKVFWQNLAGYKRQEALRPYLSSEEDRKKGKKFARYQLGDLLLHLEKKHGEDWGKVYDEAWERIDKKVEGLSKHIKLEEERRSEDAQSKAALTDWLRAKASFVIEGLKEADKDEFCRCELKLQKWYGDLRGKPFAIEAENSILDISGFSKQYNCAFIWQKDGVKKLNLYLIINYFKGGKLRFKKIKPEAFEANRFYTVINKKSGEIVPMEVNFNFDDPNLIILPLAFGKRQGREFIWNDLLSLETGSLKLANGRVIEKTLYNRRTRQDEPALFVALTFERREVLDSSNIKPMNLIGVDRGENIPAVIALTDPEGCPLSRFKDSLGNPTHILRIGESYKEKQRTIQAKKEVEQRRAGGYSRKYASKAKNLADDMVRNTARDLLYYAVTQDAMLIFENLSRGFGRQGKRTFMAERQYTRMEDWLTAKLAYEGLPSKTYLSKTLAQYTSKTCSNCGFTITSADYDRVLEKLKKTATGWMTTINGKELKVEGQITYYNRYKRQNVVKDLSVELDRLSEESVNNDISSWTKGRSGNEALSLLKKRFSHRPVQEKFVCLNCGFETHADEQAALNIARSWLFLRSQEYKKYQTNKTTGNTDKRAFVETWQSFYRKKLKEVWKPAV

SEQ ID NO: 42894 - protein, 979 aa, synthetic construct
  REGION 1..979: note = engineered CasX variant
QEIKRINKIRRRLVKDSNTKKAGKTGPMKTLLVRVMTPDLRERLENLRKKPENIPQPISNTSRANLNKLLTDYTEMKKAILHVYWEEFQKDPVGLMSRVAQPASKKIDQNKLKPEMDEKGNLTTAGFACSQCGQPLFVYKLEQVSEKGKAYTNYFGRCNVAEHEKLIKLAQLKPEKDSDEAVTYSLGKFGQRALDFYSIHVTKESTHPVKPLAQIAGNRYASHPVGKALSDACMGTIASFLSKYQDIIIEHQKVVKGNQKRLESLRELAGKENLEYPSVTLPPQPHTKEGVDAYNEVIARVRMWVNLNLWQKLKLSRDDAKPLLRLKGFPSFPLVERQANEVDWWDMVCNVKKLINEKKEDGKVFWQNLAGYKRQEALRPYLSSEEDRKKGKKFARYQLGDLLLHLEKKHGEDWGKVYDEAWERIDKKVEGLSKHIKLEEERRSEDAQSKAALTDWLRAKASFVIEGLKEADKDEFCRCELKLQKWYGDLRGKPFAIEAENSILDISGFSKQYNCAFIWQKDGVKKLNLYLIINYFKGGKLRFKKIKPEAFEANRFYTVINKKSGEIVPMEVNFNFDDPNLIILPLAFGKRQGREFIWNDLLSLETGSLKLANGRVIEKTLYNRRTRQDEPALFVALTFERREVLDSSNIKPMNLIGVDRGENIPAVIALTDPEGCPLSRFKDSLGNPTHILRIGESYKEKQRTIQAKKEVEQRRAGGYSRKYASKAKNLADDMVRNTARDLLYYAVTQDAMLIFENLSRGFGRQGKRTFMAERQYTRMEDWLTAKLAYEGLPSKTYLSKTLAQYTSKTCSNCGFTITSADYDRVLEKLKKTATGWMTTINGKELKVEGQITYYNRYKRQNVVKDLSVELDRLSEESVNNDISSWTKGRSGNEALSLLKKRFSHRPVQEKFVCLNCGFETHADEQAALNIARSWLFLRSQEYKKYQTNKTTGNTDKRAFVETWQSFYRKKLKEVWKPAV

SEQ ID NO: 42895 - protein, 979 aa, synthetic construct
  REGION 1..979: note = engineered CasX variant
QEIKRINKIRRRLVKDSNTKKAGKTGPMKTLLVRVMTPDLRERLENLRKKPENIPQPISNTSRANLNKLLTDYTEMKKAILHVYWEEFQKDPVGLMSRVAQPASKKIDQNKLKPEMDEKGNLTTAGFACSQCGQPLFVYKLEQVSEKGKAYTNYFGRCNVAEHEKLIKLAQLKPEKDSDEAVTYSLGKFGQRALDFYSIHVTKESTHPVKPLAQIAGNRYASTPVGKALSDACMGTIASFLSKYQDIIIEHQKVVKGNQKRLESLRELAGKENLEYPSVTLPPQPHTKEGVDAYNEVIARVRMWVNLNLWQKLKLSRDDAKPLLRLKGFPSFPLVERQANEVDWWDMVCNVKKLINEKKEDGKVFWQNLAGYKRQEALRPYLSSEEDRKKGKKFARYQLGDLLLHLEKKHGEDWGKVYDEAWERIDKKVEGLSKHIKLEEERRSEDAQSKAALTDWLRAKASFVIEGLKEADKDEFCRCELKLQKWYGDLRGKPFAIEAENSILDISGFSKQYNCAFIWQKDGVKKLNLYLIINYFKGGKLRFKKIKPEAFEANRFYTVINKKSGEIVPMEVNFNFDDPNLIILPLAFGKRQGREFIWNDLLSLETGSLKLANGRVIEKTLYNRRTRQDEPALFVALTFERREVLDSSNIKPMNLIGVDRGENIPAVIALTDPEGCPLSRFKDSLGNPTHILRIGESYKEKQRTIQAKKEVEQRRAGGYSRKYASKAKNLADDMVRNTARDLLYYAVTQDAMLIFENLSRGFGRQGKRTFMAERQYTRMEDWLTAKLAYEGLPSKTYLSKTLAQYTSKTCSNCGFTITSADYDRVLEKLKKTATGWMTTINGKELKVEGQITYYNRYKRQNVVKDLSVELDRLSEESVNNDISSWTKGRSGNEALSLLKKRFSHRPVQEKFVCLNCGFETHADEQAALNIARSWLFLRSQEYKKYQTNKTTGNTDKRAFVETWQSFYRKKLKEVWKPAV

SEQ ID NO: 42896 - protein, 979 aa, synthetic construct
  REGION 1..979: note = engineered CasX variant
QEIKRINKIRRRLVKDSNTKKAGKTGPMKTLLVRVMTPDLRERLENLRKKPENIPQPISNTSRANLNKLLTDYTEMKKAILHVYWEEFQKDPVGLMSRVAQPASKKIDQNKLKPEMDEKGNLTTAGFACSQCGQPLFVYKLEQVSEKGKAYTNYFGRCNVAEHEKLIKLAQLKPEKDSDEAVTYSLGKFGQRALDFYSIHVTKESTHPVKPLAQIAGNRYASAPVGKALSDACMGTIASFLSKYQDIIIEHQKVVKGNQKRLESLRELAGKENLEYPSVTLPPQPHTKEGVDAYNEVIARVRMWVNLNLWQKLKLSRDDAKPLLRLKGFPSFPLVERQANEVDWWDMVCNVKKLINEKKEDGKVFWQNLAGYKRQEALRPYLSSEEDRKKGKKFARYQLGDLLLHLEKKHGEDWGKVYDEAWERIDKKVEGLSKHIKLEEERRSEDAQSKAALTDWLRAKASFVIEGLKEADKDEFCRCELKLQKWYGDLRGKPFAIEAENSILDISGFSKQYNCAFIWQKDGVKKLNLYLIINYFKGGKLRFKKIKPEAFEANRFYTVINKKSGEIVPMEVNFNFDDPNLIILPLAFGKRQGREFIWNDLLSLETGSLKLANGRVIEKTLYNRRTRQDEPALFVALTFERREVLDSSNIKPMNLIGVDRGENIPAVIALTDPEGCPLSRFKDSLGNPTHILRIGESYKEKQRTIQAKKEVEQRRAGGYSRKYASKAKNLADDMVRNTARDLLYYAVTQDAMLIFENLSRGFGRQGKRTFMAERQYTRMEDWLTAKLAYEGLPSKTYLSKTLAQYTSKTCSNCGFTITSADYDRVLEKLKKTATGWMTTINGKELKVEGQITYYNRYKRQNVVKDLSVELDRLSEESVNNDISSWTKGRSGNEALSLLKKRFSHRPVQEKFVCLNCGFETHADEQAALNIARSWLFLRSQEYKKYQTNKTTGNTDKRAFVETWQSFYRKKLKEVWKPAV

SEQ ID NO: 42897 - protein, 979 aa, synthetic construct
  REGION 1..979: note = engineered CasX variant
QEIKRINKIRRRLVKDSNTKKAGKTGPMKTLLVRVMTPDLRERLENLRKKPENIPQPISNTSRANLNKLLTDYTEMKKAILHVYWEEFQKDPVGLMSRVAQPASKKIDQNKLKPEMDEKGNLTTAGFACSQCGQPLFVYKLEQVSEKGKAYTNYFGRCNVAEHEKLIKLAQLKPEKDSDEAVTYSLGKFGQRALDFYSIHVTKESTHPVKPLAQIAGNRYASVPVGKALSDACMGTIASFLSKYQDIIIEHQKVVKGNQKRLESLRELAGKENLEYPSVTLPPQPHTKEGVDAYNEVIARVRMWVNLNLWQKLKLSRDDAKPLLRLKGFPSFPLVERQANEVDWWDMVCNVKKLINEKKEDGKVFWQNLAGYKRQEALRPYLSSEEDRKKGKKFARYQLGDLLLHLEKKHGEDWGKVYDEAWERIDKKVEGLSKHIKLEEERRSEDAQSKAALTDWLRAKASFVIEGLKEADKDEFCRCELKLQKWYGDLRGKPFAIEAENSILDISGFSKQYNCAFIWQKDGVKKLNLYLIINYFKGGKLRFKKIKPEAFEANRFYTVINKKSGEIVPMEVNFNFDDPNLIILPLAFGKRQGREFIWNDLLSLETGSLKLANGRVIEKTLYNRRTRQDEPALFVALTFERREVLDSSNIKPMNLIGVDRGENIPAVIALTDPEGCPLSRFKDSLGNPTHILRIGESYKEKQRTIQAKKEVEQRRAGGYSRKYASKAKNLADDMVRNTARDLLYYAVTQDAMLIFENLSRGFGRQGKRTFMAERQYTRMEDWLTAKLAYEGLPSKTYLSKTLAQYTSKTCSNCGFTITSADYDRVLEKLKKTATGWMTTINGKELKVEGQITYYNRYKRQNVVKDLSVELDRLSEESVNNDISSWTKGRSGNEALSLLKKRFSHRPVQEKFVCLNCGFETHADEQAALNIARSWLFLRSQEYKKYQTNKTTGNTDKRAFVETWQSFYRKKLKEVWKPAV

SEQ ID NO: 42898 - protein, 980 aa, synthetic construct
  REGION 1..980: note = engineered CasX variant
QEIKRINKIRRRLVKDSNTKKAGKTGPMKTLLVRVMTPDLRERLENLRKKPENIPQPISNTSRANLNKLLTDYTEMKKAILHVYWEEFQKDPVGLMSRVAQPASKKIDQNKLKPEMDEKGNLTTAGFACSQCGQPLFVYKLEQVSEKGKAYTNYFGRCNVAEHEKLIKKLAQLKPEKDSDEAVTYSLGKFGQRALDFYSIHVTKESTHPVKPLAQIAGNRYASGPVGKALSDACMGTIASFLSKYQDIIIEHQKVVKGNQKRLESLRELAGKENLEYPSVTLPPQPHTKEGVDAYNEVIARVRMWVNLNLWQKLKLSRDDAKPLLRLKGFPSFPLVERQANEVDWWDMVCNVKKLINEKKEDGKVFWQNLAGYKRQEALRPYLSSEEDRKKGKKFARYQLGDLLLHLEKKHGEDWGKVYDEAWERIDKKVEGLSKHIKLEEERRSEDAQSKAALTDWLRAKASFVIEGLKEADKDEFCRCELKLQKWYGDLRGKPFAIEAENSILDISGFSKQYNCAFIWQKDGVKKLNLYLIINYFKGGKLRFKKIKPEAFEANRFYTVINKKSGEIVPMEVNFNFDDPNLIILPLAFGKRQGREFIWNDLLSLETGSLKLANGRVIEKTLYNRRTRQDEPALFVALTFERREVLDSSNIKPMNLIGVDRGENIPAVIALTDPEGCPLSRFKDSLGNPTHILRIGESYKEKQRTIQAKKEVEQRRAGGYSRKYASKAKNLADDMVRNTARDLLYYAVTQDAMLIFENLSRGFGRQGKRTFMAERQYTRMEDWLTAKLAYEGLPSKTYLSKTLAQYTSKTCSNCGFTITSADYDRVLEKLKKTATGWMTTINGKELKVEGQITYYNRYKRQNVVKDLSVELDRLSEESVNNDISSWTKGRSGNEALSLLKKRFSHRPVQEKFVCLNCGFETHADEQAALNIARSWLFLRSQEYKKYQTNKTTGNTDKRAFVETWQSFYRKKLKEVWKPAV

SEQ ID NO: 42899 - protein, 978 aa, synthetic construct
  REGION 1..978: note = engineered CasX variant
QEIKRINKIRRRLVKDSNTKKAGKTGPMKTLLVRVMTPDLRERLENLRKKPENIPQPISNTSRANLNKLLTDYTEMKKAILHVYWEEFQKDPVGLMSRVAQPASKKIDQNKLKPEMDEKGNLTTAGFACSQCGQPLFVYKLEQVSEKGKAYTNYFGRCNVAEHEKLIKLAQLKPEKDSDEAVTYSLGKFGQRALDFYSIHVTKESTHPVKPLAQIAGNRYASPVGKALSDACMGTIASFLSKYQDIIIEHQKVVKGNQKRLESLRELAGKENLEYPSVTLPPQPHTKEGVDAYNEVIARVRMWVNLNLWQKLKLSRDDAKPLLRLKGFPSFPLVERQANEVDWWDMVCNVKKLINEKKEDGKVFWQNLAGYKRQEALRPYLSSEEDRKKGKKFARYQLGDLLLHLEKKHGEDWGKVYDEAWERIDKKVEGLSKHIKLEEERRSEDAQSKAALTDWLRAKASFVIEGLKEADKDEFCRCELKLQKWYGDLRGKPFAIEAENSILDISGFSKQYNCAFIWQKDGVKKLNLYLIINYFKGGKLRFKKIKPEAFEANRFYTVINKKSGEIVPMEVNFNFDDPNLIILPLAFGKRQGREFIWNDLLSLETGSLKLANGRVIEKTLYNRRTRQDEPALFVALTFERREVLDSSNIKPMNLIGVDRGENIPAVIALTDPEGCPLSRFKDSLGNPTHILRIGESYKEKQRTIQAKKEVEQRRAGGYSRKYASKAKNLADDMVRNTARDLLYYAVTQDAMLIFENLSRGFGRQGKRTFMAERQYTRMEDWLTAKLAYEGLPSKTYLSKTLAQYTSKTCSNCGFTITSADYDRVLEKLKKTATGWMTTINGKELKVEGQITYYNRYKRQNVVKDLSVELDRLSEESVNNDISSWTKGRSGNEALSLLKKRFSHRPVQEKFVCLNCGFETHADEQAALNIARSWLFLRSQEYKKYQTNKTTGNTDKRAFVETWQSFYRKKLKEVWKPAV

SEQ ID NO: 42900 - protein, 978 aa, synthetic construct
  REGION 1..978: note = engineered CasX variant
QEIKRINKIRRRLVKDSNTKKAGKTGPMKTLLVRVMTPDLRERLENLRKKPENIPQPISNTSRANLNKLLTDYTEMKKAILHVYWEEFQKDPVGLMSRVAQPASKKIDQNKLKPEMDEKGNLTTAGFACSQCGQPLFVYKLEQVSEKGKAYTNYFGRCNVAEHEKLIKLAQLKPEKDSDEAVTYSLGKFGQRALDFYSIHVTKESTHPVKPLAQIAGNRYASYPVGKALSDACMGTIASFLSKYQDIIIEHQKVVKGNQKRLESLRELAGKENLEYPSVTLPPQPHTKEGVDAYNEVIARVRMWVNLNLWQKLKLSRDDAKPLLRLKGFPSFPLVERQANEVDWWDMVCNVKKLINEKKEDGKVFWQNLAGYKRQEALRPYLSSEEDRQKGKKFARYQLGDLLLHLEKKHGEDWGKVYDEAWERIDKKVEGLSKHIKLEEERRSEDAQSKAALTDWLRAKASFVIEGLKEADKDEFCRCELKLQKWYGDLRGKPFAIEAENSILDISGFSKQYNCAFIWQKDGVKKLNLYLIINYFKGGKLRFKKIKPEAFEANRFYTVINKKSGEIVPMEVNFNFDDPNLIILPLAFGKRQGREFIWNDLLSLETGSLKLANGRVIEKTLYNRRTRQDEPALFVALTFERREVLDSSNIKPMNLIGVDRGENIPAVIALTDPEGCPLSRFKDSLGNPTHILRIGESYKEKQRTIQAKKEVEQRRAGGYSRKYASKAKNLADDMVRNTARDLLYYAVTQDAMLIFENLSRGFGRQGKRTFMAERQYTRMEDWLTAKLAYEGLPSKTYLSKTLAQYTSKTCSNCGFTITSADYDRVLEKLKKTATGWMTTINGKELKVEGQITYYNRYKRQNVVKDLSVELDRLSEESVNNDISSWTKGRSGEALSLLKKRFSHRPVQEKFVCLNCGFETHADEQAALNIARSWLFLRSQEYKKYQTNKTTGNTDKRAFVETWQSFYRKKLKEVWKPAV

SEQ ID NO: 42901 - protein, 978 aa, synthetic construct
  REGION 1..978: note = engineered CasX variant
QEIKRINKIRRRLVKDSNTKKAGKTGPMKTLLVRVMTPDLRERLENLRKKPENIPQPISNTSRANLNKLLTDYTEMKKAILHVYWEEFQKDPVGLMSRVAQPASKKIDQNKLKPEMDEKGNLTTAGFACSQCGQPLFVYKLEQVSEKGKAYTNYFGRCNVAEHEKLIKLAQLKPEKDSDEAVTYSLGKFGQRALDFYSIHVTKESTHPVKPLAQIAGNRYASHPVGKALSDACMGTIASFLSKYQDIIIEHQKVVKGNQKRLESLRELAGKENLEYPSVTLPPQPHTKEGVDAYNEVIARVRMWVNLNLWQKLKLSRDDAKPLLRLKGFPSFPLVERQANEVDWWDMVCNVKKLINEKKEDGKVFWQNLAGYKRQEALRPYLSSEEDRQKGKKFARYQLGDLLLHLEKKHGEDWGKVYDEAWERIDKKVEGLSKHIKLEEERRSEDAQSKAALTDWLRAKASFVIEGLKEADKDEFCRCELKLQKWYGDLRGKPFAIEAENSILDISGFSKQYNCAFIWQKDGVKKLNLYLIINYFKGGKLRFKKIKPEAFEANRFYTVINKKSGEIVPMEVNFNFDDPNLIILPLAFGKRQGREFIWNDLLSLETGSLKLANGRVIEKTLYNRRTRQDEPALFVALTFERREVLDSSNIKPMNLIGVDRGENIPAVIALTDPEGCPLSRFKDSLGNPTHILRIGESYKEKQRTIQAKKEVEQRRAGGYSRKYASKAKNLADDMVRNTARDLLYYAVTQDAMLIFENLSRGFGRQGKRTFMAERQYTRMEDWLTAKLAYEGLPSKTYLSKTLAQYTSKTCSNCGFTITSADYDRVLEKLKKTATGWMTTINGKELKVEGQITYYNRYKRQNVVKDLSVELDRLSEESVNNDISSWTKGRSGEALSLLKKRFSHRPVQEKFVCLNCGFETHADEQAALNIARSWLFLRSQEYKKYQTNKTTGNTDKRAFVETWQSFYRKKLKEVWKPAV

SEQ ID NO: 42902 - protein, 978 aa, synthetic construct
  REGION 1..978: note = engineered CasX variant
QEIKRINKIRRRLVKDSNTKKAGKTGPMKTLLVRVMTPDLRERLENLRKKPENIPQPISNTSRANLNKLLTDYTEMKKAILHVYWEEFQKDPVGLMSRVAQPASKKIDQNKLKPEMDEKGNLTTAGFACSQCGQPLFVYKLEQVSEKGKAYTNYFGRCNVAEHEKLIKLAQLKPEKDSDEAVTYSLGKFGQRALDFYSIHVTKESTHPVKPLAQIAGNRYASTPVGKALSDACMGTIASFLSKYQDIIIEHQKVVKGNQKRLESLRELAGKENLEYPSVTLPPQPHTKEGVDAYNEVIARVRMWVNLNLWQKLKLSRDDAKPLLRLKGFPSFPLVERQANEVDWWDMVCNVKKLINEKKEDGKVFWQNLAGYKRQEALRPYLSSEEDRQKGKKFARYQLGDLLLHLEKKHGEDWGKVYDEAWERIDKKVEGLSKHIKLEEERRSEDAQSKAALTDWLRAKASFVIEGLKEADKDEFCRCELKLQKWYGDLRGKPFAIEAENSILDISGFSKQYNCAFIWQKDGVKKLNLYLIINYFKGGKLRFKKIKPEAFEANRFYTVINKKSGEIVPMEVNFNFDDPNLIILPLAFGKRQGREFIWNDLLSLETGSLKLANGRVIEKTLYNRRTRQDEPALFVALTFERREVLDSSNIKPMNLIGVDRGENIPAVIALTDPEGCPLSRFKDSLGNPTHILRIGESYKEKQRTIQAKKEVEQRRAGGYSRKYASKAKNLADDMVRNTARDLLYYAVTQDAMLIFENLSRGFGRQGKRTFMAERQYTRMEDWLTAKLAYEGLPSKTYLSKTLAQYTSKTCSNCGFTITSADYDRVLEKLKKTATGWMTTINGKELKVEGQITYYNRYKRQNVVKDLSVELDRLSEESVNNDISSWTKGRSGEALSLLKKRFSHRPVQEKFVCLNCGFETHADEQAALNIARSWLFLRSQEYKKYQTNKTTGNTDKRAFVETWQSFYRKKLKEVWKPAV

SEQ ID NO: 42903 - protein, 978 aa, synthetic construct
  REGION 1..978: note = engineered CasX variant
QEIKRINKIRRRLVKDSNTKKAGKTGPMKTLLVRVMTPDLRERLENLRKKPENIPQPISNTSRANLNKLLTDYTEMKKAILHVYWEEFQKDPVGLMSRVAQPASKKIDQNKLKPEMDEKGNLTTAGFACSQCGQPLFVYKLEQVSEKGKAYTNYFGRCNVAEHEKLIKLAQLKPEKDSDEAVTYSLGKFGQRALDFYSIHVTKESTHPVKPLAQIAGNRYASAPVGKALSDACMGTIASFLSKYQDIIIEHQKVVKGNQKRLESLRELAGKENLEYPSVTLPPQPHTKEGVDAYNEVIARVRMWVNLNLWQKLKLSRDDAKPLLRLKGFPSFPLVERQANEVDWWDMVCNVKKLINEKKEDGKVFWQNLAGYKRQEALRPYLSSEEDRQKGKKFARYQLGDLLLHLEKKHGEDWGKVYDEAWERIDKKVEGLSKHIKLEEERRSEDAQSKAALTDWLRAKASFVIEGLKEADKDEFCRCELKLQKWYGDLRGKPFAIEAENSILDISGFSKQYNCAFIWQKDGVKKLNLYLIINYFKGGKLRFKKIKPEAFEANRFYTVINKKSGEIVPMEVNFNFDDPNLIILPLAFGKRQGREFIWNDLLSLETGSLKLANGRVIEKTLYNRRTRQDEPALFVALTFERREVLDSSNIKPMNLIGVDRGENIPAVIALTDPEGCPLSRFKDSLGNPTHILRIGESYKEKQRTIQAKKEVEQRRAGGYSRKYASKAKNLADDMVRNTARDLLYYAVTQDAMLIFENLSRGFGRQGKRTFMAERQYTRMEDWLTAKLAYEGLPSKTYLSKTLAQYTSKTCSNCGFTITSADYDRVLEKLKKTATGWMTTINGKELKVEGQITYYNRYKRQNVVKDLSVELDRLSEESVNNDISSWTKGRSGEALSLLKKRFSHRPVQEKFVCLNCGFETHADEQAALNIARSWLFLRSQEYKKYQTNKTTGNTDKRAFVETWQSFYRKKLKEVWKPAV

SEQ ID NO: 42904 - protein, 978 aa, synthetic construct
  REGION 1..978: note = engineered CasX variant
QEIKRINKIRRRLVKDSNTKKAGKTGPMKTLLVRVMTPDLRERLENLRKKPENIPQPISNTSRANLNKLLTDYTEMKKAILHVYWEEFQKDPVGLMSRVAQPASKKIDQNKLKPEMDEKGNLTTAGFACSQCGQPLFVYKLEQVSEKGKAYTNYFGRCNVAEHEKLIKLAQLKPEKDSDEAVTYSLGKFGQRALDFYSIHVTKESTHPVKPLAQIAGNRYASVPVGKALSDACMGTIASFLSKYQDIIIEHQKVVKGNQKRLESLRELAGKENLEYPSVTLPPQPHTKEGVDAYNEVIARVRMWVNLNLWQKLKLSRDDAKPLLRLKGFPSFPLVERQANEVDWWDMVCNVKKLINEKKEDGKVFWQNLAGYKRQEALRPYLSSEEDRQKGKKFARYQLGDLLLHLEKKHGEDWGKVYDEAWERIDKKVEGLSKHIKLEEERRSEDAQSKAALTDWLRAKASFVIEGLKEADKDEFCRCELKLQKWYGDLRGKPFAIEAENSILDISGFSKQYNCAFIWQKDGVKKLNLYLIINYFKGGKLRFKKIKPEAFEANRFYTVINKKSGEIVPMEVNFNFDDPNLIILPLAFGKRQGREFIWNDLLSLETGSLKLANGRVIEKTLYNRRTRQDEPALFVALTFERREVLDSSNIKPMNLIGVDRGENIPAVIALTDPEGCPLSRFKDSLGNPTHILRIGESYKEKQRTIQAKKEVEQRRAGGYSRKYASKAKNLADDMVRNTARDLLYYAVTQDAMLIFENLSRGFGRQGKRTFMAERQYTRMEDWLTAKLAYEGLPSKTYLSKTLAQYTSKTCSNCGFTITSADYDRVLEKLKKTATGWMTTINGKELKVEGQITYYNRYKRQNVVKDLSVELDRLSEESVNNDISSWTKGRSGEALSLLKKRFSHRPVQEKFVCLNCGFETHADEQAALNIARSWLFLRSQEYKKYQTNKTTGNTDKRAFVETWQSFYRKKLKEVWKPAV

SEQ ID NO: 42905 - protein, 979 aa, synthetic construct
  REGION 1..979: note = engineered CasX variant
QEIKRINKIRRRLVKDSNTKKAGKTGPMKTLLVRVMTPDLRERLENLRKKPENIPQPISNTSRANLNKLLTDYTEMKKAILHVYWEEFQKDPVGLMSRVAQPASKKIDQNKLKPEMDEKGNLTTAGFACSQCGQPLFVYKLEQVSEKGKAYTNYFGRCNVAEHEKLIKKLAQLKPEKDSDEAVTYSLGKFGQRALDFYSIHVTKESTHPVKPLAQIAGNRYASGPVGKALSDACMGTIASFLSKYQDIIIEHQKVVKGNQKRLESLRELAGKENLEYPSVTLPPQPHTKEGVDAYNEVIARVRMWVNLNLWQKLKLSRDDAKPLLRLKGFPSFPLVERQANEVDWWDMVCNVKKLINEKKEDGKVFWQNLAGYKRQEALRPYLSSEEDRQKGKKFARYQLGDLLLHLEKKHGEDWGKVYDEAWERIDKKVEGLSKHIKLEEERRSEDAQSKAALTDWLRAKASFVIEGLKEADKDEFCRCELKLQKWYGDLRGKPFAIEAENSILDISGFSKQYNCAFIWQKDGVKKLNLYLIINYFKGGKLRFKKIKPEAFEANRFYTVINKKSGEIVPMEVNFNFDDPNLIILPLAFGKRQGREFIWNDLLSLETGSLKLANGRVIEKTLYNRRTRQDEPALFVALTFERREVLDSSNIKPMNLIGVDRGENIPAVIALTDPEGCPLSRFKDSLGNPTHILRIGESYKEKQRTIQAKKEVEQRRAGGYSRKYASKAKNLADDMVRNTARDLLYYAVTQDAMLIFENLSRGFGRQGKRTFMAERQYTRMEDWLTAKLAYEGLPSKTYLSKTLAQYTSKTCSNCGFTITSADYDRVLEKLKKTATGWMTTINGKELKVEGQITYYNRYKRQNVVKDLSVELDRLSEESVNNDISSWTKGRSGEALSLLKKRFSHRPVQEKFVCLNCGFETHADEQAALNIARSWLFLRSQEYKKYQTNKTTGNTDKRAFVETWQSFYRKKLKEVWKPAV

SEQ ID NO: 42906 - protein, 977 aa, synthetic construct
  REGION 1..977: note = engineered CasX variant
QEIKRINKIRRRLVKDSNTKKAGKTGPMKTLLVRVMTPDLRERLENLRKKPENIPQPISNTSRANLNKLLTDYTEMKKAILHVYWEEFQKDPVGLMSRVAQPASKKIDQNKLKPEMDEKGNLTTAGFACSQCGQPLFVYKLEQVSEKGKAYTNYFGRCNVAEHEKLIKLAQLKPEKDSDEAVTYSLGKFGQRALDFYSIHVTKESTHPVKPLAQIAGNRYASPVGKALSDACMGTIASFLSKYQDIIIEHQKVVKGNQKRLESLRELAGKENLEYPSVTLPPQPHTKEGVDAYNEVIARVRMWVNLNLWQKLKLSRDDAKPLLRLKGFPSFPLVERQANEVDWWDMVCNVKKLINEKKEDGKVFWQNLAGYKRQEALRPYLSSEEDRQKGKKFARYQLGDLLLHLEKKHGEDWGKVYDEAWERIDKKVEGLSKHIKLEEERRSEDAQSKAALTDWLRAKASFVIEGLKEADKDEFCRCELKLQKWYGDLRGKPFAIEAENSILDISGFSKQYNCAFIWQKDGVKKLNLYLIINYFKGGKLRFKKIKPEAFEANRFYTVINKKSGEIVPMEVNFNFDDPNLIILPLAFGKRQGREFIWNDLLSLETGSLKLANGRVIEKTLYNRRTRQDEPALFVALTFERREVLDSSNIKPMNLIGVDRGENIPAVIALTDPEGCPLSRFKDSLGNPTHILRIGESYKEKQRTIQAKKEVEQRRAGGYSRKYASKAKNLADDMVRNTARDLLYYAVTQDAMLIFENLSRGFGRQGKRTFMAERQYTRMEDWLTAKLAYEGLPSKTYLSKTLAQYTSKTCSNCGFTITSADYDRVLEKLKKTATGWMTTINGKELKVEGQITYYNRYKRQNVVKDLSVELDRLSEESVNNDISSWTKGRSGEALSLLKKRFSHRPVQEKFVCLNCGFETHADEQAALNIARSWLFLRSQEYKKYQTNKTTGNTDKRAFVETWQSFYRKKLKEVWKPAV

SEQ ID NO: 42907 - protein, 978 aa, synthetic construct
  REGION 1..978: note = engineered CasX variant
QEIKRINKIRRRLVKDSNTKKAGKTGPMKTLLVRVMTPDLRERLENLRKKPENIPQPISNTSRANLNKLLTDYTEMKKAILHVYWEEFQKDPVGLMSRVAQPASKKIDQNKLKPEMDEKGNLTTAGFACSQCGQPLFVYKLEQVSEKGKAYTNYFGRCNVAEHEKLIKLAQLKPEKDSDEAVTYSLGKFGQRALDFYSIHVTKESTHPVKPLAQIAGNRYASYPVGKALSDACMGTIASFLSKYQDIIIEHQKVVKGNQKRLESLRELAGKENLEYPSVTLPPQPHTKEGVDAYNEVIARVRMWVNLNLWQKLKLSRDDAKPLLRLKGFPSFPLVERQANEVDWWDMVCNVKKLINEKKEDGKVFWQNLAGYKRQEALRPYLSSEEDRKKGKKFARYQLGDLLLHLEKKHGEDWGKVYDEAWERIDKKVEGLSKHIKLEEERRSEDAQSKAALTDWLRAKASFVIEGLKEADKDEFCRCELKLQKWYGDLRGKPFAIEAENSILDISGFSKQYNCAFIWQKDGVKKLNLYLIINYFKGGKLRFKKIKPEAFEANRFYTVINKKSGEIVPMEVNFNFDDPNLIILPLAFGKRQGREFIWNDLLSLETGSLKLANGRVIEKTLYNRRTRQDEPALFVALTFERREVLDSSNIKPMNLIGVDRGENIPAVIALTDPEGCPLSRFKDSLGNPTHILRIGESYKEKQRTIQAKKEVEQRRAGGYSRKYASKAKNLADDMVRNTARDLLYYAVTQDAMLIFENLSRGFGRQGKRTFMAERQYTRMEDWLTAKLAYEGLPSQTYLSKTLAQYTSKTCSNCGFTITSADYDRVLEKLKKTATGWMTTINGKELKVEGQITYYNRYKRQNVVKDLSVELDRLSEESVNNDISSWTKGRSGEALSLLKKRFSHRPVQEKFVCLNCGFETHADEQAALNIARSWLFLRSQEYKKYQTNKTTGNTDKRAFVETWQSFYRKKLKEVWKPAV

SEQ ID NO: 42908 - protein, 978 aa, synthetic construct
  REGION 1..978: note = engineered CasX variant
QEIKRINKIRRRLVKDSNTKKAGKTGPMKTLLVRVMTPDLRERLENLRKKPENIPQPISNTSRANLNKLLTDYTEMKKAILHVYWEEFQKDPVGLMSRVAQPASKKIDQNKLKPEMDEKGNLTTAGFACSQCGQPLFVYKLEQVSEKGKAYTNYFGRCNVAEHEKLIKLAQLKPEKDSDEAVTYSLGKFGQRALDFYSIHVTKESTHPVKPLAQIAGNRYASHPVGKALSDACMGTIASFLSKYQDIIIEHQKVVKGNQKRLESLRELAGKENLEYPSVTLPPQPHTKEGVDAYNEVIARVRMWVNLNLWQKLKLSRDDAKPLLRLKGFPSFPLVERQANEVDWWDMVCNVKKLINEKKEDGKVFWQNLAGYKRQEALRPYLSSEEDRKKGKKFARYQLGDLLLHLEKKHGEDWGKVYDEAWERIDKKVEGLSKHIKLEEERRSEDAQSKAALTDWLRAKASFVIEGLKEADKDEFCRCELKLQKWYGDLRGKPFAIEAENSILDISGFSKQYNCAFIWQKDGVKKLNLYLIINYFKGGKLRFKKIKPEAFEANRFYTVINKKSGEIVPMEVNFNFDDPNLIILPLAFGKRQGREFIWNDLLSLETGSLKLANGRVIEKTLYNRRTRQDEPALFVALTFERREVLDSSNIKPMNLIGVDRGENIPAVIALTDPEGCPLSRFKDSLGNPTHILRIGESYKEKQRTIQAKKEVEQRRAGGYSRKYASKAKNLADDMVRNTARDLLYYAVTQDAMLIFENLSRGFGRQGKRTFMAERQYTRMEDWLTAKLAYEGLPSQTYLSKTLAQYTSKTCSNCGFTITSADYDRVLEKLKKTATGWMTTINGKELKVEGQITYYNRYKRQNVVKDLSVELDRLSEESVNNDISSWTKGRSGEALSLLKKRFSHRPVQEKFVCLNCGFETHADEQAALNIARSWLFLRSQEYKKYQTNKTTGNTDKRAFVETWQSFYRKKLKEVWKPAV

SEQ ID NO: 42909 - protein, 978 aa, synthetic construct
  REGION 1..978: note = engineered CasX variant
QEIKRINKIRRRLVKDSNTKKAGKTGPMKTLLVRVMTPDLRERLENLRKKPENIPQPISNTSRANLNKLLTDYTEMKKAILHVYWEEFQKDPVGLMSRVAQPASKKIDQNKLKPEMDEKGNLTTAGFACSQCGQPLFVYKLEQVSEKGKAYTNYFGRCNVAEHEKLIKLAQLKPEKDSDEAVTYSLGKFGQRALDFYSIHVTKESTHPVKPLAQIAGNRYASTPVGKALSDACMGTIASFLSKYQDIIIEHQKVVKGNQKRLESLRELAGKENLEYPSVTLPPQPHTKEGVDAYNEVIARVRMWVNLNLWQKLKLSRDDAKPLLRLKGFPSFPLVERQANEVDWWDMVCNVKKLINEKKEDGKVFWQNLAGYKRQEALRPYLSSEEDRKKGKKFARYQLGDLLLHLEKKHGEDWGKVYDEAWERIDKKVEGLSKHIKLEEERRSEDAQSKAALTDWLRAKASFVIEGLKEADKDEFCRCELKLQKWYGDLRGKPFAIEAENSILDISGFSKQYNCAFIWQKDGVKKLNLYLIINYFKGGKLRFKKIKPEAFEANRFYTVINKKSGEIVPMEVNFNFDDPNLIILPLAFGKRQGREFIWNDLLSLETGSLKLANGRVIEKTLYNRRTRQDEPALFVALTFERREVLDSSNIKPMNLIGVDRGENIPAVIALTDPEGCPLSRFKDSLGNPTHILRIGESYKEKQRTIQAKKEVEQRRAGGYSRKYASKAKNLADDMVRNTARDLLYYAVTQDAMLIFENLSRGFGRQGKRTFMAERQYTRMEDWLTAKLAYEGLPSQTYLSKTLAQYTSKTCSNCGFTITSADYDRVLEKLKKTATGWMTTINGKELKVEGQITYYNRYKRQNVVKDLSVELDRLSEESVNNDISSWTKGRSGEALSLLKKRFSHRPVQEKFVCLNCGFETHADEQAALNIARSWLFLRSQEYKKYQTNKTTGNTDKRAFVETWQSFYRKKLKEVWKPAV

SEQ ID NO: 42910 - protein, 978 aa, synthetic construct
  REGION 1..978: note = engineered CasX variant
QEIKRINKIRRRLVKDSNTKKAGKTGPMKTLLVRVMTPDLRERLENLRKKPENIPQPISNTSRANLNKLLTDYTEMKKAILHVYWEEFQKDPVGLMSRVAQPASKKIDQNKLKPEMDEKGNLTTAGFACSQCGQPLFVYKLEQVSEKGKAYTNYFGRCNVAEHEKLIKLAQLKPEKDSDEAVTYSLGKFGQRALDFYSIHVTKESTHPVKPLAQIAGNRYASAPVGKALSDACMGTIASFLSKYQDIIIEHQKVVKGNQKRLESLRELAGKENLEYPSVTLPPQPHTKEGVDAYNEVIARVRMWVNLNLWQKLKLSRDDAKPLLRLKGFPSFPLVERQANEVDWWDMVCNVKKLINEKKEDGKVFWQNLAGYKRQEALRPYLSSEEDRKKGKKFARYQLGDLLLHLEKKHGEDWGKVYDEAWERIDKKVEGLSKHIKLEEERRSEDAQSKAALTDWLRAKASFVIEGLKEADKDEFCRCELKLQKWYGDLRGKPFAIEAENSILDISGFSKQYNCAFIWQKDGVKKLNLYLIINYFKGGKLRFKKIKPEAFEANRFYTVINKKSGEIVPMEVNFNFDDPNLIILPLAFGKRQGREFIWNDLLSLETGSLKLANGRVIEKTLYNRRTRQDEPALFVALTFERREVLDSSNIKPMNLIGVDRGENIPAVIALTDPEGCPLSRFKDSLGNPTHILRIGESYKEKQRTIQAKKEVEQRRAGGYSRKYASKAKNLADDMVRNTARDLLYYAVTQDAMLIFENLSRGFGRQGKRTFMAERQYTRMEDWLTAKLAYEGLPSQTYLSKTLAQYTSKTCSNCGFTITSADYDRVLEKLKKTATGWMTTINGKELKVEGQITYYNRYKRQNVVKDLSVELDRLSEESVNNDISSWTKGRSGEALSLLKKRFSHRPVQEKFVCLNCGFETHADEQAALNIARSWLFLRSQEYKKYQTNKTTGNTDKRAFVETWQSFYRKKLKEVWKPAV

SEQ ID NO: 42911 - protein, 978 aa, synthetic construct
  REGION 1..978: note = engineered CasX variant
QEIKRINKIRRRLVKDSNTKKAGKTGPMKTLLVRVMTPDLRERLENLRKKPENIPQPISNTSRANLNKLLTDYTEMKKAILHVYWEEFQKDPVGLMSRVAQPASKKIDQNKLKPEMDEKGNLTTAGFACSQCGQPLFVYKLEQVSEKGKAYTNYFGRCNVAEHEKLIKLAQLKPEKDSDEAVTYSLGKFGQRALDFYSIHVTKESTHPVKPLAQIAGNRYASVPVGKALSDACMGTIASFLSKYQDIIIEHQKVVKGNQKRLESLRELAGKENLEYPSVTLPPQPHTKEGVDAYNEVIARVRMWVNLNLWQKLKLSRDDAKPLLRLKGFPSFPLVERQANEVDWWDMVCNVKKLINEKKEDGKVFWQNLAGYKRQEALRPYLSSEEDRKKGKKFARYQLGDLLLHLEKKHGEDWGKVYDEAWERIDKKVEGLSKHIKLEEERRSEDAQSKAALTDWLRAKASFVIEGLKEADKDEFCRCELKLQKWYGDLRGKPFAIEAENSILDISGFSKQYNCAFIWQKDGVKKLNLYLIINYFKGGKLRFKKIKPEAFEANRFYTVINKKSGEIVPMEVNFNFDDPNLIILPLAFGKRQGREFIWNDLLSLETGSLKLANGRVIEKTLYNRRTRQDEPALFVALTFERREVLDSSNIKPMNLIGVDRGENIPAVIALTDPEGCPLSRFKDSLGNPTHILRIGESYKEKQRTIQAKKEVEQRRAGGYSRKYASKAKNLADDMVRNTARDLLYYAVTQDAMLIFENLSRGFGRQGKRTFMAERQYTRMEDWLTAKLAYEGLPSQTYLSKTLAQYTSKTCSNCGFTITSADYDRVLEKLKKTATGWMTTINGKELKVEGQITYYNRYKRQNVVKDLSVELDRLSEESVNNDISSWTKGRSGEALSLLKKRFSHRPVQEKFVCLNCGFETHADEQAALNIARSWLFLRSQEYKKYQTNKTTGNTDKRAFVETWQSFYRKKLKEVWKPAV

SEQ ID NO: 42912 - protein, 979 aa, synthetic construct
  REGION 1..979: note = engineered CasX variant
QEIKRINKIRRRLVKDSNTKKAGKTGPMKTLLVRVMTPDLRERLENLRKKPENIPQPISNTSRANLNKLLTDYTEMKKAILHVYWEEFQKDPVGLMSRVAQPASKKIDQNKLKPEMDEKGNLTTAGFACSQCGQPLFVYKLEQVSEKGKAYTNYFGRCNVAEHEKLIKKLAQLKPEKDSDEAVTYSLGKFGQRALDFYSIHVTKESTHPVKPLAQIAGNRYASGPVGKALSDACMGTIASFLSKYQDIIIEHQKVVKGNQKRLESLRELAGKENLEYPSVTLPPQPHTKEGVDAYNEVIARVRMWVNLNLWQKLKLSRDDAKPLLRLKGFPSFPLVERQANEVDWWDMVCNVKKLINEKKEDGKVFWQNLAGYKRQEALRPYLSSEEDRKKGKKFARYQLGDLLLHLEKKHGEDWGKVYDEAWERIDKKVEGLSKHIKLEEERRSEDAQSKAALTDWLRAKASFVIEGLKEADKDEFCRCELKLQKWYGDLRGKPFAIEAENSILDISGFSKQYNCAFIWQKDGVKKLNLYLIINYFKGGKLRFKKIKPEAFEANRFYTVINKKSGEIVPMEVNFNFDDPNLIILPLAFGKRQGREFIWNDLLSLETGSLKLANGRVIEKTLYNRRTRQDEPALFVALTFERREVLDSSNIKPMNLIGVDRGENIPAVIALTDPEGCPLSRFKDSLGNPTHILRIGESYKEKQRTIQAKKEVEQRRAGGYSRKYASKAKNLADDMVRNTARDLLYYAVTQDAMLIFENLSRGFGRQGKRTFMAERQYTRMEDWLTAKLAYEGLPSQTYLSKTLAQYTSKTCSNCGFTITSADYDRVLEKLKKTATGWMTTINGKELKVEGQITYYNRYKRQNVVKDLSVELDRLSEESVNNDISSWTKGRSGEALSLLKKRFSHRPVQEKFVCLNCGFETHADEQAALNIARSWLFLRSQEYKKYQTNKTTGNTDKRAFVETWQSFYRKKLKEVWKPAV

SEQ ID NO: 42913 - protein, 977 aa, synthetic construct
  REGION 1..977: note = engineered CasX variant
QEIKRINKIRRRLVKDSNTKKAGKTGPMKTLLVRVMTPDLRERLENLRKKPENIPQPISNTSRANLNKLLTDYTEMKKAILHVYWEEFQKDPVGLMSRVAQPASKKIDQNKLKPEMDEKGNLTTAGFACSQCGQPLFVYKLEQVSEKGKAYTNYFGRCNVAEHEKLIKLAQLKPEKDSDEAVTYSLGKFGQRALDFYSIHVTKESTHPVKPLAQIAGNRYASPVGKALSDACMGTIASFLSKYQDIIIEHQKVVKGNQKRLESLRELAGKENLEYPSVTLPPQPHTKEGVDAYNEVIARVRMWVNLNLWQKLKLSRDDAKPLLRLKGFPSFPLVERQANEVDWWDMVCNVKKLINEKKEDGKVFWQNLAGYKRQEALRPYLSSEEDRKKGKKFARYQLGDLLLHLEKKHGEDWGKVYDEAWERIDKKVEGLSKHIKLEEERRSEDAQSKAALTDWLRAKASFVIEGLKEADKDEFCRCELKLQKWYGDLRGKPFAIEAENSILDISGFSKQYNCAFIWQKDGVKKLNLYLIINYFKGGKLRFKKIKPEAFEANRFYTVINKKSGEIVPMEVNFNFDDPNLIILPLAFGKRQGREFIWNDLLSLETGSLKLANGRVIEKTLYNRRTRQDEPALFVALTFERREVLDSSNIKPMNLIGVDRGENIPAVIALTDPEGCPLSRFKDSLGNPTHILRIGESYKEKQRTIQAKKEVEQRRAGGYSRKYASKAKNLADDMVRNTARDLLYYAVTQDAMLIFENLSRGFGRQGKRTFMAERQYTRMEDWLTAKLAYEGLPSQTYLSKTLAQYTSKTCSNCGFTITSADYDRVLEKLKKTATGWMTTINGKELKVEGQITYYNRYKRQNVVKDLSVELDRLSEESVNNDISSWTKGRSGEALSLLKKRFSHRPVQEKFVCLNCGFETHADEQAALNIARSWLFLRSQEYKKYQTNKTTGNTDKRAFVETWQSFYRKKLKEVWKPAV

SEQ ID NO: 42914 - protein, 978 aa, synthetic construct
  REGION 1..978: note = engineered CasX variant
QEIKRINKIRRRLVKDSNTKKAGKTGPMKTLLVRVMTPDLRERLENLRKKPENIPQPISNTSRANLNKLLTDYTEMKKAILHVYWEEFQKDPVGLMSRVAQPASKKIDQNKLKPEMDEKGNLTTAGFACSQCGQPLFVYKLEQVSEKGKAYTNYFGRCNVAEHEKLIKLAQLKPEKDSDEAVTYSLGKFGQRALDFYSIHVTKESTHPVKPLAQIAGNRYASYPVGKALSDACMGTIASFLSKYQDIIIEHQKVVKGNQKRLESLRELAGKENLEYPSVTLPPQPHTKEGVDAYNEVIARVRMWVNLNLWQKLKLSRDDAKPLLRLKGFPSFPLVERQANEVDWWDMVCNVKKLINEKKEDGKVFWQNLAGYKRQEALRPYLSSEEDRKKGKKFARYQLGDLLLHLEKKHGEDWGKVYDEAWERIDKKVEGLSKHIKLEEERRSEDAQSKAALTDWLRAKASFVIEGLKEADKDEFCRCELKLQKWYGDLRGKPFAIEAENSILDISGFSKQYNCAFIWQKDGVKKLNLYLIINYFKGGKLRFKKIKPEAFEANRFYTVINKKSGEIVPMEVNFNFDDPNLIILPLAFGKRQGREFIWNDLLSLETGSLKLANGRVIEKTLYNRRTRQDEPALFVALTFERREVLDSSNIKPMNLIGVDRGENIPAVIALTDPEGCPLSRFKDSLGNPTHILRIGESYKEKQRTIQAKKEVEQRRAGGYSRKYASKAKNLADDMVRNTARDLLYYAVTQDAMLIFENLSRGFGRQGKRTFMAERQYTRMEDWLTAKLAYNGLPSKTYLSKTLAQYTSKTCSNCGFTITSADYDRVLEKLKKTATGWMTTINGKELKVEGQITYYNRYKRQNVVKDLSVELDRLSEESVNNDISSWTKGRSGEALSLLKKRFSHRPVQEKFVCLNCGFETHADEQAALNIARSWLFLRSQEYKKYQTNKTTGNTDKRAFVETWQSFYRKKLKEVWKPAV

SEQ ID NO: 42915 - protein, 978 aa, synthetic construct
  REGION 1..978: note = engineered CasX variant
QEIKRINKIRRRLVKDSNTKKAGKTGPMKTLLVRVMTPDLRERLENLRKKPENIPQPISNTSRANLNKLLTDYTEMKKAILHVYWEEFQKDPVGLMSRVAQPASKKIDQNKLKPEMDEKGNLTTAGFACSQCGQPLFVYKLEQVSEKGKAYTNYFGRCNVAEHEKLIKLAQLKPEKDSDEAVTYSLGKFGQRALDFYSIHVTKESTHPVKPLAQIAGNRYASHPVGKALSDACMGTIASFLSKYQDIIIEHQKVVKGNQKRLESLRELAGKENLEYPSVTLPPQPHTKEGVDAYNEVIARVRMWVNLNLWQKLKLSRDDAKPLLRLKGFPSFPLVERQANEVDWWDMVCNVKKLINEKKEDGKVFWQNLAGYKRQEALRPYLSSEEDRKKGKKFARYQLGDLLLHLEKKHGEDWGKVYDEAWERIDKKVEGLSKHIKLEEERRSEDAQSKAALTDWLRAKASFVIEGLKEADKDEFCRCELKLQKWYGDLRGKPFAIEAENSILDISGFSKQYNCAFIWQKDGVKKLNLYLIINYFKGGKLRFKKIKPEAFEANRFYTVINKKSGEIVPMEVNFNFDDPNLIILPLAFGKRQGREFIWNDLLSLETGSLKLANGRVIEKTLYNRRTRQDEPALFVALTFERREVLDSSNIKPMNLIGVDRGENIPAVIALTDPEGCPLSRFKDSLGNPTHILRIGESYKEKQRTIQAKKEVEQRRAGGYSRKYASKAKNLADDMVRNTARDLLYYAVTQDAMLIFENLSRGFGRQGKRTFMAERQYTRMEDWLTAKLAYNGLPSKTYLSKTLAQYTSKTCSNCGFTITSADYDRVLEKLKKTATGWMTTINGKELKVEGQITYYNRYKRQNVVKDLSVELDRLSEESVNNDISSWTKGRSGEALSLLKKRFSHRPVQEKFVCLNCGFETHADEQAALNIARSWLFLRSQEYKKYQTNKTTGNTDKRAFVETWQSFYRKKLKEVWKPAV

SEQ ID NO: 42916 - protein, 978 aa, synthetic construct
  REGION 1..978: note = engineered CasX variant
QEIKRINKIRRRLVKDSNTKKAGKTGPMKTLLVRVMTPDLRERLENLRKKPENIPQPISNTSRANLNKLLTDYTEMKKAILHVYWEEFQKDPVGLMSRVAQPASKKIDQNKLKPEMDEKGNLTTAGFACSQCGQPLFVYKLEQVSEKGKAYTNYFGRCNVAEHEKLIKLAQLKPEKDSDEAVTYSLGKFGQRALDFYSIHVTKESTHPVKPLAQIAGNRYASTPVGKALSDACMGTIASFLSKYQDIIIEHQKVVKGNQKRLESLRELAGKENLEYPSVTLPPQPHTKEGVDAYNEVIARVRMWVNLNLWQKLKLSRDDAKPLLRLKGFPSFPLVERQANEVDWWDMVCNVKKLINEKKEDGKVFWQNLAGYKRQEALRPYLSSEEDRKKGKKFARYQLGDLLLHLEKKHGEDWGKVYDEAWERIDKKVEGLSKHIKLEEERRSEDAQSKAALTDWLRAKASFVIEGLKEADKDEFCRCELKLQKWYGDLRGKPFAIEAENSILDISGFSKQYNCAFIWQKDGVKKLNLYLIINYFKGGKLRFKKIKPEAFEANRFYTVINKKSGEIVPMEVNFNFDDPNLIILPLAFGKRQGREFIWNDLLSLETGSLKLANGRVIEKTLYNRRTRQDEPALFVALTFERREVLDSSNIKPMNLIGVDRGENIPAVIALTDPEGCPLSRFKDSLGNPTHILRIGESYKEKQRTIQAKKEVEQRRAGGYSRKYASKAKNLADDMVRNTARDLLYYAVTQDAMLIFENLSRGFGRQGKRTFMAERQYTRMEDWLTAKLAYNGLPSKTYLSKTLAQYTSKTCSNCGFTITSADYDRVLEKLKKTATGWMTTINGKELKVEGQITYYNRYKRQNVVKDLSVELDRLSEESVNNDISSWTKGRSGEALSLLKKRFSHRPVQEKFVCLNCGFETHADEQAALNIARSWLFLRSQEYKKYQTNKTTGNTDKRAFVETWQSFYRKKLKEVWKPAV

SEQ ID NO: 42917 - protein, 978 aa, synthetic construct
  REGION 1..978: note = engineered CasX variant
QEIKRINKIRRRLVKDSNTKKAGKTGPMKTLLVRVMTPDLRERLENLRKKPENIPQPISNTSRANLNKLLTDYTEMKKAILHVYWEEFQKDPVGLMSRVAQPASKKIDQNKLKPEMDEKGNLTTAGFACSQCGQPLFVYKLEQVSEKGKAYTNYFGRCNVAEHEKLIKLAQLKPEKDSDEAVTYSLGKFGQRALDFYSIHVTKESTHPVKPLAQIAGNRYASAPVGKALSDACMGTIASFLSKYQDIIIEHQKVVKGNQKRLESLRELAGKENLEYPSVTLPPQPHTKEGVDAYNEVIARVRMWVNLNLWQKLKLSRDDAKPLLRLKGFPSFPLVERQANEVDWWDMVCNVKKLINEKKEDGKVFWQNLAGYKRQEALRPYLSSEEDRKKGKKFARYQLGDLLLHLEKKHGEDWGKVYDEAWERIDKKVEGLSKHIKLEEERRSEDAQSKAALTDWLRAKASFVIEGLKEADKDEFCRCELKLQKWYGDLRGKPFAIEAENSILDISGFSKQYNCAFIWQKDGVKKLNLYLIINYFKGGKLRFKKIKPEAFEANRFYTVINKKSGEIVPMEVNFNFDDPNLIILPLAFGKRQGREFIWNDLLSLETGSLKLANGRVIEKTLYNRRTRQDEPALFVALTFERREVLDSSNIKPMNLIGVDRGENIPAVIALTDPEGCPLSRFKDSLGNPTHILRIGESYKEKQRTIQAKKEVEQRRAGGYSRKYASKAKNLADDMVRNTARDLLYYAVTQDAMLIFENLSRGFGRQGKRTFMAERQYTRMEDWLTAKLAYNGLPSKTYLSKTLAQYTSKTCSNCGFTITSADYDRVLEKLKKTATGWMTTINGKELKVEGQITYYNRYKRQNVVKDLSVELDRLSEESVNNDISSWTKGRSGEALSLLKKRFSHRPVQEKFVCLNCGFETHADEQAALNIARSWLFLRSQEYKKYQTNKTTGNTDKRAFVETWQSFYRKKLKEVWKPAV

SEQ ID NO: 42918 - protein, 978 aa, synthetic construct
  REGION 1..978: note = engineered CasX variant
QEIKRINKIRRRLVKDSNTKKAGKTGPMKTLLVRVMTPDLRERLENLRKKPENIPQPISNTSRANLNKLLTDYTEMKKAILHVYWEEFQKDPVGLMSRVAQPASKKIDQNKLKPEMDEKGNLTTAGFACSQCGQPLFVYKLEQVSEKGKAYTNYFGRCNVAEHEKLIKLAQLKPEKDSDEAVTYSLGKFGQRALDFYSIHVTKESTHPVKPLAQIAGNRYASVPVGKALSDACMGTIASFLSKYQDIIIEHQKVVKGNQKRLESLRELAGKENLEYPSVTLPPQPHTKEGVDAYNEVIARVRMWVNLNLWQKLKLSRDDAKPLLRLKGFPSFPLVERQANEVDWWDMVCNVKKLINEKKEDGKVFWQNLAGYKRQEALRPYLSSEEDRKKGKKFARYQLGDLLLHLEKKHGEDWGKVYDEAWERIDKKVEGLSKHIKLEEERRSEDAQSKAALTDWLRAKASFVIEGLKEADKDEFCRCELKLQKWYGDLRGKPFAIEAENSILDISGFSKQYNCAFIWQKDGVKKLNLYLIINYFKGGKLRFKKIKPEAFEANRFYTVINKKSGEIVPMEVNFNFDDPNLIILPLAFGKRQGREFIWNDLLSLETGSLKLANGRVIEKTLYNRRTRQDEPALFVALTFERREVLDSSNIKPMNLIGVDRGENIPAVIALTDPEGCPLSRFKDSLGNPTHILRIGESYKEKQRTIQAKKEVEQRRAGGYSRKYASKAKNLADDMVRNTARDLLYYAVTQDAMLIFENLSRGFGRQGKRTFMAERQYTRMEDWLTAKLAYNGLPSKTYLSKTLAQYTSKTCSNCGFTITSADYDRVLEKLKKTATGWMTTINGKELKVEGQITYYNRYKRQNVVKDLSVELDRLSEESVNNDISSWTKGRSGEALSLLKKRFSHRPVQEKFVCLNCGFETHADEQAALNIARSWLFLRSQEYKKYQTNKTTGNTDKRAFVETWQSFYRKKLKEVWKPAV

SEQ ID NO: 42919 - protein, 979 aa, synthetic construct
  REGION 1..979: note = engineered CasX variant
QEIKRINKIRRRLVKDSNTKKAGKTGPMKTLLVRVMTPDLRERLENLRKKPENIPQPISNTSRANLNKLLTDYTEMKKAILHVYWEEFQKDPVGLMSRVAQPASKKIDQNKLKPEMDEKGNLTTAGFACSQCGQPLFVYKLEQVSEKGKAYTNYFGRCNVAEHEKLIKKLAQLKPEKDSDEAVTYSLGKFGQRALDFYSIHVTKESTHPVKPLAQIAGNRYASGPVGKALSDACMGTIASFLSKYQDIIIEHQKVVKGNQKRLESLRELAGKENLEYPSVTLPPQPHTKEGVDAYNEVIARVRMWVNLNLWQKLKLSRDDAKPLLRLKGFPSFPLVERQANEVDWWDMVCNVKKLINEKKEDGKVFWQNLAGYKRQEALRPYLSSEEDRKKGKKFARYQLGDLLLHLEKKHGEDWGKVYDEAWERIDKKVEGLSKHIKLEEERRSEDAQSKAALTDWLRAKASFVIEGLKEADKDEFCRCELKLQKWYGDLRGKPFAIEAENSILDISGFSKQYNCAFIWQKDGVKKLNLYLIINYFKGGKLRFKKIKPEAFEANRFYTVINKKSGEIVPMEVNFNFDDPNLIILPLAFGKRQGREFIWNDLLSLETGSLKLANGRVIEKTLYNRRTRQDEPALFVALTFERREVLDSSNIKPMNLIGVDRGENIPAVIALTDPEGCPLSRFKDSLGNPTHILRIGESYKEKQRTIQAKKEVEQRRAGGYSRKYASKAKNLADDMVRNTARDLLYYAVTQDAMLIFENLSRGFGRQGKRTFMAERQYTRMEDWLTAKLAYNGLPSKTYLSKTLAQYTSKTCSNCGFTITSADYDRVLEKLKKTATGWMTTINGKELKVEGQITYYNRYKRQNVVKDLSVELDRLSEESVNNDISSWTKGRSGEALSLLKKRFSHRPVQEKFVCLNCGFETHADEQAALNIARSWLFLRSQEYKKYQTNKTTGNTDKRAFVETWQSFYRKKLKEVWKPAV

SEQ ID NO: 42920 - protein, 977 aa, synthetic construct
  REGION 1..977: note = engineered CasX variant
QEIKRINKIRRRLVKDSNTKKAGKTGPMKTLLVRVMTPDLRERLENLRKKPENIPQPISNTSRANLNKLLTDYTEMKKAILHVYWEEFQKDPVGLMSRVAQPASKKIDQNKLKPEMDEKGNLTTAGFACSQCGQPLFVYKLEQVSEKGKAYTNYFGRCNVAEHEKLIKLAQLKPEKDSDEAVTYSLGKFGQRALDFYSIHVTKESTHPVKPLAQIAGNRYASPVGKALSDACMGTIASFLSKYQDIIIEHQKVVKGNQKRLESLRELAGKENLEYPSVTLPPQPHTKEGVDAYNEVIARVRMWVNLNLWQKLKLSRDDAKPLLRLKGFPSFPLVERQANEVDWWDMVCNVKKLINEKKEDGKVFWQNLAGYKRQEALRPYLSSEEDRKKGKKFARYQLGDLLLHLEKKHGEDWGKVYDEAWERIDKKVEGLSKHIKLEEERRSEDAQSKAALTDWLRAKASFVIEGLKEADKDEFCRCELKLQKWYGDLRGKPFAIEAENSILDISGFSKQYNCAFIWQKDGVKKLNLYLIINYFKGGKLRFKKIKPEAFEANRFYTVINKKSGEIVPMEVNFNFDDPNLIILPLAFGKRQGREFIWNDLLSLETGSLKLANGRVIEKTLYNRRTRQDEPALFVALTFERREVLDSSNIKPMNLIGVDRGENIPAVIALTDPEGCPLSRFKDSLGNPTHILRIGESYKEKQRTIQAKKEVEQRRAGGYSRKYASKAKNLADDMVRNTARDLLYYAVTQDAMLIFENLSRGFGRQGKRTFMAERQYTRMEDWLTAKLAYNGLPSKTYLSKTLAQYTSKTCSNCGFTITSADYDRVLEKLKKTATGWMTTINGKELKVEGQITYYNRYKRQNVVKDLSVELDRLSEESVNNDISSWTKGRSGEALSLLKKRFSHRPVQEKFVCLNCGFETHADEQAALNIARSWLFLRSQEYKKYQTNKTTGNTDKRAFVETWQSFYRKKLKEVWKPAV

SEQ ID NO: 42921 - protein, 979 aa, synthetic construct
  REGION 1..979: note = engineered CasX variant
QEIKRINKIRRRLVKDSNTKKAGKTGPMKTLLVRVMTPDLRERLENLRKKPENIPQPISNTSRANLNKLLTDYTEMKKAILHVYWEEFQKDPVGLMSRVAQPASKKIDQNKLKPEMDEKGNLTTAGFACSQCGQPLFVYKLEQVSEKGKAYTNYFGRCNVAEHEKLIKQLAQLKPEKDSDEAVTYSLGKFGQRALDFYSIHVTKESTHPVKPLAQIAGNRYASYPVGKALSDACMGTIASFLSKYQDIIIEHQKVVKGNQKRLESLRELAGKENLEYPSVTLPPQPHTKEGVDAYNEVIARVRMWVNLNLWQKLKLSRDDAKPLLRLKGFPSFPLVERQANEVDWWDMVCNVKKLINEKKEDGKVFWQNLAGYKRQEALRPYLSSEEDRKKGKKFARYQLGDLLLHLEKKHGEDWGKVYDEAWERIDKKVEGLSKHIKLEEERRSEDAQSKAALTDWLRAKASFVIEGLKEADKDEFCRCELKLQKWYGDLRGKPFAIEAENSILDISGFSKQYNCAFIWQKDGVKKLNLYLIINYFKGGKLRFKKIKPEAFEANRFYTVINKKSGEIVPMEVNFNFDDPNLIILPLAFGKRQGREFIWNDLLSLETGSLKLANGRVIEKTLYNRRTRQDEPALFVALTFERREVLDSSNIKPMNLIGVDRGENIPAVIALTDPEGCPLSRFKDSLGNPTHILRIGESYKEKQRTIQAKKEVEQRRAGGYSRKYASKAKNLADDMVRNTARDLLYYAVTQDAMLIFENLSRGFGRQGKRTFMAERQYTRMEDWLTAKLAYEGLPSKTYLSKTLAQYTSKTCSNCGFTITSADYDRVLEKLKKTATGWMTTINGKELKVEGQITYYNRYKRQNVVKDLSVELDRLSEESVNNDISSWTKGRSGEALSLLKKRFSHRPVQEKFVCLNCGFETHADEQAALNIARSWLFLRSQEYKKYQTNKTTGNTDKRAFVETWQSFYRKKLKEVWKPAV

SEQ ID NO: 42922 - protein, 979 aa, synthetic construct
  REGION 1..979: note = engineered CasX variant
QEIKRINKIRRRLVKDSNTKKAGKTGPMKTLLVRVMTPDLRERLENLRKKPENIPQPISNTSRANLNKLLTDYTEMKKAILHVYWEEFQKDPVGLMSRVAQPASKKIDQNKLKPEMDEKGNLTTAGFACSQCGQPLFVYKLEQVSEKGKAYTNYFGRCNVAEHEKLIKQLAQLKPEKDSDEAVTYSLGKFGQRALDFYSIHVTKESTHPVKPLAQIAGNRYASHPVGKALSDACMGTIASFLSKYQDIIIEHQKVVKGNQKRLESLRELAGKENLEYPSVTLPPQPHTKEGVDAYNEVIARVRMWVNLNLWQKLKLSRDDAKPLLRLKGFPSFPLVERQANEVDWWDMVCNVKKLINEKKEDGKVFWQNLAGYKRQEALRPYLSSEEDRKKGKKFARYQLGDLLLHLEKKHGEDWGKVYDEAWERIDKKVEGLSKHIKLEEERRSEDAQSKAALTDWLRAKASFVIEGLKEADKDEFCRCELKLQKWYGDLRGKPFAIEAENSILDISGFSKQYNCAFIWQKDGVKKLNLYLIINYFKGGKLRFKKIKPEAFEANRFYTVINKKSGEIVPMEVNFNFDDPNLIILPLAFGKRQGREFIWNDLLSLETGSLKLANGRVIEKTLYNRRTRQDEPALFVALTFERREVLDSSNIKPMNLIGVDRGENIPAVIALTDPEGCPLSRFKDSLGNPTHILRIGESYKEKQRTIQAKKEVEQRRAGGYSRKYASKAKNLADDMVRNTARDLLYYAVTQDAMLIFENLSRGFGRQGKRTFMAERQYTRMEDWLTAKLAYEGLPSKTYLSKTLAQYTSKTCSNCGFTITSADYDRVLEKLKKTATGWMTTINGKELKVEGQITYYNRYKRQNVVKDLSVELDRLSEESVNNDISSWTKGRSGEALSLLKKRFSHRPVQEKFVCLNCGFETHADEQAALNIARSWLFLRSQEYKKYQTNKTTGNTDKRAFVETWQSFYRKKLKEVWKPAV

SEQ ID NO: 42923 - protein, 979 aa, synthetic construct
  REGION 1..979: note = engineered CasX variant
QEIKRINKIRRRLVKDSNTKKAGKTGPMKTLLVRVMTPDLRERLENLRKKPENIPQPISNTSRANLNKLLTDYTEMKKAILHVYWEEFQKDPVGLMSRVAQPASKKIDQNKLKPEMDEKGNLTTAGFACSQCGQPLFVYKLEQVSEKGKAYTNYFGRCNVAEHEKLIKQLAQLKPEKDSDEAVTYSLGKFGQRALDFYSIHVTKESTHPVKPLAQIAGNRYASSPVGKALSDACMGTIASFLSKYQDIIIEHQKVVKGNQKRLESLRELAGKENLEYPSVTLPPQPHTKEGVDAYNEVIARVRMWVNLNLWQKLKLSRDDAKPLLRLKGFPSFPLVERQANEVDWWDMVCNVKKLINEKKEDGKVFWQNLAGYKRQEALRPYLSSEEDRKKGKKFARYQLGDLLLHLEKKHGEDWGKVYDEAWERIDKKVEGLSKHIKLEEERRSEDAQSKAALTDWLRAKASFVIEGLKEADKDEFCRCELKLQKWYGDLRGKPFAIEAENSILDISGFSKQYNCAFIWQKDGVKKLNLYLIINYFKGGKLRFKKIKPEAFEANRFYTVINKKSGEIVPMEVNFNFDDPNLIILPLAFGKRQGREFIWNDLLSLETGSLKLANGRVIEKTLYNRRTRQDEPALFVALTFERREVLDSSNIKPMNLIGVDRGENIPAVIALTDPEGCPLSRFKDSLGNPTHILRIGESYKEKQRTIQAKKEVEQRRAGGYSRKYASKAKNLADDMVRNTARDLLYYAVTQDAMLIFENLSRGFGRQGKRTFMAERQYTRMEDWLTAKLAYEGLPSKTYLSKTLAQYTSKTCSNCGFTITSADYDRVLEKLKKTATGWMTTINGKELKVEGQITYYNRYKRQNVVKDLSVELDRLSEESVNNDISSWTKGRSGEALSLLKKRFSHRPVQEKFVCLNCGFETHADEQAALNIARSWLFLRSQEYKKYQTNKTTGNTDKRAFVETWQSFYRKKLKEVWKPAV

SEQ ID NO: 42924 - protein, 979 aa, synthetic construct
  REGION 1..979: note = engineered CasX variant
QEIKRINKIRRRLVKDSNTKKAGKTGPMKTLLVRVMTPDLRERLENLRKKPENIPQPISNTSRANLNKLLTDYTEMKKAILHVYWEEFQKDPVGLMSRVAQPASKKIDQNKLKPEMDEKGNLTTAGFACSQCGQPLFVYKLEQVSEKGKAYTNYFGRCNVAEHEKLIKQLAQLKPEKDSDEAVTYSLGKFGQRALDFYSIHVTKESTHPVKPLAQIAGNRYASTPVGKALSDACMGTIASFLSKYQDIIIEHQKVVKGNQKRLESLRELAGKENLEYPSVTLPPQPHTKEGVDAYNEVIARVRMWVNLNLWQKLKLSRDDAKPLLRLKGFPSFPLVERQANEVDWWDMVCNVKKLINEKKEDGKVFWQNLAGYKRQEALRPYLSSEEDRKKGKKFARYQLGDLLLHLEKKHGEDWGKVYDEAWERIDKKVEGLSKHIKLEEERRSEDAQSKAALTDWLRAKASFVIEGLKEADKDEFCRCELKLQKWYGDLRGKPFAIEAENSILDISGFSKQYNCAFIWQKDGVKKLNLYLIINYFKGGKLRFKKIKPEAFEANRFYTVINKKSGEIVPMEVNFNFDDPNLIILPLAFGKRQGREFIWNDLLSLETGSLKLANGRVIEKTLYNRRTRQDEPALFVALTFERREVLDSSNIKPMNLIGVDRGENIPAVIALTDPEGCPLSRFKDSLGNPTHILRIGESYKEKQRTIQAKKEVEQRRAGGYSRKYASKAKNLADDMVRNTARDLLYYAVTQDAMLIFENLSRGFGRQGKRTFMAERQYTRMEDWLTAKLAYEGLPSKTYLSKTLAQYTSKTCSNCGFTITSADYDRVLEKLKKTATGWMTTINGKELKVEGQITYYNRYKRQNVVKDLSVELDRLSEESVNNDISSWTKGRSGEALSLLKKRFSHRPVQEKFVCLNCGFETHADEQAALNIARSWLFLRSQEYKKYQTNKTTGNTDKRAFVETWQSFYRKKLKEVWKPAV

SEQ ID NO: 42925 - protein, 979 aa, synthetic construct
  REGION 1..979: note = engineered CasX variant
QEIKRINKIRRRLVKDSNTKKAGKTGPMKTLLVRVMTPDLRERLENLRKKPENIPQPISNTSRANLNKLLTDYTEMKKAILHVYWEEFQKDPVGLMSRVAQPASKKIDQNKLKPEMDEKGNLTTAGFACSQCGQPLFVYKLEQVSEKGKAYTNYFGRCNVAEHEKLIKQLAQLKPEKDSDEAVTYSLGKFGQRALDFYSIHVTKESTHPVKPLAQIAGNRYASAPVGKALSDACMGTIASFLSKYQDIIIEHQKVVKGNQKRLESLRELAGKENLEYPSVTLPPQPHTKEGVDAYNEVIARVRMWVNLNLWQKLKLSRDDAKPLLRLKGFPSFPLVERQANEVDWWDMVCNVKKLINEKKEDGKVFWQNLAGYKRQEALRPYLSSEEDRKKGKKFARYQLGDLLLHLEKKHGEDWGKVYDEAWERIDKKVEGLSKHIKLEEERRSEDAQSKAALTDWLRAKASFVIEGLKEADKDEFCRCELKLQKWYGDLRGKPFAIEAENSILDISGFSKQYNCAFIWQKDGVKKLNLYLIINYFKGGKLRFKKIKPEAFEANRFYTVINKKSGEIVPMEVNFNFDDPNLIILPLAFGKRQGREFIWNDLLSLETGSLKLANGRVIEKTLYNRRTRQDEPALFVALTFERREVLDSSNIKPMNLIGVDRGENIPAVIALTDPEGCPLSRFKDSLGNPTHILRIGESYKEKQRTIQAKKEVEQRRAGGYSRKYASKAKNLADDMVRNTARDLLYYAVTQDAMLIFENLSRGFGRQGKRTFMAERQYTRMEDWLTAKLAYEGLPSKTYLSKTLAQYTSKTCSNCGFTITSADYDRVLEKLKKTATGWMTTINGKELKVEGQITYYNRYKRQNVVKDLSVELDRLSEESVNNDISSWTKGRSGEALSLLKKRFSHRPVQEKFVCLNCGFETHADEQAALNIARSWLFLRSQEYKKYQTNKTTGNTDKRAFVETWQSFYRKKLKEVWKPAV

SEQ ID NO: 42926 - protein, 979 aa, synthetic construct
  REGION 1..979: note = engineered CasX variant
QEIKRINKIRRRLVKDSNTKKAGKTGPMKTLLVRVMTPDLRERLENLRKKPENIPQPISNTSRANLNKLLTDYTEMKKAILHVYWEEFQKDPVGLMSRVAQPASKKIDQNKLKPEMDEKGNLTTAGFACSQCGQPLFVYKLEQVSEKGKAYTNYFGRCNVAEHEKLIKQLAQLKPEKDSDEAVTYSLGKFGQRALDFYSIHVTKESTHPVKPLAQIAGNRYASVPVGKALSDACMGTIASFLSKYQDIIIEHQKVVKGNQKRLESLRELAGKENLEYPSVTLPPQPHTKEGVDAYNEVIARVRMWVNLNLWQKLKLSRDDAKPLLRLKGFPSFPLVERQANEVDWWDMVCNVKKLINEKKEDGKVFWQNLAGYKRQEALRPYLSSEEDRKKGKKFARYQLGDLLLHLEKKHGEDWGKVYDEAWERIDKKVEGLSKHIKLEEERRSEDAQSKAALTDWLRAKASFVIEGLKEADKDEFCRCELKLQKWYGDLRGKPFAIEAENSILDISGFSKQYNCAFIWQKDGVKKLNLYLIINYFKGGKLRFKKIKPEAFEANRFYTVINKKSGEIVPMEVNFNFDDPNLIILPLAFGKRQGREFIWNDLLSLETGSLKLANGRVIEKTLYNRRTRQDEPALFVALTFERREVLDSSNIKPMNLIGVDRGENIPAVIALTDPEGCPLSRFKDSLGNPTHILRIGESYKEKQRTIQAKKEVEQRRAGGYSRKYASKAKNLADDMVRNTARDLLYYAVTQDAMLIFENLSRGFGRQGKRTFMAERQYTRMEDWLTAKLAYEGLPSKTYLSKTLAQYTSKTCSNCGFTITSADYDRVLEKLKKTATGWMTTINGKELKVEGQITYYNRYKRQNVVKDLSVELDRLSEESVNNDISSWTKGRSGEALSLLKKRFSHRPVQEKFVCLNCGFETHADEQAALNIARSWLFLRSQEYKKYQTNKTTGNTDKRAFVETWQSFYRKKLKEVWKPAV

SEQ ID NO: 42927 - protein, 980 aa, synthetic construct
  REGION 1..980: note = engineered CasX variant
QEIKRINKIRRRLVKDSNTKKAGKTGPMKTLLVRVMTPDLRERLENLRKKPENIPQPISNTSRANLNKLLTDYTEMKKAILHVYWEEFQKDPVGLMSRVAQPASKKIDQNKLKPEMDEKGNLTTAGFACSQCGQPLFVYKLEQVSEKGKAYTNYFGRCNVAEHEKLIKQKLAQLKPEKDSDEAVTYSLGKFGQRALDFYSIHVTKESTHPVKPLAQIAGNRYASGPVGKALSDACMGTIASFLSKYQDIIIEHQKVVKGNQKRLESLRELAGKENLEYPSVTLPPQPHTKEGVDAYNEVIARVRMWVNLNLWQKLKLSRDDAKPLLRLKGFPSFPLVERQANEVDWWDMVCNVKKLINEKKEDGKVFWQNLAGYKRQEALRPYLSSEEDRKKGKKFARYQLGDLLLHLEKKHGEDWGKVYDEAWERIDKKVEGLSKHIKLEEERRSEDAQSKAALTDWLRAKASFVIEGLKEADKDEFCRCELKLQKWYGDLRGKPFAIEAENSILDISGFSKQYNCAFIWQKDGVKKLNLYLIINYFKGGKLRFKKIKPEAFEANRFYTVINKKSGEIVPMEVNFNFDDPNLIILPLAFGKRQGREFIWNDLLSLETGSLKLANGRVIEKTLYNRRTRQDEPALFVALTFERREVLDSSNIKPMNLIGVDRGENIPAVIALTDPEGCPLSRFKDSLGNPTHILRIGESYKEKQRTIQAKKEVEQRRAGGYSRKYASKAKNLADDMVRNTARDLLYYAVTQDAMLIFENLSRGFGRQGKRTFMAERQYTRMEDWLTAKLAYEGLPSKTYLSKTLAQYTSKTCSNCGFTITSADYDRVLEKLKKTATGWMTTINGKELKVEGQITYYNRYKRQNVVKDLSVELDRLSEESVNNDISSWTKGRSGEALSLLKKRFSHRPVQEKFVCLNCGFETHADEQAALNIARSWLFLRSQEYKKYQTNKTTGNTDKRAFVETWQSFYRKKLKEVWKPAV

SEQ ID NO: 42928 - protein, 978 aa, synthetic construct
  REGION 1..978: note = engineered CasX variant
QEIKRINKIRRRLVKDSNTKKAGKTGPMKTLLVRVMTPDLRERLENLRKKPENIPQPISNTSRANLNKLLTDYTEMKKAILHVYWEEFQKDPVGLMSRVAQPASKKIDQNKLKPEMDEKGNLTTAGFACSQCGQPLFVYKLEQVSEKGKAYTNYFGRCNVAEHEKLIKQLAQLKPEKDSDEAVTYSLGKFGQRALDFYSIHVTKESTHPVKPLAQIAGNRYASPVGKALSDACMGTIASFLSKYQDIIIEHQKVVKGNQKRLESLRELAGKENLEYPSVTLPPQPHTKEGVDAYNEVIARVRMWVNLNLWQKLKLSRDDAKPLLRLKGFPSFPLVERQANEVDWWDMVCNVKKLINEKKEDGKVFWQNLAGYKRQEALRPYLSSEEDRKKGKKFARYQLGDLLLHLEKKHGEDWGKVYDEAWERIDKKVEGLSKHIKLEEERRSEDAQSKAALTDWLRAKASFVIEGLKEADKDEFCRCELKLQKWYGDLRGKPFAIEAENSILDISGFSKQYNCAFIWQKDGVKKLNLYLIINYFKGGKLRFKKIKPEAFEANRFYTVINKKSGEIVPMEVNFNFDDPNLIILPLAFGKRQGREFIWNDLLSLETGSLKLANGRVIEKTLYNRRTRQDEPALFVALTFERREVLDSSNIKPMNLIGVDRGENIPAVIALTDPEGCPLSRFKDSLGNPTHILRIGESYKEKQRTIQAKKEVEQRRAGGYSRKYASKAKNLADDMVRNTARDLLYYAVTQDAMLIFENLSRGFGRQGKRTFMAERQYTRMEDWLTAKLAYEGLPSKTYLSKTLAQYTSKTCSNCGFTITSADYDRVLEKLKKTATGWMTTINGKELKVEGQITYYNRYKRQNVVKDLSVELDRLSEESVNNDISSWTKGRSGEALSLLKKRFSHRPVQEKFVCLNCGFETHADEQAALNIARSWLFLRSQEYKKYQTNKTTGNTDKRAFVETWQSFYRKKLKEVWKPAV

SEQ ID NO: 42929 - protein, 978 aa, synthetic construct
  REGION 1..978: note = engineered CasX variant
QEIKRINKIRRRLVKDSNTKKAGKTGPMKTLLVRVMTPDLRERLENLRKKPENIPQPISNTSRANLNKLLTDYTEMKKAILHVYWEEFQKDPVGLMSRVAQPASKKIDQNKLKPEMDEKGNLTTAGFACSQCGQPLFVYKLEQVSEKGKAYTNYFGRCNVAEHEKLIKLAQLKPEKDSDEAVTYSLGKFGQRALDFYSIHVTKESTHPVKPLAQIAGNRYASYPVGKALSDACMGTIASFLSKYQDIIIEHQKVVKGNQKRLESLRELAGKENLEYPSVTLPPQPHTKEGVDAYNEVIARVRMWVNLNLWQKLKLSRDDAKPLLRLKGFPSFPLVERQANEVDWWDMVCNVKKLINEKKEDGKVFWQNLAIYKRQEALRPYLSSEEDRKKGKKFARYQLGDLLLHLEKKHGEDWGKVYDEAWERIDKKVEGLSKHIKLEEERRSEDAQSKAALTDWLRAKASFVIEGLKEADKDEFCRCELKLQKWYGDLRGKPFAIEAENSILDISGFSKQYNCAFIWQKDGVKKLNLYLIINYFKGGKLRFKKIKPEAFEANRFYTVINKKSGEIVPMEVNFNFDDPNLIILPLAFGKRQGREFIWNDLLSLETGSLKLANGRVIEKTLYNRRTRQDEPALFVALTFERREVLDSSNIKPMNLIGVDRGENIPAVIALTDPEGCPLSRFKDSLGNPTHILRIGESYKEKQRTIQAKKEVEQRRAGGYSRKYASKAKNLADDMVRNTARDLLYYAVTQDAMLIFENLSRGFGRQGKRTFMAERQYTRMEDWLTAKLAYEGLPSKTYLSKTLAQYTSKTCSNCGFTITSADYDRVLEKLKKTATGWMTTINGKELKVEGQITYYNRYKRQNVVKDLSVELDRLSEESVNNDISSWTKGRSGEALSLLKKRFSHRPVQEKFVCLNCGFETHADEQAALNIARSWLFLRSQEYKKYQTNKTTGNTDKRAFVETWQSFYRKKLKEVWKPAV

SEQ ID NO: 42930 - protein, 978 aa, synthetic construct
  REGION 1..978: note = engineered CasX variant
QEIKRINKIRRRLVKDSNTKKAGKTGPMKTLLVRVMTPDLRERLENLRKKPENIPQPISNTSRANLNKLLTDYTEMKKAILHVYWEEFQKDPVGLMSRVAQPASKKIDQNKLKPEMDEKGNLTTAGFACSQCGQPLFVYKLEQVSEKGKAYTNYFGRCNVAEHEKLIKLAQLKPEKDSDEAVTYSLGKFGQRALDFYSIHVTKESTHPVKPLAQIAGNRYASHPVGKALSDACMGTIASFLSKYQDIIIEHQKVVKGNQKRLESLRELAGKENLEYPSVTLPPQPHTKEGVDAYNEVIARVRMWVNLNLWQKLKLSRDDAKPLLRLKGFPSFPLVERQANEVDWWDMVCNVKKLINEKKEDGKVFWQNLAIYKRQEALRPYLSSEEDRKKGKKFARYQLGDLLLHLEKKHGEDWGKVYDEAWERIDKKVEGLSKHIKLEEERRSEDAQSKAALTDWLRAKASFVIEGLKEADKDEFCRCELKLQKWYGDLRGKPFAIEAENSILDISGFSKQYNCAFIWQKDGVKKLNLYLIINYFKGGKLRFKKIKPEAFEANRFYTVINKKSGEIVPMEVNFNFDDPNLIILPLAFGKRQGREFIWNDLLSLETGSLKLANGRVIEKTLYNRRTRQDEPALFVALTFERREVLDSSNIKPMNLIGVDRGENIPAVIALTDPEGCPLSRFKDSLGNPTHILRIGESYKEKQRTIQAKKEVEQRRAGGYSRKYASKAKNLADDMVRNTARDLLYYAVTQDAMLIFENLSRGFGRQGKRTFMAERQYTRMEDWLTAKLAYEGLPSKTYLSKTLAQYTSKTCSNCGFTITSADYDRVLEKLKKTATGWMTTINGKELKVEGQITYYNRYKRQNVVKDLSVELDRLSEESVNNDISSWTKGRSGEALSLLKKRFSHRPVQEKFVCLNCGFETHADEQAALNIARSWLFLRSQEYKKYQTNKTTGNTDKRAFVETWQSFYRKKLKEVWKPAV

SEQ ID NO: 42931 - protein, 978 aa, synthetic construct
  REGION 1..978: note = engineered CasX variant
QEIKRINKIRRRLVKDSNTKKAGKTGPMKTLLVRVMTPDLRERLENLRKKPENIPQPISNTSRANLNKLLTDYTEMKKAILHVYWEEFQKDPVGLMSRVAQPASKKIDQNKLKPEMDEKGNLTTAGFACSQCGQPLFVYKLEQVSEKGKAYTNYFGRCNVAEHEKLIKLAQLKPEKDSDEAVTYSLGKFGQRALDFYSIHVTKESTHPVKPLAQIAGNRYASTPVGKALSDACMGTIASFLSKYQDIIIEHQKVVKGNQKRLESLRELAGKENLEYPSVTLPPQPHTKEGVDAYNEVIARVRMWVNLNLWQKLKLSRDDAKPLLRLKGFPSFPLVERQANEVDWWDMVCNVKKLINEKKEDGKVFWQNLAIYKRQEALRPYLSSEEDRKKGKKFARYQLGDLLLHLEKKHGEDWGKVYDEAWERIDKKVEGLSKHIKLEEERRSEDAQSKAALTDWLRAKASFVIEGLKEADKDEFCRCELKLQKWYGDLRGKPFAIEAENSILDISGFSKQYNCAFIWQKDGVKKLNLYLIINYFKGGKLRFKKIKPEAFEANRFYTVINKKSGEIVPMEVNFNFDDPNLIILPLAFGKRQGREFIWNDLLSLETGSLKLANGRVIEKTLYNRRTRQDEPALFVALTFERREVLDSSNIKPMNLIGVDRGENIPAVIALTDPEGCPLSRFKDSLGNPTHILRIGESYKEKQRTIQAKKEVEQRRAGGYSRKYASKAKNLADDMVRNTARDLLYYAVTQDAMLIFENLSRGFGRQGKRTFMAERQYTRMEDWLTAKLAYEGLPSKTYLSKTLAQYTSKTCSNCGFTITSADYDRVLEKLKKTATGWMTTINGKELKVEGQITYYNRYKRQNVVKDLSVELDRLSEESVNNDISSWTKGRSGEALSLLKKRFSHRPVQEKFVCLNCGFETHADEQAALNIARSWLFLRSQEYKKYQTNKTTGNTDKRAFVETWQSFYRKKLKEVWKPAV

SEQ ID NO: 42932 - protein, 978 aa, synthetic construct
  REGION 1..978: note = engineered CasX variant
QEIKRINKIRRRLVKDSNTKKAGKTGPMKTLLVRVMTPDLRERLENLRKKPENIPQPISNTSRANLNKLLTDYTEMKKAILHVYWEEFQKDPVGLMSRVAQPASKKIDQNKLKPEMDEKGNLTTAGFACSQCGQPLFVYKLEQVSEKGKAYTNYFGRCNVAEHEKLIKLAQLKPEKDSDEAVTYSLGKFGQRALDFYSIHVTKESTHPVKPLAQIAGNRYASAPVGKALSDACMGTIASFLSKYQDIIIEHQKVVKGNQKRLESLRELAGKENLEYPSVTLPPQPHTKEGVDAYNEVIARVRMWVNLNLWQKLKLSRDDAKPLLRLKGFPSFPLVERQANEVDWWDMVCNVKKLINEKKEDGKVFWQNLAIYKRQEALRPYLSSEEDRKKGKKFARYQLGDLLLHLEKKHGEDWGKVYDEAWERIDKKVEGLSKHIKLEEERRSEDAQSKAALTDWLRAKASFVIEGLKEADKDEFCRCELKLQKWYGDLRGKPFAIEAENSILDISGFSKQYNCAFIWQKDGVKKLNLYLIINYFKGGKLRFKKIKPEAFEANRFYTVINKKSGEIVPMEVNFNFDDPNLIILPLAFGKRQGREFIWNDLLSLETGSLKLANGRVIEKTLYNRRTRQDEPALFVALTFERREVLDSSNIKPMNLIGVDRGENIPAVIALTDPEGCPLSRFKDSLGNPTHILRIGESYKEKQRTIQAKKEVEQRRAGGYSRKYASKAKNLADDMVRNTARDLLYYAVTQDAMLIFENLSRGFGRQGKRTFMAERQYTRMEDWLTAKLAYEGLPSKTYLSKTLAQYTSKTCSNCGFTITSADYDRVLEKLKKTATGWMTTINGKELKVEGQITYYNRYKRQNVVKDLSVELDRLSEESVNNDISSWTKGRSGEALSLLKKRFSHRPVQEKFVCLNCGFETHADEQAALNIARSWLFLRSQEYKKYQTNKTTGNTDKRAFVETWQSFYRKKLKEVWKPAV

SEQ ID NO: 42933 - protein, 978 aa, synthetic construct
  REGION 1..978: note = engineered CasX variant
QEIKRINKIRRRLVKDSNTKKAGKTGPMKTLLVRVMTPDLRERLENLRKKPENIPQPISNTSRANLNKLLTDYTEMKKAILHVYWEEFQKDPVGLMSRVAQPASKKIDQNKLKPEMDEKGNLTTAGFACSQCGQPLFVYKLEQVSEKGKAYTNYFGRCNVAEHEKLIKLAQLKPEKDSDEAVTYSLGKFGQRALDFYSIHVTKESTHPVKPLAQIAGNRYASVPVGKALSDACMGTIASFLSKYQDIIIEHQKVVKGNQKRLESLRELAGKENLEYPSVTLPPQPHTKEGVDAYNEVIARVRMWVNLNLWQKLKLSRDDAKPLLRLKGFPSFPLVERQANEVDWWDMVCNVKKLINEKKEDGKVFWQNLAIYKRQEALRPYLSSEEDRKKGKKFARYQLGDLLLHLEKKHGEDWGKVYDEAWERIDKKVEGLSKHIKLEEERRSEDAQSKAALTDWLRAKASFVIEGLKEADKDEFCRCELKLQKWYGDLRGKPFAIEAENSILDISGFSKQYNCAFIWQKDGVKKLNLYLIINYFKGGKLRFKKIKPEAFEANRFYTVINKKSGEIVPMEVNFNFDDPNLIILPLAFGKRQGREFIWNDLLSLETGSLKLANGRVIEKTLYNRRTRQDEPALFVALTFERREVLDSSNIKPMNLIGVDRGENIPAVIALTDPEGCPLSRFKDSLGNPTHILRIGESYKEKQRTIQAKKEVEQRRAGGYSRKYASKAKNLADDMVRNTARDLLYYAVTQDAMLIFENLSRGFGRQGKRTFMAERQYTRMEDWLTAKLAYEGLPSKTYLSKTLAQYTSKTCSNCGFTITSADYDRVLEKLKKTATGWMTTINGKELKVEGQITYYNRYKRQNVVKDLSVELDRLSEESVNNDISSWTKGRSGEALSLLKKRFSHRPVQEKFVCLNCGFETHADEQAALNIARSWLFLRSQEYKKYQTNKTTGNTDKRAFVETWQSFYRKKLKEVWKPAV

SEQ ID NO: 42934 - protein, 979 aa, synthetic construct
  REGION 1..979: note = engineered CasX variant
QEIKRINKIRRRLVKDSNTKKAGKTGPMKTLLVRVMTPDLRERLENLRKKPENIPQPISNTSRANLNKLLTDYTEMKKAILHVYWEEFQKDPVGLMSRVAQPASKKIDQNKLKPEMDEKGNLTTAGFACSQCGQPLFVYKLEQVSEKGKAYTNYFGRCNVAEHEKLIKKLAQLKPEKDSDEAVTYSLGKFGQRALDFYSIHVTKESTHPVKPLAQIAGNRYASGPVGKALSDACMGTIASFLSKYQDIIIEHQKVVKGNQKRLESLRELAGKENLEYPSVTLPPQPHTKEGVDAYNEVIARVRMWVNLNLWQKLKLSRDDAKPLLRLKGFPSFPLVERQANEVDWWDMVCNVKKLINEKKEDGKVFWQNLAIYKRQEALRPYLSSEEDRKKGKKFARYQLGDLLLHLEKKHGEDWGKVYDEAWERIDKKVEGLSKHIKLEEERRSEDAQSKAALTDWLRAKASFVIEGLKEADKDEFCRCELKLQKWYGDLRGKPFAIEAENSILDISGFSKQYNCAFIWQKDGVKKLNLYLIINYFKGGKLRFKKIKPEAFEANRFYTVINKKSGEIVPMEVNFNFDDPNLIILPLAFGKRQGREFIWNDLLSLETGSLKLANGRVIEKTLYNRRTRQDEPALFVALTFERREVLDSSNIKPMNLIGVDRGENIPAVIALTDPEGCPLSRFKDSLGNPTHILRIGESYKEKQRTIQAKKEVEQRRAGGYSRKYASKAKNLADDMVRNTARDLLYYAVTQDAMLIFENLSRGFGRQGKRTFMAERQYTRMEDWLTAKLAYEGLPSKTYLSKTLAQYTSKTCSNCGFTITSADYDRVLEKLKKTATGWMTTINGKELKVEGQITYYNRYKRQNVVKDLSVELDRLSEESVNNDISSWTKGRSGEALSLLKKRFSHRPVQEKFVCLNCGFETHADEQAALNIARSWLFLRSQEYKKYQTNKTTGNTDKRAFVETWQSFYRKKLKEVWKPAV

SEQ ID NO: 42935 - protein, 977 aa, synthetic construct
  REGION 1..977: note = engineered CasX variant
QEIKRINKIRRRLVKDSNTKKAGKTGPMKTLLVRVMTPDLRERLENLRKKPENIPQPISNTSRANLNKLLTDYTEMKKAILHVYWEEFQKDPVGLMSRVAQPASKKIDQNKLKPEMDEKGNLTTAGFACSQCGQPLFVYKLEQVSEKGKAYTNYFGRCNVAEHEKLIKLAQLKPEKDSDEAVTYSLGKFGQRALDFYSIHVTKESTHPVKPLAQIAGNRYASPVGKALSDACMGTIASFLSKYQDIIIEHQKVVKGNQKRLESLRELAGKENLEYPSVTLPPQPHTKEGVDAYNEVIARVRMWVNLNLWQKLKLSRDDAKPLLRLKGFPSFPLVERQANEVDWWDMVCNVKKLINEKKEDGKVFWQNLAIYKRQEALRPYLSSEEDRKKGKKFARYQLGDLLLHLEKKHGEDWGKVYDEAWERIDKKVEGLSKHIKLEEERRSEDAQSKAALTDWLRAKASFVIEGLKEADKDEFCRCELKLQKWYGDLRGKPFAIEAENSILDISGFSKQYNCAFIWQKDGVKKLNLYLIINYFKGGKLRFKKIKPEAFEANRFYTVINKKSGEIVPMEVNFNFDDPNLIILPLAFGKRQGREFIWNDLLSLETGSLKLANGRVIEKTLYNRRTRQDEPALFVALTFERREVLDSSNIKPMNLIGVDRGENIPAVIALTDPEGCPLSRFKDSLGNPTHILRIGESYKEKQRTIQAKKEVEQRRAGGYSRKYASKAKNLADDMVRNTARDLLYYAVTQDAMLIFENLSRGFGRQGKRTFMAERQYTRMEDWLTAKLAYEGLPSKTYLSKTLAQYTSKTCSNCGFTITSADYDRVLEKLKKTATGWMTTINGKELKVEGQITYYNRYKRQNVVKDLSVELDRLSEESVNNDISSWTKGRSGEALSLLKKRFSHRPVQEKFVCLNCGFETHADEQAALNIARSWLFLRSQEYKKYQTNKTTGNTDKRAFVETWQSFYRKKLKEVWKPAV

SEQ ID NO: 42936 - protein, 978 aa, synthetic construct
  REGION 1..978: note = engineered CasX variant
QEIKRINKIRRRLVKDSNTKKAGKTGPMKTLLVRVMTPDLRERLENLRKKPENIPQPISNTSRANLNKLLTDYTEMKKAILHVYWEEFQKDPVGLMSRVAQPASKKIDQNKLKPEMDEKGNLTTAGFACSQCGQPLFVYKLEQVSEKGKAYTNYFGRCNVAEHEKLIKLAQLKPEKDSDEAVTYSLGKFGQRALDFYSIHVTKESTHPVKPLAQIAGNRYASYPVGKALSDACMGTIASFLSKYQDIIIEHQKVVKGNQKRLESLRELAGKENLEYPSVTLPPQPHTKEGVDAYNEVIARVRMWVNLNLWQKLKLSRDDAKPLLRLKGFPSFPLVERQANEVDWWDMVCNVKKLINEKKEDGKVFWQNLAGYKRQEALRPYLSSEEDREKGKKFARYQLGDLLLHLEKKHGEDWGKVYDEAWERIDKKVEGLSKHIKLEEERRSEDAQSKAALTDWLRAKASFVIEGLKEADKDEFCRCELKLQKWYGDLRGKPFAIEAENSILDISGFSKQYNCAFIWQKDGVKKLNLYLIINYFKGGKLRFKKIKPEAFEANRFYTVINKKSGEIVPMEVNFNFDDPNLIILPLAFGKRQGREFIWNDLLSLETGSLKLANGRVIEKTLYNRRTRQDEPALFVALTFERREVLDSSNIKPMNLIGVDRGENIPAVIALTDPEGCPLSRFKDSLGNPTHILRIGESYKEKQRTIQAKKEVEQRRAGGYSRKYASKAKNLADDMVRNTARDLLYYAVTQDAMLIFENLSRGFGRQGKRTFMAERQYTRMEDWLTAKLAYEGLPSKTYLSKTLAQYTSKTCSNCGFTITSADYDRVLEKLKKTATGWMTTINGKELKVEGQITYYNRYKRQNVVKDLSVELDRLSEESVNNDISSWTKGRSGEALSLLKKRFSHRPVQEKFVCLNCGFETHADEQAALNIARSWLFLRSQEYKKYQTNKTTGNTDKRAFVETWQSFYRKKLKEVWKPAV

SEQ ID NO: 42937 - protein, 978 aa, synthetic construct
  REGION 1..978: note = engineered CasX variant
QEIKRINKIRRRLVKDSNTKKAGKTGPMKTLLVRVMTPDLRERLENLRKKPENIPQPISNTSRANLNKLLTDYTEMKKAILHVYWEEFQKDPVGLMSRVAQPASKKIDQNKLKPEMDEKGNLTTAGFACSQCGQPLFVYKLEQVSEKGKAYTNYFGRCNVAEHEKLIKLAQLKPEKDSDEAVTYSLGKFGQRALDFYSIHVTKESTHPVKPLAQIAGNRYASHPVGKALSDACMGTIASFLSKYQDIIIEHQKVVKGNQKRLESLRELAGKENLEYPSVTLPPQPHTKEGVDAYNEVIARVRMWVNLNLWQKLKLSRDDAKPLLRLKGFPSFPLVERQANEVDWWDMVCNVKKLINEKKEDGKVFWQNLAGYKRQEALRPYLSSEEDREKGKKFARYQLGDLLLHLEKKHGEDWGKVYDEAWERIDKKVEGLSKHIKLEEERRSEDAQSKAALTDWLRAKASFVIEGLKEADKDEFCRCELKLQKWYGDLRGKPFAIEAENSILDISGFSKQYNCAFIWQKDGVKKLNLYLIINYFKGGKLRFKKIKPEAFEANRFYTVINKKSGEIVPMEVNFNFDDPNLIILPLAFGKRQGREFIWNDLLSLETGSLKLANGRVIEKTLYNRRTRQDEPALFVALTFERREVLDSSNIKPMNLIGVDRGENIPAVIALTDPEGCPLSRFKDSLGNPTHILRIGESYKEKQRTIQAKKEVEQRRAGGYSRKYASKAKNLADDMVRNTARDLLYYAVTQDAMLIFENLSRGFGRQGKRTFMAERQYTRMEDWLTAKLAYEGLPSKTYLSKTLAQYTSKTCSNCGFTITSADYDRVLEKLKKTATGWMTTINGKELKVEGQITYYNRYKRQNVVKDLSVELDRLSEESVNNDISSWTKGRSGEALSLLKKRFSHRPVQEKFVCLNCGFETHADEQAALNIARSWLFLRSQEYKKYQTNKTTGNTDKRAFVETWQSFYRKKLKEVWKPAV

SEQ ID NO: 42938 - protein, 978 aa, synthetic construct
  REGION 1..978: note = engineered CasX variant
QEIKRINKIRRRLVKDSNTKKAGKTGPMKTLLVRVMTPDLRERLENLRKKPENIPQPISNTSRANLNKLLTDYTEMKKAILHVYWEEFQKDPVGLMSRVAQPASKKIDQNKLKPEMDEKGNLTTAGFACSQCGQPLFVYKLEQVSEKGKAYTNYFGRCNVAEHEKLIKLAQLKPEKDSDEAVTYSLGKFGQRALDFYSIHVTKESTHPVKPLAQIAGNRYASTPVGKALSDACMGTIASFLSKYQDIIIEHQKVVKGNQKRLESLRELAGKENLEYPSVTLPPQPHTKEGVDAYNEVIARVRMWVNLNLWQKLKLSRDDAKPLLRLKGFPSFPLVERQANEVDWWDMVCNVKKLINEKKEDGKVFWQNLAGYKRQEALRPYLSSEEDREKGKKFARYQLGDLLLHLEKKHGEDWGKVYDEAWERIDKKVEGLSKHIKLEEERRSEDAQSKAALTDWLRAKASFVIEGLKEADKDEFCRCELKLQKWYGDLRGKPFAIEAENSILDISGFSKQYNCAFIWQKDGVKKLNLYLIINYFKGGKLRFKKIKPEAFEANRFYTVINKKSGEIVPMEVNFNFDDPNLIILPLAFGKRQGREFIWNDLLSLETGSLKLANGRVIEKTLYNRRTRQDEPALFVALTFERREVLDSSNIKPMNLIGVDRGENIPAVIALTDPEGCPLSRFKDSLGNPTHILRIGESYKEKQRTIQAKKEVEQRRAGGYSRKYASKAKNLADDMVRNTARDLLYYAVTQDAMLIFENLSRGFGRQGKRTFMAERQYTRMEDWLTAKLAYEGLPSKTYLSKTLAQYTSKTCSNCGFTITSADYDRVLEKLKKTATGWMTTINGKELKVEGQITYYNRYKRQNVVKDLSVELDRLSEESVNNDISSWTKGRSGEALSLLKKRFSHRPVQEKFVCLNCGFETHADEQAALNIARSWLFLRSQEYKKYQTNKTTGNTDKRAFVETWQSFYRKKLKEVWKPAV

SEQ ID NO: 42939 - protein, 978 aa, synthetic construct
  REGION 1..978: note = engineered CasX variant
QEIKRINKIRRRLVKDSNTKKAGKTGPMKTLLVRVMTPDLRERLENLRKKPENIPQPISNTSRANLNKLLTDYTEMKKAILHVYWEEFQKDPVGLMSRVAQPASKKIDQNKLKPEMDEKGNLTTAGFACSQCGQPLFVYKLEQVSEKGKAYTNYFGRCNVAEHEKLIKLAQLKPEKDSDEAVTYSLGKFGQRALDFYSIHVTKESTHPVKPLAQIAGNRYASAPVGKALSDACMGTIASFLSKYQDIIIEHQKVVKGNQKRLESLRELAGKENLEYPSVTLPPQPHTKEGVDAYNEVIARVRMWVNLNLWQKLKLSRDDAKPLLRLKGFPSFPLVERQANEVDWWDMVCNVKKLINEKKEDGKVFWQNLAGYKRQEALRPYLSSEEDREKGKKFARYQLGDLLLHLEKKHGEDWGKVYDEAWERIDKKVEGLSKHIKLEEERRSEDAQSKAALTDWLRAKASFVIEGLKEADKDEFCRCELKLQKWYGDLRGKPFAIEAENSILDISGFSKQYNCAFIWQKDGVKKLNLYLIINYFKGGKLRFKKIKPEAFEANRFYTVINKKSGEIVPMEVNFNFDDPNLIILPLAFGKRQGREFIWNDLLSLETGSLKLANGRVIEKTLYNRRTRQDEPALFVALTFERREVLDSSNIKPMNLIGVDRGENIPAVIALTDPEGCPLSRFKDSLGNPTHILRIGESYKEKQRTIQAKKEVEQRRAGGYSRKYASKAKNLADDMVRNTARDLLYYAVTQDAMLIFENLSRGFGRQGKRTFMAERQYTRMEDWLTAKLAYEGLPSKTYLSKTLAQYTSKTCSNCGFTITSADYDRVLEKLKKTATGWMTTINGKELKVEGQITYYNRYKRQNVVKDLSVELDRLSEESVNNDISSWTKGRSGEALSLLKKRFSHRPVQEKFVCLNCGFETHADEQAALNIARSWLFLRSQEYKKYQTNKTTGNTDKRAFVETWQSFYRKKLKEVWKPAV

SEQ ID NO: 42940 - protein, 978 aa, synthetic construct
  REGION 1..978: note = engineered CasX variant
QEIKRINKIRRRLVKDSNTKKAGKTGPMKTLLVRVMTPDLRERLENLRKKPENIPQPISNTSRANLNKLLTDYTEMKKAILHVYWEEFQKDPVGLMSRVAQPASKKIDQNKLKPEMDEKGNLTTAGFACSQCGQPLFVYKLEQVSEKGKAYTNYFGRCNVAEHEKLIKLAQLKPEKDSDEAVTYSLGKFGQRALDFYSIHVTKESTHPVKPLAQIAGNRYASVPVGKALSDACMGTIASFLSKYQDIIIEHQKVVKGNQKRLESLRELAGKENLEYPSVTLPPQPHTKEGVDAYNEVIARVRMWVNLNLWQKLKLSRDDAKPLLRLKGFPSFPLVERQANEVDWWDMVCNVKKLINEKKEDGKVFWQNLAGYKRQEALRPYLSSEEDREKGKKFARYQLGDLLLHLEKKHGEDWGKVYDEAWERIDKKVEGLSKHIKLEEERRSEDAQSKAALTDWLRAKASFVIEGLKEADKDEFCRCELKLQKWYGDLRGKPFAIEAENSILDISGFSKQYNCAFIWQKDGVKKLNLYLIINYFKGGKLRFKKIKPEAFEANRFYTVINKKSGEIVPMEVNFNFDDPNLIILPLAFGKRQGREFIWNDLLSLETGSLKLANGRVIEKTLYNRRTRQDEPALFVALTFERREVLDSSNIKPMNLIGVDRGENIPAVIALTDPEGCPLSRFKDSLGNPTHILRIGESYKEKQRTIQAKKEVEQRRAGGYSRKYASKAKNLADDMVRNTARDLLYYAVTQDAMLIFENLSRGFGRQGKRTFMAERQYTRMEDWLTAKLAYEGLPSKTYLSKTLAQYTSKTCSNCGFTITSADYDRVLEKLKKTATGWMTTINGKELKVEGQITYYNRYKRQNVVKDLSVELDRLSEESVNNDISSWTKGRSGEALSLLKKRFSHRPVQEKFVCLNCGFETHADEQAALNIARSWLFLRSQEYKKYQTNKTTGNTDKRAFVETWQSFYRKKLKEVWKPAV

SEQ ID NO: 42941 - protein, 979 aa, synthetic construct
  REGION 1..979: note = engineered CasX variant
QEIKRINKIRRRLVKDSNTKKAGKTGPMKTLLVRVMTPDLRERLENLRKKPENIPQPISNTSRANLNKLLTDYTEMKKAILHVYWEEFQKDPVGLMSRVAQPASKKIDQNKLKPEMDEKGNLTTAGFACSQCGQPLFVYKLEQVSEKGKAYTNYFGRCNVAEHEKLIKKLAQLKPEKDSDEAVTYSLGKFGQRALDFYSIHVTKESTHPVKPLAQIAGNRYASGPVGKALSDACMGTIASFLSKYQDIIIEHQKVVKGNQKRLESLRELAGKENLEYPSVTLPPQPHTKEGVDAYNEVIARVRMWVNLNLWQKLKLSRDDAKPLLRLKGFPSFPLVERQANEVDWWDMVCNVKKLINEKKEDGKVFWQNLAGYKRQEALRPYLSSEEDREKGKKFARYQLGDLLLHLEKKHGEDWGKVYDEAWERIDKKVEGLSKHIKLEEERRSEDAQSKAALTDWLRAKASFVIEGLKEADKDEFCRCELKLQKWYGDLRGKPFAIEAENSILDISGFSKQYNCAFIWQKDGVKKLNLYLIINYFKGGKLRFKKIKPEAFEANRFYTVINKKSGEIVPMEVNFNFDDPNLIILPLAFGKRQGREFIWNDLLSLETGSLKLANGRVIEKTLYNRRTRQDEPALFVALTFERREVLDSSNIKPMNLIGVDRGENIPAVIALTDPEGCPLSRFKDSLGNPTHILRIGESYKEKQRTIQAKKEVEQRRAGGYSRKYASKAKNLADDMVRNTARDLLYYAVTQDAMLIFENLSRGFGRQGKRTFMAERQYTRMEDWLTAKLAYEGLPSKTYLSKTLAQYTSKTCSNCGFTITSADYDRVLEKLKKTATGWMTTINGKELKVEGQITYYNRYKRQNVVKDLSVELDRLSEESVNNDISSWTKGRSGEALSLLKKRFSHRPVQEKFVCLNCGFETHADEQAALNIARSWLFLRSQEYKKYQTNKTTGNTDKRAFVETWQSFYRKKLKEVWKPAV

SEQ ID NO: 42942 - protein, 977 aa, synthetic construct
  REGION 1..977: note = engineered CasX variant
QEIKRINKIRRRLVKDSNTKKAGKTGPMKTLLVRVMTPDLRERLENLRKKPENIPQPISNTSRANLNKLLTDYTEMKKAILHVYWEEFQKDPVGLMSRVAQPASKKIDQNKLKPEMDEKGNLTTAGFACSQCGQPLFVYKLEQVSEKGKAYTNYFGRCNVAEHEKLIKLAQLKPEKDSDEAVTYSLGKFGQRALDFYSIHVTKESTHPVKPLAQIAGNRYASPVGKALSDACMGTIASFLSKYQDIIIEHQKVVKGNQKRLESLRELAGKENLEYPSVTLPPQPHTKEGVDAYNEVIARVRMWVNLNLWQKLKLSRDDAKPLLRLKGFPSFPLVERQANEVDWWDMVCNVKKLINEKKEDGKVFWQNLAGYKRQEALRPYLSSEEDREKGKKFARYQLGDLLLHLEKKHGEDWGKVYDEAWERIDKKVEGLSKHIKLEEERRSEDAQSKAALTDWLRAKASFVIEGLKEADKDEFCRCELKLQKWYGDLRGKPFAIEAENSILDISGFSKQYNCAFIWQKDGVKKLNLYLIINYFKGGKLRFKKIKPEAFEANRFYTVINKKSGEIVPMEVNFNFDDPNLIILPLAFGKRQGREFIWNDLLSLETGSLKLANGRVIEKTLYNRRTRQDEPALFVALTFERREVLDSSNIKPMNLIGVDRGENIPAVIALTDPEGCPLSRFKDSLGNPTHILRIGESYKEKQRTIQAKKEVEQRRAGGYSRKYASKAKNLADDMVRNTARDLLYYAVTQDAMLIFENLSRGFGRQGKRTFMAERQYTRMEDWLTAKLAYEGLPSKTYLSKTLAQYTSKTCSNCGFTITSADYDRVLEKLKKTATGWMTTINGKELKVEGQITYYNRYKRQNVVKDLSVELDRLSEESVNNDISSWTKGRSGEALSLLKKRFSHRPVQEKFVCLNCGFETHADEQAALNIARSWLFLRSQEYKKYQTNKTTGNTDKRAFVETWQSFYRKKLKEVWKPAV

SEQ ID NO: 42943 - protein, 978 aa, synthetic construct
  REGION 1..978: note = engineered CasX variant
QEIKRINKIRRRLVKDSNTKKAGKTGPMKTLLVRVMTPDLRERLENLRKKPENIPQPISNTSRANLNKLLTDYTEMKKAILHVYWEEFQKDPVGLMSRVAQPASKKIDQNKLKPEMDEKGNLTTAGFACSQCGQPLFVYKLEQVSEKGKAYTNYFGRCNVAEHEKLIKLAQLKPEKDSDEAVTYSLGKFGQRALDFYSIHVTKESTHPVKPLAQIAGNRYASYPVGKALSDACMGTIASFLSKYQDIIIEHQKVVKGNQKRLESLRELAGKENLEYPSVTLPPQPHTKEGVDAYNEVIARVRMWVNLNLWQKLKLSRDDAKPLLRLKGFPSFPLVERQANEVDWWDMVCNVKKLINEKKEDGKVFWQNLAGYKRQEALRPYLSSEEDRKKGKKFARYQLGDLLLHLEKKHGEDWGKVYDEAWERIDKKVEGLSKHIKLEEERRSEDAQSKAALTDWLRAKASFVIEGLKEADKDEFCRCELKLQKWYGDLRGKPFAIEAENSILDISGFSKQYNCAFIWQKDGVKKLNLYLIINYFKGGKLRFKKIKPEAFEANRFYTVINKKSGEIVIMEVNFNFDDPNLIILPLAFGKRQGREFIWNDLLSLETGSLKLANGRVIEKTLYNRRTRQDEPALFVALTFERREVLDSSNIKPMNLIGVDRGENIPAVIALTDPEGCPLSRFKDSLGNPTHILRIGESYKEKQRTIQAKKEVEQRRAGGYSRKYASKAKNLADDMVRNTARDLLYYAVTQDAMLIFENLSRGFGRQGKRTFMAERQYTRMEDWLTAKLAYEGLPSKTYLSKTLAQYTSKTCSNCGFTITSADYDRVLEKLKKTATGWMTTINGKELKVEGQITYYNRYKRQNVVKDLSVELDRLSEESVNNDISSWTKGRSGEALSLLKKRFSHRPVQEKFVCLNCGFETHADEQAALNIARSWLFLRSQEYKKYQTNKTTGNTDKRAFVETWQSFYRKKLKEVWKPAV

SEQ ID NO: 42944 - protein, 978 aa, synthetic construct
  REGION 1..978: note = engineered CasX variant
QEIKRINKIRRRLVKDSNTKKAGKTGPMKTLLVRVMTPDLRERLENLRKKPENIPQPISNTSRANLNKLLTDYTEMKKAILHVYWEEFQKDPVGLMSRVAQPASKKIDQNKLKPEMDEKGNLTTAGFACSQCGQPLFVYKLEQVSEKGKAYTNYFGRCNVAEHEKLIKLAQLKPEKDSDEAVTYSLGKFGQRALDFYSIHVTKESTHPVKPLAQIAGNRYASHPVGKALSDACMGTIASFLSKYQDIIIEHQKVVKGNQKRLESLRELAGKENLEYPSVTLPPQPHTKEGVDAYNEVIARVRMWVNLNLWQKLKLSRDDAKPLLRLKGFPSFPLVERQANEVDWWDMVCNVKKLINEKKEDGKVFWQNLAGYKRQEALRPYLSSEEDRKKGKKFARYQLGDLLLHLEKKHGEDWGKVYDEAWERIDKKVEGLSKHIKLEEERRSEDAQSKAALTDWLRAKASFVIEGLKEADKDEFCRCELKLQKWYGDLRGKPFAIEAENSILDISGFSKQYNCAFIWQKDGVKKLNLYLIINYFKGGKLRFKKIKPEAFEANRFYTVINKKSGEIVIMEVNFNFDDPNLIILPLAFGKRQGREFIWNDLLSLETGSLKLANGRVIEKTLYNRRTRQDEPALFVALTFERREVLDSSNIKPMNLIGVDRGENIPAVIALTDPEGCPLSRFKDSLGNPTHILRIGESYKEKQRTIQAKKEVEQRRAGGYSRKYASKAKNLADDMVRNTARDLLYYAVTQDAMLIFENLSRGFGRQGKRTFMAERQYTRMEDWLTAKLAYEGLPSKTYLSKTLAQYTSKTCSNCGFTITSADYDRVLEKLKKTATGWMTTINGKELKVEGQITYYNRYKRQNVVKDLSVELDRLSEESVNNDISSWTKGRSGEALSLLKKRFSHRPVQEKFVCLNCGFETHADEQAALNIARSWLFLRSQEYKKYQTNKTTGNTDKRAFVETWQSFYRKKLKEVWKPAV

SEQ ID NO: 42945 - protein, 978 aa, synthetic construct
  REGION 1..978: note = engineered CasX variant
QEIKRINKIRRRLVKDSNTKKAGKTGPMKTLLVRVMTPDLRERLENLRKKPENIPQPISNTSRANLNKLLTDYTEMKKAILHVYWEEFQKDPVGLMSRVAQPASKKIDQNKLKPEMDEKGNLTTAGFACSQCGQPLFVYKLEQVSEKGKAYTNYFGRCNVAEHEKLIKLAQLKPEKDSDEAVTYSLGKFGQRALDFYSIHVTKESTHPVKPLAQIAGNRYASTPVGKALSDACMGTIASFLSKYQDIIIEHQKVVKGNQKRLESLRELAGKENLEYPSVTLPPQPHTKEGVDAYNEVIARVRMWVNLNLWQKLKLSRDDAKPLLRLKGFPSFPLVERQANEVDWWDMVCNVKKLINEKKEDGKVFWQNLAGYKRQEALRPYLSSEEDRKKGKKFARYQLGDLLLHLEKKHGEDWGKVYDEAWERIDKKVEGLSKHIKLEEERRSEDAQSKAALTDWLRAKASFVIEGLKEADKDEFCRCELKLQKWYGDLRGKPFAIEAENSILDISGFSKQYNCAFIWQKDGVKKLNLYLIINYFKGGKLRFKKIKPEAFEANRFYTVINKKSGEIVIMEVNFNFDDPNLIILPLAFGKRQGREFIWNDLLSLETGSLKLANGRVIEKTLYNRRTRQDEPALFVALTFERREVLDSSNIKPMNLIGVDRGENIPAVIALTDPEGCPLSRFKDSLGNPTHILRIGESYKEKQRTIQAKKEVEQRRAGGYSRKYASKAKNLADDMVRNTARDLLYYAVTQDAMLIFENLSRGFGRQGKRTFMAERQYTRMEDWLTAKLAYEGLPSKTYLSKTLAQYTSKTCSNCGFTITSADYDRVLEKLKKTATGWMTTINGKELKVEGQITYYNRYKRQNVVKDLSVELDRLSEESVNNDISSWTKGRSGEALSLLKKRFSHRPVQEKFVCLNCGFETHADEQAALNIARSWLFLRSQEYKKYQTNKTTGNTDKRAFVETWQSFYRKKLKEVWKPAV

SEQ ID NO: 42946 - protein, 978 aa, synthetic construct
  REGION 1..978: note = engineered CasX variant
QEIKRINKIRRRLVKDSNTKKAGKTGPMKTLLVRVMTPDLRERLENLRKKPENIPQPISNTSRANLNKLLTDYTEMKKAILHVYWEEFQKDPVGLMSRVAQPASKKIDQNKLKPEMDEKGNLTTAGFACSQCGQPLFVYKLEQVSEKGKAYTNYFGRCNVAEHEKLIKLAQLKPEKDSDEAVTYSLGKFGQRALDFYSIHVTKESTHPVKPLAQIAGNRYASAPVGKALSDACMGTIASFLSKYQDIIIEHQKVVKGNQKRLESLRELAGKENLEYPSVTLPPQPHTKEGVDAYNEVIARVRMWVNLNLWQKLKLSRDDAKPLLRLKGFPSFPLVERQANEVDWWDMVCNVKKLINEKKEDGKVFWQNLAGYKRQEALRPYLSSEEDRKKGKKFARYQLGDLLLHLEKKHGEDWGKVYDEAWERIDKKVEGLSKHIKLEEERRSEDAQSKAALTDWLRAKASFVIEGLKEADKDEFCRCELKLQKWYGDLRGKPFAIEAENSILDISGFSKQYNCAFIWQKDGVKKLNLYLIINYFKGGKLRFKKIKPEAFEANRFYTVINKKSGEIVIMEVNFNFDDPNLIILPLAFGKRQGREFIWNDLLSLETGSLKLANGRVIEKTLYNRRTRQDEPALFVALTFERREVLDSSNIKPMNLIGVDRGENIPAVIALTDPEGCPLSRFKDSLGNPTHILRIGESYKEKQRTIQAKKEVEQRRAGGYSRKYASKAKNLADDMVRNTARDLLYYAVTQDAMLIFENLSRGFGRQGKRTFMAERQYTRMEDWLTAKLAYEGLPSKTYLSKTLAQYTSKTCSNCGFTITSADYDRVLEKLKKTATGWMTTINGKELKVEGQITYYNRYKRQNVVKDLSVELDRLSEESVNNDISSWTKGRSGEALSLLKKRFSHRPVQEKFVCLNCGFETHADEQAALNIARSWLFLRSQEYKKYQTNKTTGNTDKRAFVETWQSFYRKKLKEVWKPAV

SEQ ID NO: 42947 - protein, 978 aa, synthetic construct
  REGION 1..978: note = engineered CasX variant
QEIKRINKIRRRLVKDSNTKKAGKTGPMKTLLVRVMTPDLRERLENLRKKPENIPQPISNTSRANLNKLLTDYTEMKKAILHVYWEEFQKDPVGLMSRVAQPASKKIDQNKLKPEMDEKGNLTTAGFACSQCGQPLFVYKLEQVSEKGKAYTNYFGRCNVAEHEKLIKLAQLKPEKDSDEAVTYSLGKFGQRALDFYSIHVTKESTHPVKPLAQIAGNRYASVPVGKALSDACMGTIASFLSKYQDIIIEHQKVVKGNQKRLESLRELAGKENLEYPSVTLPPQPHTKEGVDAYNEVIARVRMWVNLNLWQKLKLSRDDAKPLLRLKGFPSFPLVERQANEVDWWDMVCNVKKLINEKKEDGKVFWQNLAGYKRQEALRPYLSSEEDRKKGKKFARYQLGDLLLHLEKKHGEDWGKVYDEAWERIDKKVEGLSKHIKLEEERRSEDAQSKAALTDWLRAKASFVIEGLKEADKDEFCRCELKLQKWYGDLRGKPFAIEAENSILDISGFSKQYNCAFIWQKDGVKKLNLYLIINYFKGGKLRFKKIKPEAFEANRFYTVINKKSGEIVIMEVNFNFDDPNLIILPLAFGKRQGREFIWNDLLSLETGSLKLANGRVIEKTLYNRRTRQDEPALFVALTFERREVLDSSNIKPMNLIGVDRGENIPAVIALTDPEGCPLSRFKDSLGNPTHILRIGESYKEKQRTIQAKKEVEQRRAGGYSRKYASKAKNLADDMVRNTARDLLYYAVTQDAMLIFENLSRGFGRQGKRTFMAERQYTRMEDWLTAKLAYEGLPSKTYLSKTLAQYTSKTCSNCGFTITSADYDRVLEKLKKTATGWMTTINGKELKVEGQITYYNRYKRQNVVKDLSVELDRLSEESVNNDISSWTKGRSGEALSLLKKRFSHRPVQEKFVCLNCGFETHADEQAALNIARSWLFLRSQEYKKYQTNKTTGNTDKRAFVETWQSFYRKKLKEVWKPAV

SEQ ID NO: 42948 - protein, 979 aa, synthetic construct
  REGION 1..979: note = engineered CasX variant
QEIKRINKIRRRLVKDSNTKKAGKTGPMKTLLVRVMTPDLRERLENLRKKPENIPQPISNTSRANLNKLLTDYTEMKKAILHVYWEEFQKDPVGLMSRVAQPASKKIDQNKLKPEMDEKGNLTTAGFACSQCGQPLFVYKLEQVSEKGKAYTNYFGRCNVAEHEKLIKKLAQLKPEKDSDEAVTYSLGKFGQRALDFYSIHVTKESTHPVKPLAQIAGNRYASGPVGKALSDACMGTIASFLSKYQDIIIEHQKVVKGNQKRLESLRELAGKENLEYPSVTLPPQPHTKEGVDAYNEVIARVRMWVNLNLWQKLKLSRDDAKPLLRLKGFPSFPLVERQANEVDWWDMVCNVKKLINEKKEDGKVFWQNLAGYKRQEALRPYLSSEEDRKKGKKFARYQLGDLLLHLEKKHGEDWGKVYDEAWERIDKKVEGLSKHIKLEEERRSEDAQSKAALTDWLRAKASFVIEGLKEADKDEFCRCELKLQKWYGDLRGKPFAIEAENSILDISGFSKQYNCAFIWQKDGVKKLNLYLIINYFKGGKLRFKKIKPEAFEANRFYTVINKKSGEIVIMEVNFNFDDPNLIILPLAFGKRQGREFIWNDLLSLETGSLKLANGRVIEKTLYNRRTRQDEPALFVALTFERREVLDSSNIKPMNLIGVDRGENIPAVIALTDPEGCPLSRFKDSLGNPTHILRIGESYKEKQRTIQAKKEVEQRRAGGYSRKYASKAKNLADDMVRNTARDLLYYAVTQDAMLIFENLSRGFGRQGKRTFMAERQYTRMEDWLTAKLAYEGLPSKTYLSKTLAQYTSKTCSNCGFTITSADYDRVLEKLKKTATGWMTTINGKELKVEGQITYYNRYKRQNVVKDLSVELDRLSEESVNNDISSWTKGRSGEALSLLKKRFSHRPVQEKFVCLNCGFETHADEQAALNIARSWLFLRSQEYKKYQTNKTTGNTDKRAFVETWQSFYRKKLKEVWKPAV
